United States Patent Application Publication US 2013/0096032 A1 - sequence listing, part 18

SEQ ID NO: 580 - DNA, 200576 bp, Arabidopsis thaliana
aagcttcctccttcacgttattagccactgacagcatcagaaaggttctctagaactctagaacctaagcaaatgtcacaatgctctcgattatcttattactcaccaaagataagctccagttttttgaactagttaaatgtattataattagaacgatgtgagacttttgcttcaaggtcgttgagtgtgagaaatggttttctttgatgttacctggtaaagatgccatgaagcataagcatccgttgttgtttatgctcctttgacctcccaattcaagcctaattctgtttggcttcaggagctgcaaagtaacagtttttaaagcgaaatataaccacattcccaaagttctaaatagaaagaaaaaaacaagctttgaaatcaacaagataaggtggataatgggtacctctttgcaatcaagtgtctcagttagcgaggcacggccccatttttctgaatcaaggtttttgtgggctaaacgtaaaagatcttcgacatctttgatggatacaccattgtcatggaaaagcttaacaaagtcacagtcaattcaaacaccacatataagaactaagttaagtatgagcatatccatacttaactacagaataatattgtccaacatgaactttgatcacttcaaaaccttaacaagtcaatagtcaatgtatagatttcttagctacagaatcagtagctaagtatggatatgctcatatactaggttgttgtatcagaattgtaaaatttcttggcctggtttataaagtggtatgtgtttaaaagaaaaataaaagaagtaaaatgttatattcaagattcatggggcacattgtgaccagtaaaggactcgataaactcaacaattttgagggctttgggtgtggtcaaccgagtgaaactgtgcaaggaagcacgctcatgcaacttgaagttttaatgtatgtcttgttcgttttgtaattttaaatctctgttggctgcggtgtggtgtgtctccgtttagatgcagttttggttccggtgtgtcatgatgtagtgctaacctttaaccttctttataatcaggatatgtagcaatgctcctccattagctctaactcaccaaagacaaactttgtgcagccagttccacgtaaaaagtggggtttgtttgtattattacctgatgatatataatcggttgctgcttatttaacagaggatgcatgggcctcctagtttccgaacctgatgatgttcggtttcaagagctgaaattgaattgtaacagaatgatcaatatagttagaccagttgtcactattgttctgtagactcactatcggccacatatatacaaaggactagattctaagcatcactataaaaaaaccaataaactttcagagggtttctaataaactaaaagatttcaccataacagtggcggctggtgccacagctcacacgcctgtcttcatcaactcaggttccagtttcattctcacacggcatttcaatctctagaacgagggaacacatgcaacaaaagcctcaaagattaacctccaccacacggcaagagaactgcgatgaatagtcaaaggaatattcgattttctgtggaagcgattagtctttacagaagaattttcaagtcaagctttaatttatttcgaaaatatggagacaatccaatgatcaattcgtttcacagaaaataaataaaaaccaatcacagaaaaaacattctacagcaagatgataacaataatatggagcttgtgtttaatcttctgcctttcaaactcaatacttgttattgctaaagacttgtgtcttccagaccagagggatgctcttttggagttcaagaacgagttctctatcccaagccccgattctgatttgatgctgattcttcagacgacagcgaagtggaggaacaacactgattgctgttcttggggtggtatctcttgtgatcctaagacgggagtggtggttgagttagacctcggaaacagtgatctcaatggccgtctgagatctaatagcagcctgtttagactacaacatcttcagagcctagatctttcctacaatgatctttcgtgtaccctaccagattccagcggcaacttcaaatatttgagagttttgaacctccttggttgcaatctctttggagagattcctacatcacttagaagtctttcttacctcactgatcttgatctttcttataatgatgatctcaccggtgagatactggattcgatgggcaatctcaaacatttgagggttttgagtcttactagttgcaaattcaccggaaagattccttcttcactcggaaatcttacttatctcactgatcttgatctttcttggaattatttcaccggtgagttaccagattcgatgggcaatctcaaatctttgagggttttgaatcttcatcgttgcaatttctttggaaagattcctacttcactcggaagtctttctaatctcactgatcttgatatttctaaaaatgagttcaccagtgaaggaccagattcgatgagcagcctaaaccgactaacagattttcaacttatgctactcaacttgagctcactcaccaatgtcgaccttagttctaaccagttcaaagctatgctcccatctaacatgagtagcctttccaaactggaggcttttgatattagtggaaattcattttctggaaccatcccctcttctctcttcatgctcccttcgttgattaaacttgacctgggaacaaacgacttcagcggtccacttaagattgggaatatctcttcaccatctaaccttcaagaattatacattggagaaaacaatatcaatgggccaattccaagatctatattgaaactagtcgggctttcggctcttagcctctctttctgggacacaggaggcattgttgatttcagcatcttcttgcagctcaagtctcttaggtcacttgatctttcagggattaatttgaatatcagttcatcgcaccatcttccctcacatatgatgcacttgattttatcatcctgcaatatttctcagtttcctaagtttctggaaaaccaaaccagtttgtatcatttagacatctctgccaatcaaattgaaggccaagtaccagaatggttatggagactaccaacgttgaggtatgtaaacattgctcagaatgccttcagtggagaactaactatgttaccaaatcctatctatagctttatagcctctgataataagttttcaggagagattcctagagcagtatgcgaaattgggacacttgttttgtccaacaacaacttcagcggttctattcccccgtgttttgagatttccaataaaactctttcgatcttgcatcttcgaaataacagtctctctggtgttattccagaggaatctctgcatggttacttgagatcactagatgttggtagcaaccggttatcaggacaatttcccaagtcactgatcaactgcagttatctccagtttctgaacgtggaagagaaccgaatcaatgacacatttccatcctggttgaaatcattgcccaatctacagctgcttgtccttcgttctaacgagttccatgggccaatattttctcctggagattctttaagtttctccaaactacgattttttgacatttcagaaaatcgcttcagtggagtcttgccatcagattactttgttggttggagtgtaatgtcatcgtttgtagacattattgataatacgcctggatttacggttgtaggagatgaccaagaatcctttcataaatctgtggttctgacgatcaaaggattgaatatggaactggtagggagtggtttcgaaatctacaagaccatcgatgtctccggaaacagacttgaaggagatattccagaatccatcggtatactcaaggaactgattgtgctcaacatgtcaaacaacgcattcacaggccatattccaccatctctatcaaacttgagcaatctccaatcattggatctatctcaaaacagattatccggcagtatcccaggagagctcggggaactcacatttctagcgcggatgaacttctcttacaacatgcttgaaggtccaataccacaaggcactcagattcaaagccagaacagttcttctttcgcagagaatcccgggctttgcggtgctcctctccaaaaaaaatgcggtggagaagaagaagaagataaagaaaaggaagagaaagataaaggattaagctgggtagcagctgcaataggctatgtacctggtttgttttgtggacttgccatcggccacattctcacttcatataaacgtgactggttcatgagaatcttttcctgcttttcttctccgctgaaaaaatgatcaataataagtgtcttctcttttatagtattgtttgggtctctcatcttgagaatctgtctttctgttgagttacttttatctattgtgtcgctgaacaactgcaactttccccgggagaacacctgaacatcccaaattttcacgaattatcatttagatcacactggaacttctctaaaggataatgcatatgaaaagctgcagcaatgagattcgagactatacaaaactggacaagtgagacatctaaactttcttccgaccatttacaaaggagacaacaagcatattaagctcttccgtatctaaagacaacatatccatagagatgaaaaaaaatcacaccatcagatgaatttgattgcacattgcatacttaaagaccgcaatcgaaatagatgaaacttgcaaacagaccgagataagaccctaatagcatgaactgagaggtgctttcaaagtaagacattgatgttaaacataatacctttttaaaaaacttggtcttcactcaatatcatctctattggtatcaagaaccttaagaagctgcatttctcacttatcaacctcactagctagatttagctgcaacaaacaagtcaataaccaacggatagattgcttagctacagaatcatatttgcacacaagtggagaacgttaacatcatcattgtagtgacaaaaaccttaataaatggattggggtatgaacaattgagaaaataacaactttggaaatcgaatcagatggggaaaaagttgataaaacaaatgaattgagatcaccaagaacccagaaatttctaagcgataagaaattcgaaaataatagctaaagatctctagggagactgatgaatccacttttccatctttacctcgacaatcggttataagctgcagaagaagtgatgtaatgatgcatctggcgagggaaattggggatttcaattggatgttcgtgttcatggccggagctcgtatcacgtacggtcggagtagcgtaacaagaagaatgggagagataggaagcttcgctggcgtcgatagcgagaagctcttcctctgtataaatcttcgtcgtcgtcgtcccaacttacgatatttctttctttacttttcgtaaaactttcttttttttttgcatttacaagaattccttagttgagtacaaataattcaatctatgaaactaaaacccatacaaacacaccgtatttaattgaaacagtggaaagaaaaactcgctgatattattagaaaaaagccaacaaaaatacaacaatttcaataagaaaccaaaagaaaaagaaaaaaaacattcaagaagaaatagctgaaaagaaaaccctttttttttactgtttgcatcttcatctcttcgcctttaaggcgatcctacaaaagcatattttatatatatggtagataataatagaagattactcttgcatatagagaaagatctctaatccttgtacttcatctcagacatgaggaatccaggcatctcataagacgccgagaacttctcgacatcagccttgagctgatcgagatctttgttgttcaccaaacccttgttgaagtccttcaacaacttaccgtatgtcttttggatgtccaacgtcagtgtcactgcacggctcaggaattctcctatctgctcaaagtccttctccaccaatcctctcgatgtcatcgcgggtgcacctacacaaacacatatatatttatatgttagcaagatcccacaaatgagattcaatggccattgtcaagaacatttcagaatttccctcttaccgattcttacacctccaggagcaagagcactactgtctccaaatactgcgttcttgttcaatgtaatgctgcacagatcgcagagcttctcaaccttgtttcctgacagaagaatatataaacatcaggactagttccagaaaccatagggtcgcaaaagtgggtttttttctctgagatataattcactcaccggtcaatccaagagggcgaagatcccagagaacaaggtggttctcagttccattggtcacaatctggtaacccttgctcattaggtagtttccaagggcaacagcattggctttcacttgttttgcgtagaccttgaacccaggagtattagcctgcttcaacgcaacagctagagcaccaatctggtgattgtgaggaccaccttgaagcgcagggaatacagcaaagttgattttgtcctcaaaatcatagactgcaccctcgggttgacccttctttggtggttttggacccttcctgtagaaaatcataccagcccttggacccctcaaactcttgtgggttgtggttgtcacaacgtcacagtactcaaatgggtttgcagcttcctgtaaatatgattaaaactcaatcagttctgtcggtgaatgcaaaaaaaaaaaaaaaaaactcaatcttggcaagtaacattagagtaatccccaaacttcatcaggctaataggttggttttagttactgaaaagaattgaatctcatcctgtgttcacttaaacattcttataggagttaaactataaactaggagactaaaatgagacggcacaagtaaaatcaaacgactttaacaatgtgatatgattcgttcttgggaagaagaacatttgataaccctgaaaacactagacttgacacaatgaatgcagatcttcgttctaaacaattcataatgctaaaacaaaaccagatctacatgaaacacaatatcaatacaaatgagaataggcttataatatacctgagcagcaacgagaccactgatgtgagccatgtcacaaagcaaaagagctccaaccttatcagcaatagctctaaatctagcgtaatcccaatccctaggatacgcactaccaccacagataagcaacttaggcctgaaatccaacgccttctcttcaagcttatcgtaatcaatgtaaccagtggtgaaattcaccttatacggaagactctcaaagtagatcgaagtcgcagagatcttcttaccaccagatgtatagtaaccatgagtcaaatgaccacctgaaggcaaatcaagccccatgatacgatcgtgaggctgaagcaaagccgtgtaagcagcgaaatttgccggagatccagaatacggctgaacattaacgccccacgctgctggatcacaatggaaagcttcgagagctcttgaacggcaaagattctcgatctcatcgatgaattcgttacctccgtaataacgattaccaggaataccttcggagtatttgttggttaaggcacttccgagagcttcgatgacggcgaaggaagtgaaattctcggaagcgataagttcgattcctcgacattgccgacgtttctccttctcgattaggtcgtggatctctggatctacggagacgagagaggtgttaccccatgaagagactggttccatcttctttgtagattgttgaatggatctgagatcggagaaagagggagggagagatctgagatcagagagtgagaagtgggaagagaggcggttgggtttaaaagaggagtagaaaatggggtaaattacggatttgtcctcctttgctaattttggtgttagttggttaggtgtgtgtggtaggagaacaagcttagtgtgttttgactattttaccctcttaccaatatttgtttcccttaattaattatgattagatggatacttaaggcccaattgcatttaaggttgtgttgggtaaatctctctctcggattatttttatttttttgacatcagaaattgaatttgttggtagaaaataaaaagtaattacaaacaaaaatataatctattgattccaaaaaaaaaaaaaaaactgtataaatccctataaatcggaggaattaaaattggaaaaagggctttgagggcccatgatcttgattcagcccagtgttttagataggagtaattacattttaataagaaactctatagtttttcatagtttaacctttcaaaactcaaatggtcgtacatctggtgtaaataagatgtattatgtgttaacaatgcaaaggtaattaaaccaacgtcaacattgtcgaccacaaaattttcatctatgttgtgaagatttcaacaatttatccgcttcaatattatgtgattaaccccttaaatgttaataatgtattttttaaagctttttcacaaaggaagtattcacgatgaatttaaacatatgaattttgcggataaaaatagtctctcacatatctccaagctaaataaaactttatacggtcttaaacgaaacacttgaaaacggataacgcaaaattaaaattgtattttcatagtaatctgattttaaagttacttgcggatgaatcttagttcatattcatcaatcatcactaagaatcacgaagtcaccgtaccctctatatgactatatccttgtttatgtttacgttataattttcaatgacaactcatcatatgtgtaaccgtaccctctataagactatatccttgtttatgtttatgttataatttcagtgacaactcatcatatgtgtaactacagcatcactttgcctcactattcattatcccaacattataagaaattggtggtctttgcttagcatcctgactagatcacttaatcgataccatatccaaattaacatcacattatagttagagaacatatccaactctttcgcccattttgcttatgttgaaaatgccaaatgaaatgtgtacaaattgttatttttcgatactctcagtttctaatgagaaaaaataagtttgttattccactaaagtcttagatattctctgtcacaaattttataatttagcatatgaaaagagccattaaacacacatttttataaacaagaaatagttggtagcctccctttgaaaccttttttcgtggacatactaattaactaactacacgattgaggagttgttatggttaacaaatttatttattattattgcatcgtgccctcggttgatcaaagaatattaagtatttaatatttgctagagaatggcatgatcatggggtttggagaggagagtaggtggttttgtatgcatgtgagtcggtgagggtcaaaatcgtcttttcaatttaagatttgattatgtggtcattaaatagtaacgtagtgcctagtggtattggcagatctgaggtcaacatgtgatgtgacgaagatcttcattttcttcgtaaacacacagaatactgaagttagaaaaatgtctttttcaggtaatatttactcagtaaagaaaaaaggctggtaaaagtaaacttttaagtttgaacgttaaagtcaatttaatagtgtttatttatttattcgacatgtagaaaattaaacgatctacgtaaaatatgaatacaaaaatattaaatattagaataaagtgagagtatgtgtaaatcacgttttggtgaattttttccatgtggtagaataatagaggaggacttttgttgtaaagtaagcttcaccaacctcgatttttagacctgtataattggaaacccacctacctccgcaaatacaacgaaaagtattgtcttataatactttcttaattaaataacaattcttttggagtcatatcatatatatactcctattgtggtgtcgacatggtgacatactacataatgaaaccggtgagattattcttctgctaaacttgtatgatgaccggtgagattattcctaaaatatattaaaacctagaatgaattctttcttttatacgtcatggtttgcttacaaaaagaaatgaaataccaaattttcacgtttttcaaataattgtgttgtctttttctgttttgaaaaatagttttaccggtatgttatcacatttaaaaattttaataaatacttctcatatactgaaagaagtaatatatttttatatcatattttattattttcgatcgatttccaatagaaacaatttcgataaaattacatttttttgtaaataatatataaattttttgtagattacattaatagaactgctgaaaatggtctttaaatcctcttcctcttcaacatttttccaaatttgacattttgactccgaatctcacttataagttgtaataataatgttcattagtgcattagtttcctccttcgttgcccaacaaaagaataagctatcattgacagttttatgatattcggagttccaaaatcatttttcgaaactcggccttttaaggcatttggatcaaaacttcggtgcatatactaaaaacatatggatatatcgggttgagtcgcctcgtagaattcctcgagaagatatatattttgacttggtgctggccatttgtaagaatagcataagccaccagtcaccaagattattcatcgtaaattgtaacaaactcaccattatttggagagcccaaagatactactcaatcttcttaccataaacttttgtcactgtcttataagctataagattactggtctacttaactcagaaatatttatgtcctttgtagccaaaagctacactgaaattgacacaactcgagtgttgtccttttctggtcgattgaatagaatcgaatgtcttaatccagtaccctccagcttttatttcgtgtaatttattttccaaacctaccactaccagtttcataactctcgaataaatttatcaaatagtcttttgagtgctcaaagtcttgggataataaatggtcagtgctatgtatcacccggatgtgaaacattatgggtggagatagactattataaatttattgaaatatacgattgttactcgtttaatagcaaaagtagtacaatgtatatagtttctatcgagaacaagatctatttaaaattcgaaaagtacatttaaaattcataaacatataaagatagtaacatgttagatctgcatagtaccaccaaaacaagaaaaaagaaacgcacatcgccacataattgctatgattctcactgtcggctgctttgaaatattacgattcttttggtaaatcacacaacataatataattacaataaatatatatatactaaagtataattaatataattaataccacattgtttaattctgttttgatcttttaagatcagtcagatccaccgacgttcctacacgcgcaggtccagatccaaacagcacacacacacacacaatgccactagtgtaaatgcttggtggctattgcatttgcacctattgatactctttcttcaaaaacaagttattgtttttattttcaacccaactttaatacggattcatactgggatttaggtgttaaatctgataatttaggtttgaataagttgtatatttgtttctttgattaaaaaaagaacctatatatatacaaaaataaataaaaagttctagatttcaattttccgtatatagcgggttgaattgtctattttaatatgaaaattgacggatcttataaacaaaatgttctgaaatatgtaaaaggatttagccaaagttaaccaaaaaaaaaaaacaaacagaaaagtcacattcacatgtcgtggtagatctaaggcattaatttagaaatatgtcgttacaataagcggagaacatgggacgtttctcgtggtccaatcagacgaacgagatctcataaattaaatgacttcagacgagggaattcatggcagaatgataatgcaacttaagtgactttagagtgaaaatgatacgagaacaatgcataatccatatgaccgttgagtgagtgataccattagcgcgatacaagcgggactataaactgatctagattgtttttcttgggaaaaaatgttacaaattttaaatatgtagtttgaattgttaaaccaagattcaacagaaatataccgtaaataaacaacagttgataatagtcatcgaaaagatatcaactgattcttcacttgggctactgtgacggcccgttagggttctcaatataagtcaataactacgatctacgattcactgaaacaaataaaacacagccacgtgtccaccctcccacatcaccgtccgatctaacccacgacaagcttacaacacgggtcataccgctcgtgcagcgtgttccgtcatccacgggattacaacttctaccagatccaccaaaccctcaaaacaatctgaaccgttcatttcattttgacctcatctatatattctctgtcactccctttctcttctcctcgcacacacttctctctctctctctctctgcctcctttcggattcaaatctcagatctagctcaaccatggcgttgctcgtcgagaagacctcaagtggccgtgaatacaaggtcaaagacatgtctcaagccgatttcggtcgtctcgaactcgagctcgccgaagttgagatgcctggactcatggcttgtcgtaccgaattcggaccttctcagccattcaaaggcgctagaatcaccggatctcttcacatgaccatccaaaccgccgtactcatcgaaaccctaactgctctcggtgctgaagtcagatggtgttcctgcaacatcttttccactcaagaccacgccgccgcagccatcgctcgtgactccgccgctgttttcgcctggaaaggtgagactcttcaggagtactggtggtgtaccgagcgtgctctagattggggtccaggtggtggtcctgatctgattgttgatgatggtggtgacgctactcttttgattcatgagggtgttaaagctgaggagatctttgagaagactggtcaagttcctgatcctacttctactgataaccctgagtttcagatcgtgttgtctattatcaaggaaggtcttcaagttgatcctaagaagtaccacaagatgaaggagagacttgttggtgtctctgaggaaactaccactggtgttaagaggctttaccagatgcagcaaaatggaactcttttgttccctgccattaacgttaacgactctgtcaccaagagcaaggtattgatcttcagatttgtttctttactagtgatgataaatctgctaggtctttagctctgtagtttttgatgcgataggcttaacaacaacataatcactaagtagaagcaagcttttcattgttggttgttgaaagtattacgatctagtagagaaaagtccttccttggttacagaatttgcatgaaaagtcaatatttctcatgctttctttgattttatattcaacgttttgtttacacttatgtgctgttactgataaattcatttgttcttgatttacagttcgacaacttgtatggttgccgtcactcactccctgatggtctcatgagggccactgatgtcatgatcgctggaaaggttgctgttatctgtggatatggtgatgttggaaagggttgtgctgctgccatgaagactgctggtgctagagtcattgtgactgagattgatcccatctgtgcccttcaagctttgatggaaggacttcaggttcttacccttgaggatgttgtctcagaagctgatatctttgtcaccaccaccggtaacaaagacatcatcatggtcgaccacatgaggaagatgaagaacaacgctattgtgtgcaacattggtcactttgacaatgagattgacatgcttggacttgagacttaccctggtgtgaagcgtatcaccatcaagccacagactgacaggtgggtgttcccagagaccaaggctggaatcattgtcttggctgagggtcgtctgatgaacttgggttgtgccactggtcacccaagtttcgtgatgtcttgctctttcaccaaccaggtgattgcccagctcgagctctggaacgagaaagcaagcggaaagtacgagaagaaggtgtacgttcttcccaagcatttggatgagaaggttgcattacttcacttgggcaagcttggagccaggcttacaaagctgtcaaaggaccaatctgactacgtcagcattccaattgagggaccatacaagcctcctcactacaggtactgagagagagagagagtcgacaaagcggttcaggttcggatctacttgtggttttgtgttgggttgtggtgggagagtggaacagtttgagatattggtcttctgatgaagttgaccaaatatcagtattaataagggttattggcttttgaaggttgtgcttgttttctccatttttcatgaaacttaaattagtttttggtttagtttccctcttgattttattttgtgtgttctgtttagcgttgtactcttcaaacaaatgagaaaccaaaaaaaaaggggaaacttgttttcggcatcccagtgttagcgacttttgttgaatgaatgtctcaaatgctcatctttaataatgtgtgttaggacacgaacaacacatggttcgattcgtgggggattttatggttgtagttattatcgtacacgtttcaaagttctcttaagtattcaaaaaggcttttccaatataaatttttgatagcatttagctataagattcgttttcattttcttcaattctatgtcatcactgataaaatctgctttgaaaatttcaaaatttattacttttgcaagaagaatgtgaacgttcctacaaagagaggggtagaaaataaaaactggactcgaagtaggaacccaaacccgactgaaaatactcaagagtccaagcccgttctagataaataccaaaatgggtcttaaggcttggtattcgggtacatgataatatctgatccgaactgaaacatgaactgtttacccgaaaccagtggcggaactacgtagggggcaggttaaaattcaaagtggtgaacgagtacggcctcgagagtttatggagtaagattcgaattagcgtttcctacgaaacgcatgaaaccagtacgttcgaccaagaatgatgaggaggttcttctggttctcgatgcaaacttgggcttgtacaactttgagtgtagtacttgagaggaattaatctagaaatccacggtgttgaattcgacaaatttctacgtcttatcaccaaaactcatacgttatagagatgaattgaggacctccaatgttcatttctttggagtttatagatttggtggtttatttacattgttaagactactttcttgattttctatacttactaaaaataaactatagatgatttggtgttattaatgataattttaatactgcttccctttctttcatgccaatctgaaacacatcgctgagaatttccaggacttattgcaagtttaatttgctttctcacgatttttcctttgctcgtgtaattagcaaaaatctcagaatcctaagtgaaaagattctaatttggtccaaaagcacccaaaaacaagcaaacaaacacccaaatttatcaatcaatctaccaaaaaaacttaatataatttatagatctcaataattgaacattgataaccaactagtggcagagttacatatattataacaattcttatgtcaaaaacacatatataacaacagcaatgcaaaagcttaatcatataatttacttgcctcggccaaaaagcttccaattttggcaatttcttggatcttaccttcatgtgttgatgtcgtttgtgtctctagcgcatctggtaatggtgtcacagcctctgctgtaagaattagcttgtccagagcgacaatcgtagtaagaagctcctggtttctgacaaggaaccatgtctctccttagcgtttcgtagccgatgtaccgtttctgcgccatcagtactctccggctgatctcagttggcattagatcttcatcttctccgatgatactgtttcggatcaacattgcgtcgatctctccgttgggagacggaatcgggaacgcatcggcggagattaagaggaaaagaatggcgaaaatcaccaacgctgtagagttaaacatgtcgatgttggaaattgcagattgtgccgacgcgatctctctctatttctctgtctctaagcagaagaagaagcagaaatggggttagttggtgaagaagaagaggtgacaaatgtacagtcaacttaaaccggatttaggttttggtttaagtgttcggatttagatcggccactcaatttaaaccggccggtttgcgaaacaattaaagtagattctatcaacgtttagaagcaagtcttatacaattgtagtcagcttaactatttatctaaacaggaaaaaaaattataaccccttcagataaaatggtggtcaacaaaactatttaatcataatcatgaacctgagcataaattaataacaacccctttgaccaaatcatcattgtttaaataaccaaataagagaaagaaataataataaatataagccatagtatagaaaaaccatagccaaaacataaacagtcaattcccaacatcaaaatatatcaaaaagaaaggtaaattgggttgtataatttcataagaaatgttgaaaggaaaccacttgaatctcaaagagagtcaataacatctttcagatttttgtaaaatctaatattcttactatcagtgtacttttctacagtttttttttggtttctcaagaatattctaacaaacttttgttgtattctctagcaacataaacaatggccactcagaagttttcatattttctcttagttttgttgatggtgtttgctctcatccttccatcaataatttcaggtaacacatattttgccggagtcaaaataaataatcaaaattccctggaatcagaaacataaacatgcatgcactataatacaaattcataaaactaggaattgatcattttggtacttacaatatcttgctaatgtgtttgtttatgcagtcgaagtcataccctgtatagcgggatcaaaatgtacaaacgatatgacatacaacgaactttgtagatttaaaggattcagcaaaggagggttttgtcaaaaatatgttcaccaaacgatcggtcggtgttgctgccatcctacaggtttggaatctcaagagtcttccatatccggtgataccaatgtagtcattactaattaattcctcattttatgtattctctattatcagaataaaatgatacatgaatatgaaatccaaatgcacttcatacaacaaaattccgacaagcacttcattttatagttgtgattagattaagtatattgttattataaattcaattaattatttacaaaaataatatttctctagaataaattcaaaatatgtttttgtaatcggatttaattatatttataagtaatcacattatattttattttatcatctaattatatctagtggaattatgtataaataatttgatatcttcaaaaagtatttatgtaaattttatttacagttattagaaatcagcatcaaatatgctactatattttggctactggaaagcttttaatttgaaaaaaagaagaagagagtttatatattataatttataaatgaaatcataactaaaatttagcttccgaacaaaactatgagtaagttttcttccttgaagactcatcaatgtgccctagctagtacaccttttttacatcacaactataaaactatgctcgacaaagcttgagtcacattatacagctgcaatctattttcaagatatgaaggcttgttttcgtatatgaaaccaggaggtttccatttgcagagaacatccaactccagagagcaaaatctagacaagccatagtaaacttcgtttggtttcttgaacatgttaagttttgcggtagtaagctttaagttaggcttctgctgtacttttgtccatttagctttaacgatgaacaactcaaagaaaattgatggcgatcaatagtaaatgactgtaaacattggaaattgaagaagacgaaaagaaactacagtttcccgattggtttagtttaaaacaggttaaaagagactttggcataactatgagaaacttttgttctttaaagacttcattgtgcagtccacttcttatacaagtaaccacccactaggagctggacattgaaactggatgattttccgtagtgttccatcatctccgcgataaattcacacacttgggggactctgagctttggaggaccactctcttcaatataaatatttgtttccatcaaacaaggaaaatagttcacgaaatgctttatcatgtgcatctcttttatcgttcctcgaaaccctttaatctctaacacttttactggacaagatgtgagtgaacaacctttttcttctcgggaaacacagtcacaagcatacccacatttatctgtgacatggtgcaagataccctgaaagcataaaggagacagttaaggtattcagttcaaaacttgtctgtacacgtttggcaaaaatgacttgtaactatacctcaaggactagagtttctagatgtggacagttccttagaagaactggcattgcttgccatcctcgactcttgtgactcttaagagttaacgatttgagattgttgaacactggcatcgattcacaacacagagaaagaacctgaaaacaagacaaaacactattagactttttgccattacatgtctcaaaacatgactttaacgctaactgacctcgagagtattcggagacaagtacatatactgaacattacgtatgccttttatgagcttctccatattaactagtcggagaacaacatcatcctccacccaatcgatatttggcgctcttgctcgctcgatttgatcttgagttaccaaaaggctgattctagcctcaaataagttttgcattataactacagggtagtctatagcaacatactcagtgaaacagaagtaaacaagactaggtgtatcaaccgaaaaagtgcctaaacaaatgttgtaatttactgttaggattttgaggcttgcatttgatacgttgacatccttacctccccagttaacactaaccaagactaattcctcaagcgcaggtaaagcactaaaaaaatacttatcaacacataacctaactgagtgaagaactagggttttaagcattggtaagaatatgtcaccagcagctaaccaatcaacacgaacactgtttagcttcagcgtaaccaggttcctgaaatattttgaagacagcagatagtaatctgctgtatacaaaatgattagcagatcaagttcggtaacaccacgagccaaggcattacttatccaaccatccactcggtgtgaatcaaagccagttctcaacttgagggagagtttcttaatgggagaattaccctgcaaagccaatactctatcaacaaatttcatgaagctcttttgaatttcgtacctatcctccttaccctcttggggatggagaaagacagagtcatcaatatcaagattaggtacaaacgtaaacagattgcgccatcttttgctgagaatcgaagtcaaagcagcttcctttgtggtaaggaaggacaatatatgataaagaacctcgtctggcagactgcttacatgatccatcttctatgcactgtgcacagcacgagacgaagagagttaatattattaacaacacgattacctaagagagaaaggtttgatacacaattcacaaaatcacaacacaaatataaactttgtgattttacgagtaaatccaagacccgaatttaggggtttcagtgagaagagagaacgatttgcaaatacttcgtagaaaccgaaacatgaaaaacgatactagggctcttcttaggtcaagtcaagctgtcccggtttaacgaatattaaccggtaactttaatgaaccggaagaaattgaaccaaacttttcgtatagcaaagaattcaagtgccaacggttaaccgaatatcgatggaacacccatcaaagggttcgacgggactttcttttttgcattgtatatttcatgaatttgagtgagtgacttgttagaattgaccatatagatagtacataaaatggggtctgtcatctttaccaaaatggttttacttcatctgacatccatacttatactccgacttcgtagccggacttctttgatcctgtcttgtgtcttcattcacaacatctaggtctctctcatactgtcaccatcatatcttctgtcaaaaacatcaaaaaagaaaaacaaagaaagacatgctagtcccaagttttggagattataagttaaggaatcctaaacaatgaaaagaaagtaaccatcatttcattgtccaatttatttcaaatccttatgatatacgccttcaccctcaaaatgcagacggtgctgctcgagtttgaataaggtaaagagcaacgcggagatggcaaaagttagagctccgaagtatgctattaatatcctttccttcacttctttttatggtaaaacaaacaaactataacaaagtaaaagcagctattatatttgggggcataagaaagagtccataaccgtttttttgtctttccacctcctcaaagctgccacgattatgggaatgctttctccaaggaaccatacctaagcctctccttttttgttagataaatttttttctctatttttaccatacttagtttcaccaaataaacatacatacgcatcaaacgtttttttctcaatcgcttcttccaaatgccaaaaaactaagagtagctccaaataagagttgtatcacgctcacaatagatatgagtttggttttttctttctcattttttcatccaaactagattatataaagggcttcttggaaaaatagacactttttcaaaaataatttgcaaactaggtagttttttgaaaagttagagaaatagacactttttttattttttgtgagatagaaaatcctactatattatttgggaagtacattttaaatataaccttaatttttgtaagtaattacataggtatgccattagaaataaaattttaaagagtaaattaatttatctctttaaagattaaaaagtaaattaatttatctctttaaagattaaaaagtcaaatactaatttaattaattaaatttaattaaaaaaacgaaatacattattaattttcaaaaataataaccaatcaaaataaacatataagatttgatatctaaattttcactaatttaatttaattagaaaaacgaaatacattattaatttccaaaaaagtaacctattaaagtcaacaaattagatttgatatctaaattatcatattaattttttattaattattatagttcacttctcatctttatatgattctatttttgcgaaaaataatatcatcattataaaaaaataattagagttttttcgcatatgccataatttgaatttttaaaaacgaatataaactgttcaatacatgaaaaatattataaaggtgaaaaatagatttaaaaaaacattctactgagtaacgggtcataatttgaaatatttatattcaatttcatacatattatattgaaaatttataatcttatatactataataattaataacatattagatttttttatgtgtatgatgtgattcaatttttaatacaagccggaaaatcctagaattgaacgggtttagatcgatattaatacaagatggtatactacatgtgaaactcttaaattaacaatcaaactacaagtgtataatcttaaacactaaacaatatagataatatcaacaaaacatatacaactcacagtttactatacatttaaaatcaaataaaataatatcatattttttaaatcatctttacaataaaagtttttagcttaactaaaatataagcctacttgcggtatactgcaggttaatctagattatagggcttattggatctaaagacgggtcatcaaagatttcataaactgaagcaaaatatattgaatactcaaatatctatctgttaccaaattataaacaaataagttcgtaaaacaatttcatattttatatacaaaatcaattaaatcttaatcacataaaaattagcacaaaaaaaagtattcaacaattaaaaaattatcaaatctctgtgttatataagttttgatactatattcgaataaagtataatataccttttcaatttgtatttttttaactaatttaagctaactaatatatttgctaatattatacctatcaaaaccgactatcgtttcttatctctatagtatttttgcaagacttttttggtggatttgggtaaaaatgcattcgggtcatatgatacattctcttattaaataaatatggtgtactcctatgttattagctaaaatgtttagattataattcggagtcatatcattaataaaattaatattaataaaataaatgactttttggcaagacggatttggagtgacaggtttttgaatcaacattaataaaaatgtaaaatataattaatctaccgttttaatacgggttaaatctttaatttattattttttaagaccactaatattaaacatatcaaatcatcctaatttagaaaagattatataaaatcaaatatgttatgtggtatgtataatgttactatatataaaattaaactataaaatataaatgtattagagaatgatacaatttgcaaaacttatatatataaaaaataattcttaaatttttaaaattactactttaaaaaaaagatcacgggacgggtaaagaaattatagaacatgttttattttggaattgggttatatggtggatgtatttgaatcaatatttataaaattttaaaatattattaatatgttgttttaataggggttacaacttcagttttttaacaattgtctcatggattcgtggtatagcgttacttaataacaattataagctgtaaaatataaatattttataaaaataaaatttgcaaattttaatatatattacttttaaaaaataaatcgtcccgcggtataccgcgggttaaaatctagtttgtgtaataaactataagacaaaataaaataaaaatgctaaaatgccctttatattgagagataagagaaaaattgatgggaccacttttctttaaaacattttttttttttcttaaatatatttttaaagataacttttttctcttttaatattataataatttttatatttatatatcatcaatctcatatattcgtaaaccaatattttaaacatagttttgtacactaacatttgtacacaccagattatcatttacaaaaaaattattataatatctcataaatcattaaatacatccatttgtctcatatttataaattgaagtaattattgttcaaagactctctcactatttatagatcgaaacaaagagtagagtaacagttacatgtgagaacaaagactctctcactatttatatactttttcatttaatgagaagctgacatgaattcaaagccctgaccacactattcaaattcttaaccattttaactctctcttcagaactgatgggttttgagaagaaagttgctctcttcaaacgatttgtgttacttaggatgtatttcgccacttcggtctcatcgtttcgtttccattcgtatcctttccacatgaacgtctcgaggtgaaacaataaacattcaggaacaatctttggcttattccatttcccaacaacatcttttttccaactttgatactttggctgatcagtgagaggaaaacacatgtaatcaatgttattgttagatcaccaaaacgaaaaccaagctcgatatgaacattgcttacactgaggagctttagaatttgcaatttaggagaactattaagcattagagtaagtagattcaaacactctgcttcatgtgtcagtagctccaaatataccagctgatagaagatactaccagcaggaaacttaatctgttcatgagtcaggattagtacatttatataaaaacaatatgataaaaactaatctaatcaatttgcaagaaaatctaccatcaagggtgagaattctaagaacagacgtttgactgaagttagagattccagaaggttcttattgattatctgagaggaaacaatcatacttgcctccaccagctctggtacgttctctatcagacaaaacccaatttgacctacaatcttcaagtatgttaaagaaggagaatttatcacatatccagcgcgcggatcaacagtacttgatgtataaattgttagtctctttaaggatgacaccgcaatagtgtatgtcttcacactgctgaatggatatcgatgcaccaccaagttttcaagattaggacagccagataaaaggttaagagctgattcattgtctttgaagtccacatagtgaaggtgcagagttctaagggatttcagacaaatcgaagaagggacatccataagaatcgaatacttgagttccaaggtatctagcgtttcacagttatacaagctttcaggaattgagaagcgtcccccatcaacttcgagtaccaacttacgcaaattgcaggcaaatgcaatgccaatcaattttgcagtattcattgaattacataaatgtaaatgaactatgagatgcaaactatgcagaaccggagccttatgtgaaagcagagcccttttaacattctttgaaaatgttttgaattcatgtctctgatctaaagaatcaaagttgagtttaggcaacatcttccacagaaactgccattgcttagacaaaacactcgtggtaacagcaacttctgtaggaagcaaagacagtatctgaataatcaaagcctcaggcaactgactgatcctgtccgcattcacaatacctcgacctcttttgctgccaaagaccacaacaaaagacacgaattggtttttaagttttggagattactgttaaggaatcctaaaacatagaaagaaactaaccgtcgtttcattggtcaggtttgtattgaagaattttgtgcgttgatggagttggtcgaattcggctgccgtagaaagtataaggcgaagtagaagagttagggtttcgaaggatagaatttgtgtaatttttgaagataatgattagtcgcataagtcataaccatttattttaaaatgtatttttttccttggaaatttatgtgtattaaagtattatttctatatttctagaatgacaaattcaaactaaaaggtaaaaacagaaaagaagtacacataatggaaaaatctattacatatcaaaatccatcgtagaagacgtttgaatgggaaacatggtgctaatgtctttgttgtttcttggttaaagccacaaaagaaaaaaaatagtatatacatttatctattgtctacttgagaacattaaaatgtaaaaagtctgttaagaatatagtttttcttcttaaatgtatgttaagagaatagctttaaatctatagctagctttgaaaaaattattgttgtacatctttatgtaaatgtgctaagaatatagtttttcttctcaaatgtatgttaagagaatagctttaaatctatagctagctttgaaaaatttattgttgtgcatctttatgtaaatgtgctaagaatatagttatacttcttaattggtatgttaagagaatagctttgaatctagctagctttgaagattttattgttgtatgggctaagaatatatattttcttcttacatatatgttaagaaaatagctttaaatctagctagctttgaaaaaatacattattatgtaaatgtgctaataatatagtttttcttcttaaatgtatgttgagaggatagctttaaatctagctagctttgaaaaattcattgttagacattattaattatgtaaatgtgctaagaatatagtttttcttcttgaatgtgagttaagtcaacagctttaaatcttgctagctttgaaaaatttcattattgacattatttatgtattttaatttggtaacacaaatgtatgcatgcatcaaaaatagttgcgaaggtttaccaaaaaataaaataaaaaaataataataataatctggaagtcttaaaaagaaatcaatggtttttattattaaaatcaaatttctgaatttcctaaattaggttctaaatatgtataaattcctaagacattcacaattttatataggagaagacaacgatttcttatcaaccagtgtagaaataaattttcaagatcaatattacttaatatttgtaagatattagtttttatcgatgtatctatttttgctattgttcttattagatatcttacttcttctaatgttgatttgaatcttacttttctataggctcattattctttatatcttctaattaaagtgagtatattctaactaatacttgttgcatcctctagcgaaatgggattcaagaataatttatctcttgtatcggtgatggtctttgctcttatccttctccccatgatttctggtaatacatatttttcattttcaaggataaactattttgcttatttatttggggttaaattttcttaaatgcaaaaaaaattatctttatttttctataatatcatggtgagaattcaaactgagattttattctaacaaaatttgatgaaatttgggtaacatgttaaaatattatgtttacattataaattatttgactttatttaatatagtttgcttattgtttggatttgtttggtttcgtttgtaaacatttctcccctgtcttcggtttccatttagagtgtttagtttaaatttatggttggcaaaaatatgtttaattgattggtctaaaatttgaatagttgtattagtgacattttagttataaaaaacaaagaaattgtatctttaatatagaaaaatattaataaaattaattgaactggaatagaagcataaatggtgcacaagtgatactaatttataaacaaataacaattgaaccaaacaggacaaaccatgcaatgttactcaggaatagcatgtacagacgacgggacatgcaatgattattgcaatcctagaaataacaacttaggaggtgtttgtcttcgtcgcgctaactgttgttgctgctacgttagtgtcgtcaaatctcaagagtcttccttatccaaggatacgaataatgtattcattactaattaattaattcatcattttatatgtattaattttttatgattacaaaaaaattaaaatatgtattctctattatcagaataacaaattaaaaatctatttaaatatggattatatattctcttataacagttataaattatctactttacgtgttataaatgtgttatggtctatggagagtggagtctccattgacattggcagttttctatatggttggttaattttctttaatcgtcttataaacattacacgtacttttttgggtaggaaacattacaaggacttttagtattcaatttattccataatttatttgagaaaaaaaaagttatttgaatacaatcattttcctagacagttgtattaaatcataattatccaatttacagttcgatagttccatctccagcatagaaaagtcgacagagacactctcattagtggctttcatgatctattcaacaagtctatagtttaagaaatccagggaacagagctgaggacaagacattcctcgtattacttgacagctgttgcggctttcagaccaaagcaagtgtccttggatgtctcattcacgttgtagggaagacacaatgtcaccacaacggcttctttcagtttactttttgtaggagcctcttcatcatagttatgaagtcgaatcctccctcgaatcaagttttctgagaccccgtagatgttgcttctcagtttgtgtgctcaacgttagattttgctcattcaaatcttggaaatactcgctagctaggttctcggctcagttatcatcatcattcatacactccgttctccggtgcccaaattttcaaccttttcgcacctctttcacaattctcgttcgcactgtctgtaccattctgaacagtagaggtaacatcttctgcagcagctttggttgaacctggtgaaagtccaatttccatttcagaacccgaaataatgtcttctgcatttcctgagcagaccctcagacaactcattggcattttactcaatccgccatctaaatcagtagcaacttcaccatgaccctcatgcttatctagcaagtcagattcatcaagagattttccactagatggttcactgaaagcaatttctttctgcaagttaccttcattagcatcactcttttgcagatagccgagtgcgtttatttgcttttccacagagacagctaaagagactgcataatcacgaaacaaggaatcgtgaggtgggcagcgtagcagatcaatcaaagtctgataatactgtagaaggctcgcagattgcctggcagctcggtttcctagacagagttgtgtaagcttgatcatgtgcttacatatgtatcccttttctgcccagctgcaactgcaaaccccaaactgtgaccctggattccatacaacatgaatttcgttgccgtcacactcatctgttatttttgcagacataccagagataacaacatcagaatctggtatactcaatgctttgcggaaggaagtcaacccgctcacccattcctctttccaatacctggcaaaattatcctttccagaatattcgtcaagccagaagtaagaatgtacttttgtccctaacttatcaaccaaccaatcagcacgttgataagcttcagagtccctctcattcaaaagcctgcacttcagctgatagtggtaaagctccatcgctgcacaggtctcttggcttgccaagggaagagattgtaacgcactagtccaggctcctaaaataaattggagggaaaaagtcattctcgagaggactagtgtcaaatatcaacaataatttcaggtagagtgcaatgtagaattacaagtaagaacttgatacctaggtccacgaaccttctgagctatcaattaattgtagagtgtaaacagaaaagaaaagagagaataggaaaataacctattctgggagaccaaacagatctgaagtactccacaaattctggactaccaacaaaatcctccacaaaactgtcaaacaatgtggctgttccttgccttctagagattttatctacagcctgcccaagatgtcttgaaatctcaacgcgtgtctttgtttctcgacatctcttgattatgttcttatgccatgcatggcgaagacgccaaaaggaaaacaagactggacactgaaatacatccctgacaatatcgcaagcaatagcattcaataaatataatattgagggttggcaatttggttccttgtctgaaatatgcgtatgacaaatttctttctaacaaaagagaaagatatggttcagtatctgttgatgaaccccataatctaactatgtcaagccttcttcacatagccaattgccagttccatcaaggattcaagacctatggttgtaacatcctagtcaatttgtccaaatagtgctacatagagctccactatcgaaaattcgaaatttaccaaagtcagcttcattcaatacgttgatatttggtatgtacttaagttaactacattcaaagctaaacgctttgctgtggtaaactctgccaaatttcgtgaaggaaagaacatgcgaaatatgttttataatgaaaaagtggcctttgaagcaaccaacctgatcgctattatgtcagcaaaaggatcatcaactatgaacccagccaccttccaggagggatccttggcatggactcggttacaaagagctctcatccatctgtatgcatctccactagaaaaccgcggtgcaattatccaagcaactggaatagccttattctcagagtcgaatacaacaagactatggataggatactgaaaataaaccaacacatagacctgagaatcatcctgataatataaataccaaatttagcacctgatgcaaactgacctttagtgtatttgtcccaaaccttgagtctgaagccaaaagtctacagtttccaaatctaatcatttgttgcaactgccactcagtttggatacccaaggaaaaagggtctgtatcagagaacccctcgaagaaaaacacatgactttggtgactttcaacccacatgctgatgctgacatcatcatcctcatcgagctcatatgttgaacgtcgaatgctcctctcaagtcttcgtacatatctatgagttaacagatcatctcggttacttggaccaccttgtttttccactgattcattatgcctttgcattatggtctccacagagacaccgacatagagcaaagatgatacacgtagcctaaggtcttctgatatatatggagcaaacatggctcttgttccagcagcctttttgtcttgtggaccatggcacggaaaccctttttcatctacatgcttgtcattgttataaattactaatgctacagtcggttctgcaattaagcgtttcacaatgaagtgacacctgcaccctctcttagaattgggtcggcctgcattgttctttttcggaacatacgtactcctacttggccgtacagttccgcctttcctattgtcatccggtccaaaggaacaccaatacctactcaaacaaaaacactaatttataacaaacgattttgttccacactgactaacaaaaagagatgcatgcggaggacaaccaaacagatagccaagtacttctgacaatgtccagatatgctgcaacaagaaaaatggatacagaaagcttgggaaacataaagggggagaaaatgagacaactgaaaagaacacagaaacatacacgcagcaaacaaaatctaaattcactgccactcagtaggaaaagatgaccacaaagtatacaaaacatgaagtatcgtaaacaaagtacgacgatgtgaaagtagacctgataaacttccagtagacgataataaccagagaaaatgatctaacttgctgtgactagtacaaaaccaatgtgtaacttacagaatatactccaagatgccatccacctttggcttatatttttttcctttggctttccgtcgtctagcttcaacatggaaacttgtaggacaatctttattcgagcattcacctcttacaaaatcatccaccctagtatatgggatgagggctaacctatctatattgtcccggtaaccttcaacctttgaccagacaagatcggtagaagaaaattctggcaaggtaggattttgcacaggtaaggagaaaatctgatcccatctagccatctgcattcattatgtagtcaaaacgaccattagattacacaaattaagaaatgtcatgagttgaaacattatgtcagaatcctgggaactgtatactacaacgagacatgcccaaacagagattttcaatgcaacggagtttgatacatctgttcacaattgtagcataaaattcccaaagcacacatatttcacatcaattccaacaacaatcaacaaacttttcacagtaattggcataacaaaactcaagaatcgcatcaatttctccatttttttcaaccaacttcattttttcaacaaatgaatcagtggataataagaacactccaccaatcagatgaattatatgatcaaagaataataacgacagagctaacatgaccaatccacgaactcaggagatatcacatagccaaagtgcaaacaattaaaactcaaaatctatctaagctcaaacaccaaaaatttcacaaacaacattcacagtagaaagctagaaatagctcaagtgctctaaaaaagttcaaaaattagagagactcggcctcagggattttaccgagtcttctgtacaaagaacttaaatctgaagtacatggatcataagctagcttcctctcgcacactcagatgaagaagcactaagacaaattacactaaaagaatgttcaattataaaacaagacaaacaatcagaagataagacaaacattatacacaagcagagataagacaaactctaaatataatgacttcgagacaaactttacacaatcagagatacgacaagcatcaattcaaacacttaaagtagcaatgaaataaatgagacagaaagataatatttcaacagaaatccagaaaagttgaagactttgtcgcccaaagacgcaattccccaaaagggttaacgtaaaaaacataaacgacgcaaatgaccggagcttaacttatatcatttcaagcatttgggtaaaccactggaaaaagcaagcactaggcattaaaaatgggacctttacacaaaatttcaggaaattgaagatcaaatttctcgattcaactaaaaatctgaaaactcccaaatgggtttcagagaaaaaaacaagaccatgacctcgatagacaaatcaaaggagagaaaggacttcgtcataaacacagaaaaaatgaaacaggaaaaaaacttctgatatcgagtgaaagaacggagtaatcaaaagagaatttttcagtttcaaggtaggttcaacggagagaaataatcacttacccggcggagtcagaaacagatgtcgaattcgtaaaaccccaataacgattgaggaaaatgctttagggttcttccagagtgtcttgagtctgagaatcgagattgggagagtgagaagcaataagacgccgtttgaattaaactaagaaacggtgcgttttagtagcacatattcatttttagtgaagccttggtcgagtaattccacgtcggcccacgggtgtgaagtctctgtctgaaccatacccgccgaaataaatccgtttactgtatataagtatataactatgcctaggcattcagattttgaataggatttagtttgaatatttttggatttggataatttggatagaagagtttattatatattcagattttatgactattcaattcaaatagctgtcgaatttggattggtgtttggaagaaaaaaacaaaaaaataataaacattttgattatactaaaatttggttatattttgcaaaaaaaaaaaaatgtataaatttatcaaatataactacaaaattttggaagcctaggttatttaagatatttttgttattttgtagtttgtggtataaattttgtaactaaatatagctaatattttggatatgtaaatttatttcgaattttcggatattctttagattaataattcgatatcttcctttgggttatctaagctgacaaatagtcccatgtaccgcccaaagaaattttgtaatgcaatcgggtttttagatagatatacaagtgaacggaaaaaaagtatgaccaaacactttgtatcctatcaaaggagacgattactcttttcgaaccatatagcctcgttagtggcatccaaatatactccaattctttctgtctgaatgtctttgatagccgcttagagaaaaccacctcaatatccccattgcgttggccgttaagcatagttcacaaaatgacaaaatggtcaaattcaaccagtcaccaaatcatcaacaacaaaaaacaatttccacataattatgaaggacacatacataacataacaagaaagaacaaagccacatacataatctaacatttgataaaccactttccacataatcatgaagaacgcaacagataacaaaatatatttgtttttggagatttagcacatctacttgaaaaaaaaactatatcaaaatgaacaaagtggagattatatatctgagatggttgttttgattgaattacaacatagaaataaaactatagagaaaactgtttatttcaaaacatatttttgaattttgtaataaaataaaaactgtctccaaaataataatagaatttttatgtctttgatcttgtacattaacaagtgatctaaacatcaaaagctaaatatgacatttttcctaaatataaaccattacttaatacatttataacggaagaatacgagtaagggtcgagaatagtttcgaaagctaaatatgctatccggaagattttcatcaaaatatattgattaataaaaagagtaagactacaataaaataaatagtaacacatttcagcggatgttaccaatatcgtcggtactaagatttgggggaaggctacatattgttttgacatttacgacacgaaaaaaatgcttattcaatttaaatcctgtacacttacatttacagtcaaattacttgtgtagacagagacgcaagtgtttacaacaaagctacttacgctttttcagtccaatgtttcattacttactcacccatacttcttaccaaaaccacagttcgtactctcgttgatgtaacctgaaaatacaaatgcgtaatttttctgcgttagaaattggcataaatcgggtaaatgaggacaacttgctagggttcactaataagtgcagaatgattttcaagcagaaaataaacgtttaacagatactgcatatgcaggttcatttaacaagaatttgtcgacaatgtctagctaaacaaccaaattgttgccaaacatcatgcacatatcgagaaagctaacatgtgaatcacaaaatagtaaaggaatcataattaatgagtaggtttaaggatgtattaccgtccaaatagtttataaggtcagctgctcgatattctttgtattacgtaacatcatactcccgtttcttttctcctcttgctcttcgtatgggttacctctataagtcgaacttgcctcctcattatctgaagaccctggcctttctgttaggaactgttcccagaatacatcattcactcttgctggaggagctgcatttgcttggctacctccaactgcaatctcttgtctaccccgatttttctcacttgcacttgtttctattgagttaaagtttaactcctgacttttaagagtcgtcttagctatctgtgaagctgttttgtccggtaacggagcagaagccagggttagatttaaatgacatgaaaagctaccatcagtctcctctgaagaagttagcctctgctgcaaggtctccacccttgtattatcatttaacagtaatctcctcgggcatgtcccggtatccgcaagctctagagcttcaggtgcaaatggtaggccttctctttttgttagtgtagtatttggatcacctcctgacagtatccctttgggactcgcaccttcttcattggaactttgtatactgtgtgaaaccatgttcatatctgaatcagctggagaaagctctagtcgcaatttattagagaaattttgatgaaaaatgtttccagactcgcgtctcgagctaccactactattatccagatgagaatcttctgaaggtggctttgattgctcaacttcagggagccttcgctttttgttgtaagctgaaatatccaactgctcgactttcttaccaaaattcttaacaaaagtaggattccgaatcgcagtttccaaaaaattcagcagcttcttctgcctattctccatatcatcaacatgctcagtcatttcttcaaactgatgctttgctacaaccttctgttgtttgaactttaaaagcttagcttcaattgcagctttctcacgtgaaagcttgtccatttgctcttgcaacactgctctttcttgatcagtcgacgaagcaggtggatgactgtggctgtgtataggtttccttctatgtatattcttgagaagatgcttctgatccttaataaaatcatcattcaaaaactcccacctctctggatcaatcttcctaaacccctataaccataatcccaacaacattcacaccgttaatagaaacctaaagcagagaacgaggaaaaacaacacagtctctaagttcacccatttccacaattcagtccataatcacacagagactacaatttttagctacatttcatcttctcgttgaatcaatcaatccacaatccataaactcatttccataattcagtctataaatcacacagagacctagatgcgttctaacatttccaaaaccccttttacattggaaacttgatcaaaattaggtcaattcaaaacttggaatatagaagagtttggatagaatctgactcacataggtattgagctgacgaatgaaggaagagaagttattgtgtttgaagtaggttggaagaaggaggcgtgaaaattcggcatgattccaaacgatgaagctgttgttgttagcgctccacgatacgatctggtccgttgatgaatcgtcgaccatctcgtaggttttcaccaagaaaggcgctggtcctccggctccttctccgccgctaacggaggcggaggagttacctaatgcgccgttcattgttgaatctaatcagaaactggtacaagagatggtgatgctgggaaagagagagatcctttgccgtaaataaatgaataactttcttttcattttttatactaataatatctaaaactgcaaattaaacccaaaaaatacctaaattgtttagctaaaactgcaaatggccaagtaaaaatgataaatttcataaaaatgactcttttgagtgttacttatagtcttatagaccatagtattcaacaaatattgttacgaatttgtttgagtataaatactgtgatactaatttctatccactgtcttttgtttggatatctcacaattgaaagatatcagacaaatagagctagtgaagtttaatagagtgaaatcttttgagtggagttatctatatttttctgttattttaaatcgtgttattctatccaattgtaaaacttctaatttttcatttttgtcatttgtgtgagatcttaaaaccaatttttagcctttaaaccagtttaaaacattataataattattaattttgacattattatttgataatttataaagatttcacgataaaatagataatgtttgtcaaactaatgaaaaaaataagtaaatatgcattcaaattttttataattaattaggatatatctatttatatagtgttaataaataattcaataaggattttgttgacgagaaagcattaatagtcatatttgacaaaataccaaacatatgattctcttaaaagtttacgatagataaaacgaagaaaaaaacagagttaacgataacttggtacccaaaagacaaaccttttgtgttcatcactgaaataaagactactatgaggaatattgaggatcagagaacgaaaacttggcatgaaggagagagtcttggaatggtaaggagtttcttgacgatgacagattcttccttctctctgaagttacgtaagcatagtgtgagtttcttgaggattgttgagttctctagaaagtaactcactagtttcagttttatctcgcttgcctccgctgccatcggctttgcaatcttaacatactcgagagatgttagaaaccgccggggtccaggtaaaatattagctccctccttccctggaggtatactaaatccctgcaaagacaacaagttgaatatgtcttacttttaccatttgcattcatagtaaggaagagagtttattattaagtaaagatcctaaccaagacaagagattttagattcgggcagctctcaagaaagattggcaacatttcccacctgtagtcggcgaattcaacacgcaagaaagatacattacggaataagggtagttgttcacatcttgagtaatcatatatgacctgctcgaagaaaataaaagatattagtatgaaacttataggataaagtgaagaattcaaatagtaaattcaatgatggttacctgaagagtactcgaagagatgatcatatctttaacaccagataaaccgacaagaaagtcacgaattatatgtctcgttggtagataatttggatcgaacatatattcggaacctaagttaaacacaaaatcaatatccgccttaagaagggagccatgatttttcattataaaacttgcagttcgtttatcattgagctttagatagtgaagcctaggagcatcaattacaacttctagataatcatcatcgtctgcaacataactgaagctcaatagagactgcgaagacacttgaacactttctgaaatgtcgttcaagttaatcttgtttacacttaagctttcgagaactgggcagcctgagaccagcatttcgaaagcgaaatcttcgtcaaacacaactgcatctagaacgataactttgagggaaggtaaagacacaaactcgcgattaggcaagtatacgtcatagagatttaaggatatcaagctcccacacgtaaaaactgttgggggtatcaccacttcatctctcccccaagttttgtccaggatatggagatgttgaactttccgcttaacaacagcgttaaaccactcggtgaaatgaacagtttcaagctgaacatcgtcataccaattaaccgttaacttaaacttttgtaaacacgactcgctattaaaacctagaaacctataaacgaaacccaacaaagcgttgaattccgatgaatcataatactccctcaccatgaaatcaccacattccaagtccaaaccaggtacatatctccagacatttctccagcggcgtgatagtacacttaacttaaccacatccttggtgggaagattcaagagaatcttaaaaagcaagcaatctggtaagtttctcagccgatctactctatcacctgatggcttcgcactaacgcggctctccctgtcttcttccatgttatctgcctagcaaacatcgaactgaaatgaagaatcgaataaatcttccaacgtgaaagacatcaaaatgacagaaatatgtacctaatcagatcaaacggagcgagatcgagattgagatgcttaaatctccatggaattttccgatcgtatctactgtgtcttcactccagttttagggtttcaactttttcaggtcagtagtggaaaggtgaaaagtctctaagtgctgtttcgaactacgtgtataataaataataaacatgttcagtttaatttagttttaagtgatcgatctatagttacgaaaaaaaaaaacacaagtctgggcttttaagaacttagcccactatagataaaaatcgaaccaaaccgattaaaaaagttttggtgcaaatcgacgaatttatattcaaaaaccataaacggtgttacatcatattaaaaccataaccctaggcatgtgaggcccggctcgccccaaacccgcaaaatcaactatttgaatctagtttggttcgtcccgttaaaattccgaacctatattttatagtccgaccaatcttttacagggtttttgttgatatttttggattttcttttaaaagaaaaaataacttataatttataatatatgtaagttttttaaaaaaaattgcatagttacgaaaaaaatctaaatataaaacgactcaatcaaataaatgatttaaactcgtaccaactaaaatataaagtcatatcactttgaactgagtagtagagcccaaaatttgcttttcagattcatagtaaaacacaattataaaattaggtttaggttttcaaatctactaaaaataattcttaaaccaaaatctcccaattaaactaaaatatcaaaaaaacaaaattaaaatatattttaaaagatcaaaaaaaagattaaaatatatttttaaggattttttgggctgatccgaacctggccggacttacctcgaaaagtccaaattgttttgaacatatttatgtaagtctgttttagagtttgctttaatcctaattgacatgtctataatcgactccgttgaaatttcgtcggtggtcatataaatttcataatattcgccgagatcaatggtggttgaaatctaaagtaatctcctacgttgactatcatctcaaaagactcaatactacagaagtattttctacgttccatacgatcgcgcatcgtcaacaaattcaacgttaatgtattgtttcctcatatacggtatatagaaatcataaatatgagaatgattatgtgtatctttaaaacaatacggtatatagaaatcataaatatgagaatgattatgtgtatctttaaaacaatacggtatatagaaatcataaatatgtgaatgaaacaaatcatccatttcttttcaattaatgtttttatatactatatagactcagactgtatactaaacgcttaaaaatttagtcatttagtaagaaaccgattgacgtcaacaatatatacgattcgagtgataattgtaccaatttaatttatttttgccaaactaagctttaaatctcatcttttggtcaatttgcatactacatcagtaatcactagctagcctactagtcactatcagatatgtcaatcggttcacagaactaatatattcaaatatgagaatgattcgactgagatttgtacccattttttttcttcgtgtcatagattatatataaaaaattatgaatgtcggcgatcaacgagatgatctcagaaacaaagcatatacaaaatttagcacaaaacaaagaggaaagcaaaggcaaaacaaagcatatacaaagagggaaagccgaaactaaagcaagaaagattaaacaacatactcaaaatttagcacaaaacaataaagatttgtacccatttaatgtagttttttcctagcaaaagtgcttttctttttccccttttgtgtgtacaaaagctttagatatcatcaattgagctcttattaatcacaatcaaatatgtgaaatggtatttaacttttgctctccaattaaaatttttcgctatttctgtatttttctctatccaaataaatccactaaaacaaatttgtaaaatcttaaaactaaaatcatcatacttaaattatacttcctccgtttcaattaattatcgttttataaattaattctttttaaattagttgttgttttatgtttttaatgcatgtttttaaacagatttttcaattttatccttattattttagctgattaattgatgatatcaaatttaataatacattaattagagataaaacagaaaaattatatatttttttaatttatgtaaaaatattaaacatcaactaatctaaaacagagagaatacaacatttattttagtaattatagtataatctaacatttatattcaatttaaattaccattaatagagtactataattaggtggagccgagagtaaagagaaggtctttattgactgacccatgtgaaactgaatctcccctaatttaatttgccgacaacgtaaacgcttcactttgagtatctcgaacacatccatgtgtcactctaactctctcactcttcttctccccaatttcatggtcacactaatcttcctttaacttctcaacaaacaaatcttccccttttttattttttgatccttctctctcctttttttgatgcgacccaagaattattctcagatggagaaacccatctccatcacgacggggaagtttcggaccaacaacaacaacaatcataacaatgtctggttcgttgttccactcttctttatcctctgtttcgttctcctctgtttcgactactctgctctcttcaccgacacagacgaaaccgctttctcaattcccgacgttacccagaaatcaacatcctctgaattcacgaaagatgacaacttttctcgatttcccgacgacccatctcctgattcttcctgctccggtcggtatatttacgttcatgaacttccgtatagattcaatggtgatttgcttgataattgctttaagattactagaggaaccgagaaagatatttgtccttacatcgaaaactatggttttggtcctgtcattaagaattacgagaatgtgttgttgaaacaaagttggtttacgaccaatcagttcatgctcgaggtgatattccacaacaagatgataaattacagatgtttgactaatgattcgtcactagcgtctgcggttttcgtgccgttttacgcaggtcttgatatgagtaggtatctttggggtttcaacattacggttagagattcttcgtctcatgagctgatggattggcttgtggtacagaaagagtggggtcgaatgtctggtagagaccatttcttggtttcaggaaggattgcttgggatttcaggagacagactgataacgaatctgattggggaagcaagcttcggttcttacccgagtcgcggaacatgtcgatgttgtccatcgaatcgagttcttggaagaatgattacgctattccgtatccgacttgtttccatccaagatcagtggatgagattgtggagtggcaggagctaatgaggtctcgaaaacgcgagtatctattcacctttgcgggtgctccaaggcctgaatataaagactcggttcgagggaagattatagatgagtgtttggagtcaaagaagcaatgttacttgctagactgtaactatgggaatgtgaattgtgacaaccctgtcaatgtgatgaaggttttcaggaactcggtgttttgtcttcagccaccgggtgattcttacactagaaggtcaatgtttgattcaatattggcaggctgcattccggtgttcttccatccagggacagcgtacgctcaatacaagtggcatttgcccaagaatcactcgagttactcggtttatctaccggttaaggatgtgaaggagtggaatatcaaaatcaaggagaggttgattgagattccagaggaaagagtggtgaggttgagagaagaggttataaggttgataccgaaggttgtctacgctgatccgaagtacggatcggatgggagtgaagatgcatttgagttggctgtgaagggaatgttggagaggattgaagaagtgagagagatgatgagacaagggaaagatggtagtgatgggtttgatgatagagatgattataagtatactttttctccatatgaagaacctcaagttttggcttaaagtggaaaatatgtcattatagtggccttttttttttatatagtttatataggtagaagcaatttagtgggaaaaaagaagaagaaaaaaagctattttgatataaaagaaaaaacaaaaagatgctatatgaatccttcttcaaccgttttggttaagtacttaagttcattattacttgagcatctagtctggtccaccggatttggtttgagtgtagtttagaaatgagttaaaattatgtaaatttaatttaggatttgaatggttgcgatggagcaatgtgcatggctcaaagaagtaatatttcggggttggtggagggacaaggaagttcttgtctatgatagagaaagacggtaagatagtctattcgatgatgtatataaagcaacggttgcattgtacatcctctacaatgataatataacccacatactaagaccgcataaatttatcttctttgtaggtgctcttgcttcaacattggtgtctgatgtcacagatggttcctccaatgtcagagaggtatggcaactttcctacaagtgaatcaaagttctgctgggattcaatagcgctccattctgatccaacgattcatcgagtttagtggatttgtgttgctcttcaaaatgactagaaactcaaaatctcatttatgttttagtttataaagtctgttgactgaataattattgcttagttttgttctttgatacattctctgacttataaaaggcttatgtgatctgctcgtctattttcaccggaccaaagtaccaacttatgcttacttggtaaatgagtcggatgattgtgtttggccaaataagataagttggtttattttttaacttcctcccttaaagtaattggctttaacttgattatattatccctctaattttctttataccaaataaatattctcaatgttagaactccaatattgaaattggaatgtcctcttagttaaacaaataataacttgggagttcttcatcttaaaattggaatgtcgttttagttaaacaaagaataacgtggggaaagaaaaagaagaaaaacaaagaataacttagatgtatgtatacatattcttaatctaatgtactttgctactttcattaccagacaaagaaatggtaacagaatataatagatgatagttcagttacaagaatttattcctttggggcttatcatcaatattaggacaagcataattctatgagtaaccttttcattgtaaacaaagaataacttaaaatataatcattatgtgctatctatatataaccaaaagctctcatcatcattatgtgaaaccaagacatcataaaattattgaaaatactaaaagtaagagcatagttatgtcaacttatgataaactcagaagatactatttactgtatcaaacgcgcggattaaaatgtgacggttgcaatcttggtcgtgactactatagtattggtcatcgctgttttcgttctggactcttcttccacaacgagtgcgccgaatccagtgtagagattcacaacctctatcatccacaacattctctccacatcaaagtacttaaacaaaatgaagatgtccatggagaatgcaagctatgtagaggtaacttggcaaaaatatattaccaatgttcaacatgtgattttgccatcgatttaatatgtgcaagaaaaaaagttgtggcaacaattgaggttccaaagacccatgaccaccctttatcccttattccaaagatgattacgtttacttgtcatttatgtggattgcttgatgatcggtttccttatgcatgcaatttatgtgatattacttttcacaaagattgcgccgaatccacaccagagatcaactactcttgtcatcctcaacaccttctcaagcgtctcacgcatgttccaagttatactgatggaaaatgttgtttgtgtggaagcaaacttcataacttgttttatcactgttctatttgcaattttagcgtggatgtcaactgtgaaaaaaatccaccctctttcactctttttcaccctaaagctcatgagcataagctcactcttatgccgcaacgaagttttgtatgcagcgcttgtggaatggatgacgatccaaatccttacgtatgtcctcagtgtaatttcatgattcacagaagttgtattgatataccacgcgttattaagatctatcgtcatgatcaccatatttgttacaataactttcttgacgctggagattggaaatgtggaatatgtcataaaaagataaactggacatgtggggcttattcttgttcggaatgtccagatcttgtcatgcacttgagatgtgccacaagattcgggatatggaatgggattgaacttgaaggcatatcaaaaaatactctaaaagtcaaatcatacgaggagatcgaagaaggggtaataaagcattttagtcacgaccatactttaaagtttaaagaagggagtgatggtaacggtgaatgcatacagtgcacaatatgcacttatcccatattttctaatccattttatagttgcatggagtgtgatgatttcatccttcataaaaaatgtgtggatctcccaaaaaagaaaatagattctttctacaagatgtcgacctcgctaatcacaaattatcagggtaatgcagaaaacatttgcaatgcttgtcaaaacatctatcaaggtttttcttacttaagtgatgatggaaacactttattggatgtgcgatgtggttctatttccgagccttttttccatgaaagtcatcctcattcgttatacgtcagctacttaacaggcggccgattttgtaatgcttgtagagaaaaagcaacaatggttttgagttgtgaggaatgtgaatttgttttagacattaaatgctctactctgccaaacattgttaaacacgaaaatgataaagatcatttgttgtctctatgttatggagaaaacaaatgtgagcaatgctggtgcgagatgtgtgaggagacaataaatccaaagaaatggttttattcatgtgatcattgtggcattgcttttcacatcagatgcacacttggagacttcatatggtttaaaccggaaaaaaaatctgaatcatccaccaattgtgtgattcttaataatcgtgcaagtcggccattttgttattcttgtaattctcgctgtaaatacccatccatcttgtttttctatgggaaaacattgtgttctttgcaatgtttccaacaaaaagtttatgcaatcctggcataaatcttatttattttctcaaatattttatgataaaaaacaaattagattatgtgttgcatgttaatactatatatattttaagcatcaagtatattaaaaaaaaatttatgtgcaatttggaattcaattcgatttaggttggatttctttttatttctttgttatacttttggtttagaaataatagtattcaaaacaaaatataatatactttaagtttcgatatgtattcaaatctaatcaaatactaaattttataccacgtcgtgcacatgatgattttcttttgaaacaatttgtgaattttgataagggtttattggtaacgagtgtttacttgttgctgtaagaactttttttttgttttttccacaaaagttggattttattgaactgaaccaatcaatatgggctaatataaacaaaagccgtataactataattttacaagaattaattaaagcccaacatgagcctaaacataaccctaatgaagaggaaaatacaaaaagcctccatcactaacacgtgtttcaattagaacaaacagagagcttccatcacagaccgactttaaccttgccgttcaccaccgattccggtgacaagagtcatcgtcgatattaatttgttcagtaaattttgtggtttttcaccgtttaacaaaatcggagcccataagaggataacagctaaagggaattgatagtatgcttcagttcttctacttcttctctttaattaaaattgcaaatcactgggataattaaaaaacctttcccaattaaaaaaccaaacactcaaaagataaatcagtgaaaacaattgattagtgaaatttactaaattgcaatcaccaatgagaaatcccatgaaattatttaaagcaaacaaatatggaagccgactaaaagatgttaacgaaaccatctatgtcagttgataagctggacatcactgcgtgggaagccaatagattccagacggaagccgaccaaagatgttaaagaaaccatccatgtcagaagagaagccggaaatcacggctgaggaagccagttgattccggacggaagccaactatcttggctaacagagtcataagatgctggataaaagcccgagtcatacgagacggcgatttactgaaaaattcagtcggtagaaacagagttcatctctgtaaaagatatgtaggaaaaaagagagaactttttgttttgctgtaaagaactttggatgcaaatgtttttactatttgtgaaactattattttatatttatagccaaatttaattttttaactaaacaaaaattatgccgtccatatagtatcctgtaaattaagttttagattattaattttgttaattattgataaaaaaaactcaaataatgtcatattttctcttaattcaaaagttaattgtgtataatttgattggttcccccaaaagaaaaattgattggtttagtgaaccgataaatccaatctcgtaccgaccggttcaatgggttttgtatttgctcctctgtgctctggcctctacactttggatagctgccgccgaagttttgtgcaatggcgacgaaaccgacgtttcagctgttttcttcttctcaaggttctggtctaggtttagggttccttgattcatcagagccagctcttcctccacctcctcctcctgttgaagtattatccttcgaggtatcgtcactactacttcctctgcaactccatcttcaatttcttatgtaagtttccctctttttgatttctggtgatttcgtcgcagtaggtgtcttcctccactgatttcgaagtggataaattgactatcggcgagatcactcttttgaaggtatgtttctgtcgagaaaattcaccaaactttgagaaagtaatggagaaattgagttttgttagtttctggtttggttatagggtcgtgtgagcactaaagaggtttttggattgcctaattcagatttggttcctggagtctatgaaggtgaatgatttgttctagttgtagtttatgtgatgtgtatccccctgcattaagcagttttgtaactcttgaattcgattgaatctaggcgggcttaagctttgggaaggatcgattgatcttgttaaagctcttgagaaagaatcacaaaccggaaacttatcattttccggaaagcgggttctcgaggtaggctcttttgccttaggtgtcaaacaatgatggatacaacgtgttcttcacatcactaacataagatattgaatctatatactcagcttggatgtggtcatgcacttccaggaatctatgcgtgtctcaaggtaagttgatgctgtctaagctttattatactctgtggctaagtcacatcttcttagatattatggttccttttggtgtttagggttcagatgctgttcatttccaggacttcaatgctgaggttcttcgatgtctcaccattccgaatctgaatgctaatctgtctgagaagtcttcctctgtctcagtaagtgaaacagaagtacgcttctttgctggtgagtggagtgaagttcatcaggttcttccactagttaatagtgatggtgagactaataagaagggtggttatgacatcattctaatggctgagacgatatattccatctccgctcagaaaagtcaatatgaattgattaaaagggtacactctcgttttctcctagatagcagaaacttttacgatcattcttaaagattcattggaggttcaacacttggttctttgcagtgtctggcgtatcctgatggagcagtgtatatggctgcaaagaagtactatttcggggtcggtggagggacaaggcaattcttgtctatgatagagaaagacggtaagatggtctattcgatgatgtatataaagcaacagttgcattgttcattctctacaatgataatataacctccaaccgcataaatttatcttcattgtaggtgctcttgcttcaacgttggtgtctcaagtcacagatggttcctcaaatgtcagagaggtatggaagctttcgtacaagtaagtcgaagctatactggaattcagtgtccaacgatctgattttagtggatttgggttgctcataaaaatgagtggaaattcaaaatctctcatccatgtgtttagcttatagactctcctgactgtgttataataattgcttagtttttcattttggtacattttctggcttaacgaaaggcttatgtgatctgccgttgattctcaccggaccaaagttccaaactaagctttagttggagtcgcagtttatatattgtaaatctctcacatgattagttatgcttttgagaataaatccaccagctcgacctgtcttgtaaaaaggttgtcctatttaagtcaataccatagttgccttttaatcagttagtgcagcccatactaggcttacatggtaatgatttgatgattatgttttggtctccaattaatttgagataagaggcgtagcagttggcctcgacagggtcaaaaagtcaaaaatttccgacattagaaggtatatctttttcttttttaaatctagcaaatgaaaccccaaactcaaagagtgtacagatattcaaaagagattatacttgaaaccaaaacaattcaaattcaccaacaaaataaagaacataggtgttttacaacataaagattcatgatggtgaatggtcaagagtcacggccgcatcggtaatgcttagagcagcctctactataagggttagacggtggaggaagacattgagttgagtaagactcgcctcgtttaccaccatcgcaagcaggctgattcctcctcaaagctccatacgaaagcttatgtgcctgctcctccgtcaacctctggcttgaccaagactccattatcacactcatttcctctgtctccaccatgctgctgcactccgccacagatccattgcacagagatgatgatgatgccttggaggtgacgtgtgctagtagaaggcagagaaagaagatggtgatggtggagaatatcctagagggttttatctccattttgtaagtgtcttaaagagagaagaagagagtgaattgtgaagacgaatctttggttatataataataaataagcatggaatgccacattgagacgatttcctcattgtaaagacaaagcttagtgggagcagcactagaagggaccgcacttcacctaacacactgctttacttaatagagtacgtgtgtatatttatgtccgaccactctatgttaatgtaaaactacttatacacctcggtttttgttttcctataattatgttttggtagaaagtttgaatccggattcttattggattactttttatcagtagagccaaaacaaaaggtacttatgagttctgacaatgtatattaccacgtttaatgtaatttaataatatggtcaattgctttcgtgagagggtatttcttatttattgagattttcttattgcaaacttgttatctaacatgactttagaatctaaatctaaatgtaagtttaaggaattatacatatttaaataaatggactcaactctacattacttctcaaaatatctacgttgttgcttatataagttacatgttaattttgctttccaaatcaattcatgattaatgagaaaatggagacggatacaaacgcccatagttgttgatgcatgcaacgtataacatagcgtaaaactaccgctgttaattatgcttggtgaatttcgcatctcctgttggtcgcttctcgtgtaggttaggtcgattaggctggaatattattatcaaggtttcttattatttatttttaaaaatttcatttttgataaagggtcttcaaattaaaatgcaaatgtcaagttacaggaccacaacctttttgggtcatgcagtttagatgatagtttagagattaattagtgttacacgtacctaaccgagaaatagaataacaacataaggatgatatatgaagtaaagattatccataacaattactgaagagggacttgtataaatctaagtgtttgcaagttatttctaagatgatcagatgatccacaacttgtatgcttgtaaaagaggaattttggaggtaaaaagtcattcatctgaaacaactcgttttttcttcttcttgtttacggtttttagttttctctctttgtttttgcccgaattcacaacaacaacatttcgtaatggcggatgatggtaactaatttaaaaataaatagttagataaatgattttactgagacctcataaattgatataatttcatttgttttattgttatatcttaaccaaagaattccatgaataaatccagacaaatttctcaagatccataaattttttgtgaaggttcgaactccgcaacaataaaagaaaaaaaaatcagagtagtgaatctttcaaccattaaatcaccaccagttgattatagttttatttattttggtcattacaaaatgatagaatattaaatgtgattacgtcaaaattttgattagtaaaattttgtggaatcaaaaaaattacgcaaatagttagaacgaaaacgtagatttctattgatgacgtagttgttaccctcaaattcggatcaagtaaccaaatagctagaacaaaaacgtttagtaagaatatagatcatggttttctataaaattatgatttgtaaactttcacaaaaaaaaattttaaaacattttcgtaattttgcagcatattaatcggagccaagataacttatgtcgtgtgttggtacgacaataattaatctgaaaatcagactaactgaccagattactaaaataaacaatactcgatgatcatcatggtcagttccataattttttgtttctctaattagtcctagatatatataagaataggaattgcaagcacatagataacacacgttgcatggagtatacatactcaacaaacttattatacaatatagggttattacaattaattaattcgaaattattttatcagcagagagttttcacttcaacctctgcatctgtagtacttggggtggccacggttgtacttgttcgacggatgaggcaaggctcttcctccaccaccggaagctgccgaagccgccgtgtcatgtttgagagctccataggtgagatacctcaccttacttgttaacatcatcctctcaccactcggtgatgtcaccatatctttagtttcttcatcttcctttaggatgagtttgttcacctctccatcttcttcatcgctctcgtaacgttctttcacccacgtgttattcacgtgatgatttctcgatacacgttcttcgtcgttttcggtaaatgtgtagtactccatgattgatgtttctttatgctttgagttatatatttattagtaggggctacacctttatttatagtgaacgattgtgtttgtaacttgtaaatgtaatgtttaagcgaatcttttttacttttaactagaaagataattcattatatcgaaaacaaatactttttttttttctccttttcaaaaaggttaccggccggacgtaatatgtttcttcttagttattttggataagagtgattgtgatgcaaactctttaacaaaaaaaaaaaaaaatagttcgtaattagtctcttgaagcatagaaccataaggagttttccgaaaaaatccaaattattattctttaggtggctaatttatatactggttgaattattgatgttgggttatatggtatagtttagatttattcgttgttgacggtagatccccatttagctgctttgttttaccattgcttttcatttggagtgttattgtttgtttgcttttgttcaattgagtttagtttccaaggatatcttgtcatctgtccggttagtttcggggattatgcatttgatcgcaggctccttaattgtatttttcttatatatcatcaatgaaaatcaaaattctagtgagaaaaagacagtagatattattttttcttatacaaaaatctagtttcagtttgatagacaattattataaataaagttgtaaagatcatgtaatgatgttttatttatggtatttaatattttttgtcattcaattgtaaaattataatatctataatcataaaaaattatgttcaaaaaataaaattgaaaattataccaatatattcaaattgaaaatagcatcataaaattttattcacattgtgtagcaaaacaatgcttaaaagctcatctcaataaagaggataattcagttagtgaaaagtaactaaccagctcattcagtttagtgaaatttatattcattaataaaaataaaacaaaaagttaaactgtaattatgttaagaataatgtaatataattgaaagaaaagtaagataacactttgtaaaatatagaaagtcggaattgaataatactttggcaaattcggattggtttgataatgcaaaatattattatctcttagaatcttattccaaaatatgaagtgagacgatgacttacgattctaagaattagctgccttttgtgcccacttagctgatgtcttaagcaacggcccacgttacagctggtgaaatgtatattaatacactaaagttatgaaaactatattgtaaacgatggagaagagaaataaataacaaattcggtaatatatataaaaaaaatagaataaaagacagatgcctatacaagaggtttatttagttaatttattttatcaagttgaacgttttactaaattatgtaaatgtttcatatatttataaccaataaaaataatatcgaaagtgtgtaaaaaataaatcatttgttaatctaaatataaccaatcaaacttctttttttcaattcacaaccagaattgtacatcaataacaataaaaaatatacaaactaaaatttatagccaaaaacctagacttactagagctaatgactttttgtcgttgattgattttcttccatcatattcttttatacccatactgttgtcatattatgactggatacccattcagaatttcagatattcatcattgccataatctataatcttttttaaagaaaagtgatactcataaccaggtgtgacttgtgagccacataagccgaagaaacatagacttagagcttcaaatgttcatatatttcaaccactaatattatcaaaagtatctgtagctaagtttgttaaaagttggtgattatcactctactaatggctttgattggttatgttgtatcaccgtagtacaaaatgttaccatcttatgtgtaaaccattaagtgcagtctgacgtcatctgtagatggtgttataaaaggtgataccacgaatcttactactatctaacattgaaatgtattgccatctcttaccactatttatccgacttacaccctttttttgtttgaagaaatcagtagttaatagctacactatcttttttgcttggagccaacattttatcagaatcggctctccggtgacacactaatactgaaacgttaacaacaagaaccgaacagagtggtgaaaaaataagaaacggaaccaagtgttaagtcgaattgtagaaagttttattacttaagacacataggagtcaaaatgtacaaacaagtgttaattgtctgagtcatcttactcccttttttattcaactctactaaacacacaacaaataataaaactcaatttaaacttaacacaaaacacactctaaacaaagccaaattcaaatccagatatcggaagtgcagtctccacctggatatctcatctcgtgggctagtgaaggaccgtctggttcatcaccaaagtccacaaagaaatcagggtttatggtgagaccacctttttctgtatcaacatcaatctgaattatgtgtgagcctttctccatgatttcaggataaaactgacgatcccatgcgctaaacagcgagtttgttgcatacaatcgtttcccatcgaggctcagctgaatcatttgaggtccacctcgtaaagatttcccctgacatcaccaaaacaacttctatattatgcaaaaaaaatgtgaaacttaattaaatcctcaaatgattacacgttggtgcaaaccttgatctgaggaacctcgaattggaaagtgtttccgtcttctccaaccgccttaacaggactgcccttttgtagtaatcctccaacccaaatttgccctgttaatacagggtttttagggtcctctatgttgtactgacgaatgtctccatggagccagttcacaaagtaaataaatcggtcatcgagggagatcaagaagtcggtgattagccccggcatttctggaagtatccagttttcgactttcaacggtttaaccgatataacaacctaaaacaagttgttattgctggttggttagtcatagaattataagaaccaaaacaagaagtaatgaaaatgaatcagaaactacacttacctcatggctccatgtttcatcactgttcttgaaaaatcttatcatattactcgacaaggcactcccaacaaaccctgtatctttagatggatcatgcaagaatctaatctgcaaccacatataagttataacaacaaccggtcacgatacttccttccatttatatcacctgaaagaaaaatacagatcatattttgaaagagatatgttacctccaaaggtaagagaccagtcggtccaaggtcaattaattgttttatttcacctcctggccaactataaacatgtagatgacttccatacaagccatcagcaacgtgctgaagattgaaacctttagagaaggctttaggtgctccccaagatgtgctgatcatggtcttgtgccgaggttggtaccaaaaatcatacccatacaaaggactatgtcctggtttctcccacctgatacaataaccaacaatgatatatgactaatagcgacaagaaactaaaacagaaaatgctttgttttgcaataagatacctattcttgatgttaaaatcagagtcaagaagaagaaacccattccccttagcattcccctcttcatctccaagacaggacaccaagatctcgcccgtggcgaggcaatgagccgtgtgaggaaacgccaatccagtcttatcagcaatctctttaggatcaacatacttatacaaagacggagccctcgggttttccttagtatcaatcgcataaatgcgaccagatcttcatcaaaacaatatttatctattcagtcaataaacaaactcacagagagatataagagaagaatcaaaaagactaaagaatctttacataagagacggtaacacgagataacgtctatcaacagaagcatcaccatggcaagaactacaagagttccaaccagaatgatgaagctcatcaccaacaaaaggcattggtaatctatgaataacacttgaatacgaaggcgagcttggatctacatccaccgtcgccaaataatccggtttatctattccagttccttcaaagccaaaaagatatcagaatcaagattcgatttggaatattcaagattccgtgaagattcgatctggattctaaaacagtagaaatttatgacaaatcaaatcaaatgtgtaccggtgtagacggcggttacgtagataagtttctccgatggaccagacatagcggcgagaggagtcgcgtaaccaggaccaccgtacttgcaacatcctttgcttccgccgttgcttaccgttaccggagctacaacttccgtttccgtcgccatctctctatctctctctatgtgaagtcaaatattgaattgtgtgtatatggtagtcgttaagctacacgtctctctctttaaagtatatcgcaaacacacagtgacaagcttttggctatttgcgagtgaacttgattagtccttgtaattaaattaatgaatcacattactgaaaattatagtaagttaattgagatgtatttcgaattaaaatacgtctccatgcacaaaatagataacataaacaattaaccagatcttgtccattaacaaaataacaagaagaagataacaaatctggtccatgtgtccacgtacactgtatctgacgtgtttttgagttgatgatccataattcgacccggttttgatcggttcaattcggttactcgaaagatagagacacacaacataaatagaaagttttattatcacggaataagccacaaaggagtaagaacaactttaattgtcttgatcacgaatctagccacaaatccagcttacactcttagggagccaaaatcagatccagatatcggaagtgcagtctccgccgggatatctcatctcgtgagctagtgcaggaccgtctggttcatcaccaaagtccacaaagaagtcagggtttagagtgagaccacctttgtctgtatcaacatcgatttgaattatgtgtgagcctttctccatgatttccgggtaaaactgacggtcccatgcgctaaatagcgagtttgtcgcatataatcttttcccatctaggcttagttggatcatctgaggtcctgctcttagagacttcccctgaaatcaccaagacagtttcaatagaatgcaaattgtttaaactttggttaaaacgctccaaaagattatattttggttacaaaccttgatctgaggaacatcgaattggtaagtattaccatcttctccaacagccttataaggactacccttttgtagtaatcctccgacccatatttgtccggttaagaccgggtttttagggtcttcgatgttgtactgacgaatgtctccatgaagccagttcacaaagtagaaaaaccggtcatcgagggagatcaagaagtcggtgataagccccggcatttctggaagtatccagttttcgactttcaacggtttaaccgatataacaacctaaaacaacaccagtttaaatcacaagttaatcatagatttgagataagacaaaagaaaaagatttagaaacttcacttgcctcatggctccacgtgtcatcactgttcttgaaaaaccttatcatattactagacaaagcactcccaacataccctgtatctttagaaggatcatgcaagaatctgatctgcaaccacataacaacaaaaacccaataagcttacatacttggttactaacacagatcatcaacatttatgttggtgtaatgttacctcaagaggtaagagaccggtatttccaaggtcaattatctgtttcatttcaccttcaggccattgataaatatgcaaatgacttccatacaagccatccgcaacatgctggagattgaaacctttggagaaggctttaggtgcaccccaagaagtgctgatcatggtcttgaaccgaggttggtaccaaaaatcataaccaaacaaaggaccatgtcctggtttgtcccacctgcttttgacattgaagtcagagtctagcaaaagaaacccgttccctttggcgtttccttctttgtccccaaggcatgacaccaacatatcccctgaagctaggcaatgagatgtatgtggaaatgctaatcctgtcttttcagcaatctccttaggctctacaaccttgtacaaagacggagcctttgggtcggtctttgtgtcgattgcatagatgcgaccagaacttcattcaaacaagaaagaaacatatttttagtcaattcatcatcaagaaatgtgagagggtcaatgtaaggatcttacattaagcctggtaagacaaggtaacgtctatcagcagaagcatcaccatggcaagagctgcaagagttccaaccagtgtggtgaagctcatctcctatatatggcatttttagtctgtgaatgacgcttgaaaatgtgggtgagcttggatccacatccaccgttgccaagtagtccggtttgtctcgccccgttcctaaattaacacaatcaaataaagcaaaagctctcaaaacattacctagtactagtacgtagtccggttttataagattaaacggatttaagccaactattgccaagggacttgagttacaagtccatgaaacttaacattgttatgtgattcaattgagattccatgggatctaacaaagattctttaaacgttaaaagtataagattaagtcagattttttttttagtctcaaaatagcaagaaattgttgaataaaaatataagttgaaaatgtttaacaaaaaaaatatatttatttatatataagttgaagatgagaaaatgaaatgtttaccggagtaaagggcagtgacatagatgagcttttcccgtggaccggccatggcggcgagaggcgtcgcgtaacctggaccggacttgcaacatcctttgcttttgccattgctcaccgccgtggctaatacggtttcggttgccatttctctctgagtatgtggaattagtgaagctacacgtctctgagtatatctcaaacgcaagcacacttgtgatatatatgagtaggaaacttttggctatacgtaatacgtgagtaagcacgattgtgacttgtgtcgttgttatctacatatatgtttctatttatatgtctctatataaagtatgtgacaagaaacaatattcgtttaataattctacttttgctaaagagggtttagttgtacattaagaaattgaaacagatttcttgcaagttgtaaccaaagtgtatatggatgtgttttgaattaagatatagatataaagagactttgttggtacatttttggttttggttttatattttataacattcctcaaatttcacgaattcaaaacttacttccgcaattatctatagcatgctaaaatatataattagaaaaaaaatttgaaattactaatcgtgaaaaattgttcaacacaaacattttcattattttattcatatcattcattattagcataagtccatgcacgtgttgttgttactatagtcatgacttgtgagttggtaagtgaaatttgaataaacaaacatgttacttaatccgtgagttggtgagtgagtgagtgctattaaaacagtgactcttttgttgttatctacaacgcatatgaattaactcacccactttattgtttctttattgaggataaaaatcgattttgcgtgaccgtagttactatactattaaaaaaatgtaaaaatctcaacaattttcataaataaaatgttacaatagagaagaagcttaccagaagtcattgcaggaacattttcctcccttaaaatgatgatatctagtcgcatctctaactataatctctctttctgtaatctcacttatatgtttcagaacaacatgacaatctccacaaacccttagatttttcacaatccgtataggagttcccggaacagctttaagcaatccgtatgcaacagcggatcgttcgctatgccaaaacaaaagcttttctttctcttgctcatccatgtcgtgtaggatccaactagtatcaggaacataaccatttcttatcctcatttcttcctctagcttcttaagcaatcgaaaaatgtcttcttttagaggatgagatgtttctcctgcgtaaaacacttcggtttctttccgtacctcgacgctactgtgccctggatcctttctaacttccatttctcctagtttccttcttgcttctgatacttttccccacaaagaagcacttgcatagatgtttgataaaagtatataagtcgatggatctttcagtttaaagctgcttacgagatgatcagcgattcttatacccatctgacctcgtccctggcgcttgcaagcgctaagtaaagcagcccatgttggttcatctggaggaaacggcattgtatgaattaagttctcagcctcatcaaggagtccagagcgaccgagaagatccaataagcatgtataatgctgcaaagatgggcgaattccatagtccttagtcattgattggaaaagctcacggcctttctcaacaaaaccgacatggctacacgcatatatcaacccaacaaatgtgacctcattgggctttacaccgtgagaaaccatgtcatcatacaacgctaatgccttctcagcctgcccgtgctgagccattccaactataagcgatgtccatgaaactacatctctgtgacgcatcctactgaaaatatcctttgcagctataacatcgctgcatttagcgtacatatcgataagggcgttactaataaacacacaagaatcaaatcctagagctataaccaacccatgaacctgcctccccgctatagaagctgccaaattagcacaagcgccaacgatgctcgaaagaactaaaggatccaaaatgtcaactctttctctcctcatttcagtgaaaacagaaaaagcttcaagccctttcccactctgtacaaaaccagagatcaacgcagtccaagaatacaaattcttgactggtaatatcctaaaaagctccaaagcttcttcctttcttccgcttttagcatatccagataccattgcagtccatgaaatggtgtttttcactcttatagaatcgaaaactgctttagcactattaagcaatccacatttagcatacatatcaaccagtgaagacttaacaacttcatcattagcatactcagagactataaaatggcaatgaacttgcctcccgtgatcaatagatcctaagttagcacaagccttaacaagagccgagaacacaaaatcatcaggacgcaacccagagctcgaacccactgaagaaaatactgatagtgtcttaccagagagattggcttgattaagagctgtgagaaccgaggcccaggcgatgtgatctctatgaggcatttcgtcgaacacctggagagcatgagaagcagcaccgcatttcccatagacattgacaagtgtgttggccaaagggcaacattgaacgatcccgagcttgacgatgtgggcatggagggctttagcagtggttagggttcgattcctggcgcagagctggagctgatgaagatagtgagggataagcattcatcagctgttgttgcttaagggcttctagagttattatggtaacgctaatatctaaattagtttacactttttctatatatgtattgaaattaacaaatttgaaaacaacatttcagttatttaattcgtaaacaattcaatgtaataaatctacttattctctattattttatttattaattttatttatcattaaatatttcatgaataataataaatttatttatgtatcactgatttagttattcttcttatacataaaaatttaaataaatgcaaataataacttaattgattgtttgcaacagtaatacagtaataaaattcaattttgtaaacaatttttcgtaaaacgtattactagaatcgaattatcacgaaattttctacaagactaaaattttaaaatcaattatgcgtcaaaagtatatgttatctctttatcaatcccttggtggtaaatttgagaccatcagttacatttgagtaattctaagcatttgaaatttcttaccgatgaactaattcaaccatacatgagaatccgcaattctccccgatcatattattttttgagtgttaaacaattcgtaatctagtattaaaggttaaatgaaaaaaaaaatgaacttatccttttacgtacacataagactgtgttaacttgaaagggaaagggttggtcacacataggaaaaagtctctagagccaagaaaaacatatttcactttgtaactaatactacattattgatcattctagacagggatgtttaaccccatcaacatattaaattcagggtatataatattatacttctcagagatacttttattgaatttctgtcgttgtgacagcaaatgcatggaaaacgttcggccaatacccttagtctcttatttgatttgagttcatcatttgccattagttgtctttagtctagagtaataaaacttattcaatttaattgtctccattttggtttaacgtcaattcaattttccactaaaaatccgcatcgaaacaaaatagctagggaacatatatacattcgagaaaagtaagaaccgaaatcgaagaacacaaacaatttaaacatgaatataaaagttaatgaaaatagtaactttttacgtctcaccactatcgattttctgaatccattaagttttttaagaaaaattatagaagaaattaactcaacctaccaatcaaaaactacaaaaagagtaaaactttcaaccacacatttagattgatcaaagatgaaagatgtggtcagcttgttgaaaaaaaacacagaaaaagatgtggtcggattttggatcgattgtttttgttccgttctatcgaattggatcggattgatcggattaacgctactttaaccaaataaactctcgttctaaccctagctatatatataataagattcgctcaaaggttaaaacactttcaaaaatatgctttataaaaaaaaaacatattctaaaacggtcgttttcagccaggttatctatcaccggttcacctattttatcttttgtagaaagaagatagtgattcttaccggcttccctggaacttggtaaacgtgaatcactacacaattcaaataactttttaggcacagtaaatttagacttacacttgtgaataataatgcatggccattattgtttttttctaattaaaaaaatccaatttgcaacataatagtgcaagatgatagaatcgtggttaaaaagttttttgttttttttcttaaatagagaaaatcaaaacatatgtttttattttaacgttacattctctatataaacgaaggagaccaaaagtgaaagtattcatcaaccaaagaagaaacaaaaaacacacttcactcgctaccgaaggaagagagatagagagagggagatggctacgtcaggaacatatgtgacggaggttcctttgaaaggatcagcggagaaacactacaagcggtggaggaatgagaaccaccttttccccgacgccatcggccaccacatccaaggtgtcaccgtccacgacggcgaatgggactcccatggagccctcaagatttggaactacacattaggtaaaaaatgtatttacgtacttccgttaattacatataacccacgtctgaaaactagggttatgatgattatcacataaaaaatgataaaatttagttttaccaattaatgtgtcataagtataaaaagaaatcatttatcaaacgttttgaccatatgtaaagtctatggaacaaaccatatacgtaatctttccatttaaagcattcatcggaagtataatctttgtggaagaatctcttaaaccttgaaattagttgggtgatacattacataaacccaaacatataaatgtagatgggaaaccggagatgttcaaggagaggagagagatagacgatgaaaacatggcggtaacgttcgttggactagaaggtcacgtgatggagcagcttaaagtgtatgataccattttacagttcattcaaaagtccccggatgatatcgtttgcaagatcactatgacctgggagaagcgagccgatgactcgcctgaacccagcaactacatgaagttggtcaagagtctcgctgctgacatggacgcccacgttctcaaagcctaatccctctcacctaaacccatcatcatcgtgtgtgtaactttgtatgatgttttcaatataataaatgggggtttgcatgtatggtttcatctactgtaatatgctttgatgttgtttataataattaatgatttaaagagtaattaatcaatattgtcctaaatagtgtttcactatatattgtacttagtggttgtattatccatcattttatatgttcatttaatggttgtattattgctctctttattcgttgacatctttatattttattttattttatataatttttgtattctttgcacatctagtgatgccttcagcaactattccctggtgcaactactatctaggactacatgcctatctaccggctaccgctgcaataccatattaccatctacaaagttatctctcaggttctggtttcaagctaggcttggtatatgttcgtttagtggttgtattatattcatcaatcattgtttttctaactgcatgttctttcttcttgagtactgtatcattattaattggccatatatacaaaaataaatattagtatttttgcttggtttttcattttaaaaatatcattaaaattctaagatcatatttagaaaagaaaaaaaaaaaaagatcgtgattattagagattcaagatagttttcatcgatttatattatcgggttcagcctatcaacataatctcatttaattgggaatgaatccacattacgtgaggatagaaagattgaagttgactaacagaaaacggaaagagtgactcgaatttacgtccaatattacataatattgagaaggaaaatagaaaggaggaagatcttggattcgagaatgtggaagaaaatcatattcgaagacttaatagaagaaaataaatagaacagtcacaaagcaaaggacattcgacttacaagggaaaaaccctaacttgctatcaacgcagggaaaaaccctaacttgctatcaacgcaagagagaactccttgtaattgtataaatttgttcttaaagatagatgagtttccaaagaacaagtacaaaagtttaaataaagaagggagaggagaagagtttagtcttggaacaagctccaagacaactcgaaaatgacaaaaaacataaataaaaatttgaacgactcttggccttcttattttcgtgtcttcttcttttaaaagggttggaccaaattgataatggggatttggaagtgttactcaagcctcattaataacctactaaagaaaactatgtgaacaaaaccttagaagggaaaaaagtactcaagtaacacttagcccattaccaattatcttaggctattataaaaacaaagtggtttggataacttcgcttggatgttggtctaatcgtctaagcaattcgctaacaacttggttgagaagtcttgtcttcgattgagtcatcggacccattaagtcgtccaaagcttcccccgctagatgctgctactcggctatgagctccgggtcttgttcgaccaaagttatatcatgccctcccttttgaaatggatttgtcctcaaatctgtatcatctacaaaaaaggagataaatcagaaacaataaaactcgaacttatattatacttacctcgaagatcaatttgataaaaattatcattgatccgttttgtgatggttaacgacccgtcgatccttgacatcaatttgctacgcctttcgaagtagaactgtccccaaattctattgacaaggcaagttgttgttgcttgcatagctttcattctggataccactagtgccatgcctttttggtgtagaactctccccaatttctattgacgagattagttgttgttgcttgcatagctttcattctggataccactggtgccatgcctgccctctgattcatattctttcccttttgtgaaaaagaccatttcttccccaaactcaacaactcattcctttatctgactaaggaaaatgttcatcctatcatgatcatttgactgcgtagaggtctctgaatcatcgagacaaaacccgcttgcatcatctttagccatcacacctgacccaaagacgatgacgtcgatatgtccacactttgattcgagtttcatatctcttgagtttggagtatctctcgagcttctccaaactcgagagatatgcaacttgaatcaaagttgtaaagagcccaattgtgaggtgttcagactttttttgtttttctttaaatagaacaaaaaacgccaaaaatttcagaacgtttaggactggcaaaaatcttgtgatacattgtacatataatttcatttaatgtgatgaactgtgatttagctttttctttttatatcagttgaaatttaacttttggagaatatcataaattccatatttccactaaattatagaaaaataaagattttttgttgaagattaaaagaaactttgaccaaatttatgtagaagagatttttaacctttttaaacaatgagattatatcttccataaacataaagtggacactttgaaaatggatttcttacccaattctccttatttattttctaacttaacattttaggccttgatacaatatcagaatcggacatgaccaagaccaaaccagactgtccggttaaccatacccatatgcaaatcaagaaaaaacctatggttgcttactcatatgcaaatcaaccctaagaagattaatggttcaggagaaaacacaaatcaaagatggtcctcggcgactcacccggaccacaccaaactctctaccaccaaattaatagagattcccccaaaccaaattgaagattcatcaacaaaccacacattttaagatcgtttgatcaaggaataatcataaaacaacgagccagtccactagaatgccgtgatgacccacttgaatgaagccaatttcactttcatcaccccaaagtcaactttcatcgacccatattcgacatttactgatattataattttttatgaagaatgggcaagtcatttctgaatagtaccgaaccattcacctagtttttacgagaaccttcccgaatcgtaccaagttcagtttcctcaatcaaatgacatatttcctagaacaatattgaaatttcaccaaccaacaacctattttatgaagaattggtgaggaagatttgtgtgttatcaaggtatatcgaagatggtcgagagacactcaattcagactatacgagcacctacctagagctgtttaaggaaagttttttttttctttcctttgtatgcatctcaaagccacatatggaaactaagagatcttgtacacattctagaagcttctccacacgtccagtggtacactttccccacttgatcatgcaaagaccaaacttgccatatttggatctagaaggtttaattcacaaaaactcttttcttgtcactgctgctgcgtttttaaggccctccacatgtcccacaatttcccaagataatacacaagttttatttggtttaacattacaatagactacaaactaaaatgtccatatcaccttgtctcaaagtaaggtaaatcattggaggatgttctgtaatatgtccatatcattctttccaatgtgtgatattattatccccaagacagaacttgtaggacacgttatatttatccttgataatcaatgaatttaaagagtacattacttacttagtggttgtatttttcccctattttttcatcattttatatgttcatttagtggttttattattatattcaccaatcatcatttttcattattaattggccgtatacaaaataattagaaataaaaaatttacaagctgtaaaatgttttgtttgtatatattctttaaggctatgattttattgttatagttaatattagcaacaggaacaagactaatacaaatgtcttaactgtagagttgatcaatctcctctttgtatttagccacgaccatgtcccgtctaatcttcatagttggtgtcattaacccgttgtctatctgcattgttgtgtcattaaagagttctcttaataaggtcttaaaagagtcctgaatcagcagaacagcaataagaaaggactataaatatttaccgtgaaagggtcgtcgacgatcaagactggtccgacttgaaacgaacattctgatgtcctgcaacattgtttaaacaaagtaaatataagatctaatacttttaacttacgttaattacaaagtatttagtaccattttctcagttcttggtagaccaagctctttagtgtttctttggatgtttcaggatctactctttgtgcttcctctttgtttgggataatgatagctccaaggcgacgtcggtcctgttaacgagaaatcaattttgaataacaacaaataagcaaaatagccgatactaagatttttcatttttgtaattgtcttgagagaatttaagcacctgtccaataacaacaatttgttcaatcaccctgcttctcatggcggcttcttcaatctccaacggttccacattttcacctatagtgatgatgttatcgatataagaaccgagttcttttatttaatcgattttgggttcgattatgcatttgaacatgtttgtaaataggataatacctgtggaaagtacaattgtgtcttttgcacggccttcaagaacaatgacacctccacagtggcgactccgcccttttgagtgatgaggagcaatccaaccggtgtctcctgtattgaaccatccactctcatttagaacttgctttgtagtcgatggattctgcagcacacaccaacagaaagatgagttaacccgatttaatcatcaatgcaaaaactcttacacaattacatacatgcaaaatagtaaggcttgatgagtcaacaaacttaaatgtgaggaaaacaggaaatgaagaagaagaatatgctatttaccttataataacccttcataacctgtggacctctgactttgataatgccctttgaaccaggagggagtacattattagtctcaggatctacaattttgaattctgtaccatgcattggatgcccagctgagccaagaacctttagtagaaaacaaaagacgaaacgatatcctgtaataagtcgccgaagaagacaaatgatggatcataataaagacagttcggacttgtaatttcccaaggaaacaaaaacaaagttgtctcagtgggaaaagagactagctagtgaagttctgttcaatacttctacaaaatgtaactgctttgtctgtgaactttggtaaggtaatttcagatgttagctttcatgcaaataaatcagagatgatagcatttgcaaacactcaaaaagaaacttcaaagcgttgtgtgttcacaactcgtttagaaaacagaaggcagaataacttacattgcagctaagtgtccgtgcacagacaacaggtgaggtctctgtcaaaccataaccattttgtagaatcacaccgatggcctgcatgattttggaactaagtcttttagatgtcgaaactttcaaagccaaaaaaaaagaaattgttctaactttccaagagaaaatatagacggcttaacctcaaaaaacttgtcaacatgaatgggtaaactaccacctccgctaataccagcctgtggaaaccaaaatcatatcagtgttaactattaatatatatctaacaaaacaaaatagaaaatagaattcgcaaactaccttcgatatcccaatagacgaatgaattttcttgtagataagctttttggccaacatatgtaatggccacaacaaggcagcaattactctcgcccacaaccaatccacaaaagcaacaatatacattggaggcttttgctcttttgtcagacacataccctgtaaaccagaccaaaaaatcaaaagttcaggaaccacaaaaagggtaatcagaaaaactcttaaaacaaactataacgtaagaacaagtgttaaaaaggtatcatgaacctcatatatccttttcatctccatatatgccatactgactttgatcaatgtaagtgctagaaatttacggccagcagaacttgcagaaatttgcttttgaatcccactacagagctcaaagaggaaacaaagaaacgaatgacaaaacttgttaagaaccaacgcatagaatccatcattatatataatatgaatattgtgcaaacttttaacttgaaaaatgacaaacctgtaaagtgtctcatatactagaggaacggacacaatatagttcggttggtaccgctttagatcatcctataccaaaagaaaacaaaaataaaaaggaattagagccaaaagaagcaacgctaaatgaattacttgatacattctgcaaatttcacattttcccactttccagtgtttcataactactatggcacaatgatatttcatgaattttcctaacgacaatgcttggaagtgatactgactaaataaaatcggatgaagagaataacctttaagtatcttatagatgtatacatttgctcaactccacaagtgaatatgaagtattcactagcacgttcataggcatgccatgatggtagcatgcttagaaatttatccccagcttgagcaggtacatatttggataaatgttttatctggaaaatgtttaagaaaaggattctcaaacatattattttttcagaaagtaataattaatacttgataattaaaagagacagaaacaccaaatacacgcttgcaaaaaagtattgagcctattggtttaacctggtgtaagagattccgatgtgtaagcataacgccttttggatttcccgtggtaccactggtatacataattgcagctgtatcatctgaatcgatgaattgatttctatagctccctgcagtcatctgtttgttagcatttattcttttagggcactgtaggaaaaaaaacagaaccttaacgtactggtatcattagatgctgataattttgcacgactctcctgtccttggtttataatttctgcataactgtaaactggaatctgcatcccctgtgtgaccagtgatgatttctcaccccagagaagtatcaaaaatctcagagatgcctttgacgtaaatgactcagcaatgcggttgaaaaactcaggattatccacaacaatggctacgctgcaatatagatcagttgaaattatagatctctacagtctatattctaaacaaatgcacttatgcacagataactgaagagacacaatatattgagggagcaaagatctttttgaatagatacgattttacaggagagctggtgcaataagataaaatgagaaatcaagagctgtttaattagaactacatcaaagcagaagattaattcctaagataccaaaactgtcaatctaaaccaaacatactgctcttagaatcaacatcatcattagatattcagatgcatctgaagatatagaactagaactgtttgatgaaaaaaagataacaagatgacgaaacaaacggcacaaagatgaggtcggtataataaagccaaactatgcatctctcaagagtaggtatgatatttacgttaaacaacataataaatgaaaagtgttggcatacctttcagaatgacggtatatctgcagtaactcttcaacagaggacctagatcctctgacaacattgactgcccctgtggccattatacctaacataaagtataaaacagcatatatagatatcaatacttgggacgagcaaaggagaaatgaaggaacagtgtatattaaaatattgcaccaagaagtgaagttaaaaatagctaagcaaagctagcaccatgagcttatcatcaactgagatgacagagtaccacgtaaaattagaggaaagaaaagaaaagagaagaaacatctcaaacgtatctcaaaagattgtttgtttgatggctaatgtgtaaggtaaggccctaagaagctaggtgatataaatttgaacgaaaccaatccccctagttcttcttgctcttcttataaactagtgagtaataatgttcttgtgtgtgcctgttaggttcggacctaacaaacactaattccagaggtagaactcaccccaaaaagctagcttgtgggggagagggtgcctttagacttataaaccatttgttattcctttcccttcgaatgtaagatcttctaagttttacttagtaatattttgtctttttcctccaaagtaggcccttattgggcccttctcagttccatatcattcaccacatacataccttgatctgaaacaagccatcggcaggagttatcagcaaaaagtgcaatcttctcatctgctttcactccaagaactcgtaagccctcagcaaagtccaaaatttcttgttccaactgcaaatttaaataaagaatatgatggtttccgttgctcaccaagaattaatatctacaatcacaatctatcaacgacctatctaacaacaagaataatagttccctgcagaacacacggttgcaataaccaggagcagagtacttattggttctaggatcctaagacagaagtacatataacaaagagcaatggcatgcctcactaaaactctaaaaatcagtaaaaacatcaattggattcttgaaaacatctacaacttataatcatcatgaggaactgaacaagactgtcaattagctactctaccctcatcaccatcaccttaacaagctattaagaatcagctgatctcccctcatcagctattaagaactatactatagtttttaatgttattcaaagtgaccagaccaataacacagtatgaggtttccacaatcacatcaaacacaaaaaataaaataagcagaccctgctttctggaatacatagctcctaaatcatagaacaagttttggtgaaaaattcaaggacaggtctctgtttattcttctttgcaacaatattgatgaatagtaaccttagtaagaaaactacctgcttgtacgtcagtttcaaaggaggatcatgataaggatccaccaatgcaactctatcaccatacttttctgcagatgatctccaaatatcaggaacagccttccattcactagagcgcaaagcagcatctcccgaaaacgaggagctttcaagaaatggagaagacggcttcacttctttttcctgaagcatacataccgaaactgaatgttaccggattagatataaaccttagtgggtataaaaactacaatgacaaaagaataacaaacatatattaacagaatttgaggatcagatttgatgagcaagagcaagagccttgtttcatccatttgtatagaacaattgggacccaaagaatcaacaaaaagatacaaacttaacaaagaaattgcaaaaagatacaattttgataactatggctaaaacttgtaaagttcaaaagccagtcatcaacagataatgatcacttcttcctcaaattgactagtttcgaaagtaaagcgaagaactttataatccaattccaaaaacccaaaagcgagattacaattgttaaagataacaaaacagaggctagaatttgatctcgcctttgactcgcagtgaacccgaaatcgccggaatgatggaattcgaacactttcgtgacccgaaatcaatctgaacccaaaatcaggaaactgacgagaaggagaaccgtaagagagtagtgtagaaggtcccaaagaagaagtcgaagccatcgttgaggaagaggcgatgaagaaggaataatcaggtttcagacgaatttgcatttgcagataagatgaagatgaggactgtctttatagaagaaatggaacagagagagaatgagatctcgaagcaaacgtagtaaccatgtcgttgtcttgattttgatcttcactggttccagaagaagctcaccggaggagatttttttatatatacattcaattaaaaaatttatgtgttttaatttattattattatttttttgtctttttgctcataatctcgtacgaaaactttagtgttactcaatggaatcacatgagaatatacgacatttggtgctgatgatccaattatggtctttacattaattcttagctaatttgggtttgtgtttatgtcagaaaatctaaaaattcttaaaattattaaagttcttgatttttttgcagctttagggcaaagtaaatctcccacccatttacgtttttgtagctgttacagtttgtgatagataattttgttgttgattagagaatgtaataataatcagctttgtaagggaaaaaaattactatttattaattatttgaattttttttctcaacatagcgaaacttgaagcagaaaaggtataataaaaaaaagataaggaacaatattgagttatacgaataatccagctttaatcatgtgtcttcttcctcaagtcctcctcacagagtaacgctcggaaacttgcaacgatcatttcctgtaaaaaatctttgttagtgactatacgaaaaggttattttggtctaaatttggaaactacaaagaatggctcaccagggttggttgttgtctcatgagccaatccattgaagaaacattgaatgctttggttacgaaactgagcccagtacgaattaagcgcgtagcttgcatgccaataaatggagactggttcgtaacattctctcccaggagctaaagctgcacaagtggtgttgctttgggcacaagccatcctcaatgtttcttcaagctcagtctcgttggctccttcgactggtacgcaccacacttgacctttgtaaggaacgttgttcgtcggtttaggtaacgggttgaaaccggttaagggtgtttgaccggtgaaatctacgtcgtagattggtgaaccgtcgggatgcaagattccccaatgtctctgtgtccccgaaccggatttctggttttcgttgaataaggagaaaacaaatgtcggtattggtaaaccgggtcttgatggtgtaccgattggaggacttgcgctcatcttcttgatcagattacggttataggtagctgcgttgagaatgttggctccggtttcgtcgatgtcaccgaaattaggccatccggtttcagagatcgcgaggcgcatatgtggataaccgagtttggtcatggcgaagagaaccgaatccaacatttggtctagaagattacggtaaaccaaaccggtttgaggatcggtataggttgagtgtccttggaacagagcaaaatccaaactggtgttcatggggtttcttgaccaacggaagtaaggatgaacattaaggaagaagtaagagtttgttccgttgagaaacttcagcaacggtaacatcaccggtccggtgatttcttcccggaatgttccgttcgatggaggaaacgacgaccggagagaatccatagctagaggtgtcccaactttgatgttgtgaatcccatgtaatctgagtgagttaacgattttgcgcatcgccggtacaagattcacagagacattcccagaattgtagctgaggatttcgtttccgacaaggacaaaacggatttgtgtttgtggatagtaagggaggatgttagttctgacccattcgtcagctatggtttggttagagctgagggcggtgatttggtggttagggacggttatggtgacgtagagattggtttgagagaggagtgtgagactctctggatcggcgtcatagagcttgacatgaccagctttgatagatttgatgaagttgatggattgatatggagatgggaggttgtttcctcttcttccatagttgataccaatcttgctagccaaatctagcattgttttcctctgcatgtacctgtgcccttggaaccgagttgcggaacaacatgaacctgtaaaaccaagaaaaccatgttcaatatgggagattacgtaaagaaaatgtaaacatgatgcattattaagatgacttacttgaaaagacaaggatggtgaagaggaagaaagcaagaagagacatgtctttgtgtttgtgtctggtttggtttgcaatgtgttggtgatgatcagaatgtgattttaagatggaatggtgtggcattggagatgaggtttataagtaagagtatggtgtagtgtaggtttattgagtcatgcaagaaaagctttgttttggcttttgattttctttttgaaactctcatagttcttttgtgctatgattttaaaaggattgttggttggatggttcaaattgaaccaagaaacactttccccaatattgttaattttgcaaatacatttctgattgtagattgagagattatacatcaataatgagtttagtagactaatggactaaaatgtatgtttcgatgataacaatttatgtagaatttaaaagaactgtatactatatagtattttaatttatcttccgtgcacgaaccaaaacttcagtaccacactgatacacatggcttttagacgaccactcatagtaatcgttatcttcatttatataaccgccggcgtgaaaatcgccgccgcggatgagccggtgccgacgccatggccacaccagttccacgcgctaatgttcatgaattactccggcgatctctcgatgatcgacctttggtacgactggaccaacggtcgtaatttcaatatcatccaggagcagctcggtggtattacctacgaccttgaatggaacaatggtacttccttcttttacacgctcgacgagtcaaaatcgtgccgctccggtcagctcgaggttggtattttctgttcatgactctgttacagatctcagaatacggttaggctgtagaatagggaaccaaattcgaatttgggatttggttaactttgttaattgctttgtgtgaattcactgggaatgagagttagaaaaccagagattgctccaatttgaagcaacaatgaccttagttatagtgtctggtttataggatagtcattgtgtaaggtttgagtttttcattttgagtaggaaattgaaatatcttaggagagtaggagagttctcggttttgttaaagtcaggtgatttcacaaatcttcatttgatgaaaatggagctctctgcagatttagtctgaagttctctcttgtttcttactacttcactctcacttggtctttctttttaaaaaattccagtaatttgtagtatttccttgttaactgtagcaggcagggtgtacattttgattgttaccaatactctttgtgctttgcatcttatgggaagactgaagctacctaatcactctggtgactttgatatgctcgttaagtaacaatactttacaaaatccttaaccaggatcaggagattaggattcggtagtagtagggtacatgacctggtctggtctcttggaatacctttgcagagtagaaacttgtaggatcaacagatgattattcaagagggttcagtgagtgacttcacatgtttactaaggcttggtttttcgtttttatagtagcaagttcacttagattggtcctgtatgaacctggaatgcttttgtaaatagtaacttgctgaatattcttggaattttatgtcacataaggttggaatactgcgaccaaactggctagatggagccaagtaccttggtcaacagaacgtgagtgggtttctctgcaatgtatgggagaaggtagactttatatggtactatgaagatgttgaaaccaagagacccgtgcaatggatattctatacaggtgattgataccatcaacatgcccattgtcttcgatctgtctaatggttttttctagcaaaattcatctgacatataactgttgcagggagggaggctcatataatgacatacgaggtaggtgcggtcctagaggatgagaaatggcaagcaccggtttattgtttcaacaaagagaagaagagtttgtctacaaagggagctttgagtgaatttaaaggatacaaagaaaaggctgctttgtaatgttaattaacgagaccttcttttcttctagatgaccaatcaggaggagtacaagagtgaataaacgagaccttcttctctgtttgttctctttatttgaacaaggtaagatgcacattctttaacttcaaaaacttaaaacccactactcatcctcgtccacaaaacctttaagattcaaatccgacggtccaccttccgctgccgcatcaacagccatcgccttccacttctctgcattctctctcatctcctccgcctcttctccaccactcatcaccttctccaaacaccttctaatctcctccccatccacatctccttcctccccaaccttcaccttcactccaatcctccacgtatcctccacaagcttcgccgttgtacactgatcagcaaactgcggaaacgcaaccaccggaacaccactctctaaactctccaacgtcgaattccaaccacaatgagtcacaaaacatcccacagcacaatgcgccaaaacagctgtctgagaacaccatcccaccaccaatcctcgatcacttcctctgatcaattcaagaaaccgattcttcttcttctcttctggatttttctccctcacgatccataaaaacggtctgtttgtagctaacacgccgtgagtaagcgcttccatgtgtttctctggtaaatcatcggcgtgtgtgcctaaggaaatgtaaatcactgatctctcgagcttcgagtctaaccatttcgtgtaatcctcgtcggaagatttgaaaagatcggttttaccctcggaggaagaaaccaacggtccgattgggatcatcttgagtttctcaacagaggttaaagcatcgtgttccaaagcagagaatgtgttaacaagaatcttagggtttgattccgtttcgagagcttcgatatgttctcttagagtcacaagagctgacggtaatgccttcgaaggttgaagaaacgacgggaggtcaccggtggtgatcagtggcagtttcggtaatttaatcggttcaacgtcgaagagatgtttgtaagaggtgttgaagtagtagtagtagatgtctagtacagtagctggttcaatccagagaagtgtagttgggaggtgaaactcacgcgctaccgtagaaacccacgggacgagaacagagtagattaccccggtgataggctctgtttcggtggtggcgtcaagattggctttgatgatgtctctcagggcgtttgaaccacatcgtttgagttcggacatgtagattttctggtcttcgaatgacttgagaccgtcgtcgaatccatcggtgaaccaagcgaaggatagaccttttgtggaaggtggctcgcccatacgtcggtgagcagagactgcggtggagtatgtgacggttgcaccgtggtggatgaggcggttggctagttgaagcgccgggttgatgtgaccttgcgctgggaatgttacaagcaagtaatgtggacgacgatgggaaccattgacggaagtggccattttagaatgttttgaagatgttataagttttagtaaaagaaagaacatactcaagcttttatatataagagctaaaccattttaagtatcaatggtataaaagatggattaggaataattgacaatctttgcactgtctgtctcttacaagaccggtggatgagaaaagtcttatgtgacgaccgacgagtaacagccacgagtagaaagatgattaggaatatttcagtctgtttttgatcagttctcaacctccacaagaccgcaaccaaccaccatggtaaggaaatgattgttgtcttttcttttaaaaaatattagttattttagttttttttttttatgattgctaatttaatacagacacaaaactgagaatttgatctcttttaacagtttgttacttcacagtgaccatttgagaagttgcatccactgtccatccattctcatactgttaatcaaaaaataaaacaattatcgatgaatcaaattttgtcatgtttttgtaataaagtgctagtatgtatagtggagttcttaaagaatcttacaaaaagttattggtgggctatgctttttaggatatgacactaaagtaaagaaggctagcctaagaactcacactttcttctttactcttcttccctacaattacgatcgccaaaaaccctaaatttctaaaaactgcttttatctccaagtaagtttcaatattgatcttctgctctttttatttgttcaagctagcatgttgtttgatctttagcttttcggttggttttcaggaagttgaaaaagatggatcttagtggttgtagagatataatcagtagtttaccagaagccattagttgccatatcctatccttccttcccactaaagaagctgcttccacttcggttctttcgaaaaaatggcggtatctctttgcttttgtccctaatcttgatttagatgaatctgtttatctgaatcctgagaatgagacggaagtttcttcaagttttatggattttgtggatagagtgttggcattgcaaggcaattctccattacataagttctctctaaagatcggagatggcgttgaaccagaccgtatcattccttggataaataatgtgttggaacgcggtgtatccgatcttgatctacacgtgtatatggaaacggaatttgtgtttccttcagagatgttcttgagcaagacactggttaggctgaagctaatgctatatcctctcttggaatttgaagatgtttatctcccgaagcttaagacgctttatattgactcatgctattttgaaaagtatggtattgggcttaccaagcttctttctggttgtcccatacttgaggatttagttcttgatgatataccttggtgcacttgggattttgcctcggtgtctgtcccaactctcaagagactaacgtttagcacgcaagtgcgagatgagtttccaaagagtgtgtctattgatactccgaatcttgtctacttgaagtttactgacactgttgcaggcaagtatccgaaagtgaatttcgattcgcttgttgaagctcatatcgatcttagattgttacagggccatcaaggttatggtgaaaatgatatggttggcaatgcaacagattttataatgcgtatatgcaatgtgaagactctctatctatcttccaacactcttcaggtttgttttcatcatgaaaaacaacttgtaatctttttaacattgttcaaggatttgagttagtgattgcaattgagtgatgataatctagttgttgtggttgtgtttcaggtacttacttacagttgtgatgctataccaatattcaacaacctgactcatttaaccatcgagagtaatcccgaagtaggatggcagtcattgccaggtttgctcaagaattctccaaatcttgaaactcttatcttccaagtaagaaacaaaacccttggaaagcatttgttgactcaatttttcaaagtttaagaatatttcactatgtatgtttcagggcctcatccacaaagccaccgataaatgtggagacgtgtgcttgtgcaaacctcgtgaggagattcgcagttgcttagcatcaagtccggtgaaggttataaagatactgaaatttggtgaaatcagtgatgacatggagaagcagagagagcagatcaagtatttcttggagacaatgccgaatcttgagaagatgattttgtactacaatacaacaagtgttgaagatgtaactgaagtttcaagccgacttcagaggctagtttctaaattagcttcatcgacgtgcattgtccaactaatctctgataacctcagcttgtcatctactgtatcgacaaatgggctcctctgtttctaaagggtacctcttcggtttgaagatgaacctctttatctcagagatgattaccaaagcttagggagtaccctagcttgtcgtcactaaaataatcttctcttgtttctgcctaattatgttctaaagacgtgttatttaggctttgtccttattgacttgcaatgttaacttcagttttttcttgttacagttggtctgttgtgtaaaatgatcttgtaagagtaattggtaggagtaagcagacaacaaaagctgaaacatcccttttgtgtaaagatctgcaacaaaaccgaattaacattttatctaatcaaacaaataaaacaattatcgctaaatcaaattatgtcaagtaatgtttttgtaagatgctagtatatctgattaaatatattattttatctaatggagctcaaaatatcttccaaaatcttacaaaatcttttagccttttaggacaagacactaaaaaaaggctagcctaggaagtaggaactcacactttcttcttcactcttgcctacaaatacaatcgccaaaaaccctaaatttctacaatagttgagtcattttggtgagctatcttcactttagcctacaaatacaagtaagtttcaatatcgatctttttattttttcaagctagcgtgtttgtttgtttgtttgattcttagcttctcggttggaacacgtagaggaagattgaatcggtctcgtgtctttggttttcaggttgttgaaaaggatggatcttagtggttctagagatgtaatcagtagtttaccggatgacattagttcccatatcttgtccttcctccccactaaagaagctgcttccacttcggttctttcgaaaaaatggcggtatctctttgcttttgtccctaatcttgatttggatgactctgtttatctgaatcctgagaatgagacggaaatttctacaagttttatggattttgtggatagagtgttggctttgcaaggtaattctcctctacacaagttctctctaaagattggagatggcattgatccagtccgtatcattccttggataaataatgtgttggaacggggtgtatccgatcttgatctacacctgaatttggaatcagaatttctgcttccttcacaagtctacttgtgcaagacactggtttggctgaagctaaggtttgggctatatcccacgattgatgttgaagatgttcatctcccaaagcttaagacgctttatattgaggcaacccattttgaagagcatggtgttgggcttaccaagcttctttctggttgtcccatgcttgaggatttagttcttgatgatatatcttggttcatttgggattttgcctcggtgtctgtcccaactctcaagaggctaaggtttagctggcaagagcgagatgagtttccaaagagtgtgttgttagatactccgaatcttgtatacttgaagtttactgatactgttgcaggcaagtatccgaaagtgaatttggattcccttgttgaagctcatatcgatcttcgcttgttgaagcctctattgataaattaccatcaaggttatggggaaaatgatatggttggcaatgctacagattttataatgcgtatatgcaatgtgaagactctttatctatctgccaacactcttcaggtttggtttcagtctatcccgcttttaaatttatgttacttagaagaagacaaacaacctgtaataacattgcttaaggatttgagttagtgattgcaattgagtgaatctagttgttatggttttgtttcaggtacttacttacagttgtgatgctataccaatattcaacaacctgactcatttaaccatcgagagtaatccgagagtaggatggcagtcagtaccgggcttgctcaagaattctccaaatcttgaaactcttatcttccaagtaagaaacaaacccttgaaaagcattttgttgtctcatttttcaaactttgataacatttcacttatgtatgtttcagggcctcatccacaaagccacatatagatgtggagatgtgtgcttgtgcaaaaagcctcggaaggagattctcagttgctaatcatcaagtccggtgaaggtaataaagatactgaaatttggtgaaaacagtgatgacatggagaagcagagagagcagatcaagtatttcttggagacaatgccgaatcttgagaagatgattttgtactacaatacaccaagtgttgaagatgtaactgaagtttcaagccgacttcagaggctagtttctaaagtagcttcatcgacatgtattgtccaactaatctctgataacctcagcttgtcatctactgtatcgacaaatgggctcctctgtttctaaagggtacctctccggtttgaagattatcctcctttactcagagatggattgacaaagctttgggggagtaagtaccctagcttgttatagtcgctaaaatgattttctcttgtttctgcgtagttctgctcaaaagatatgttatttaggctatcctttttggctcacaatgttaaacttcatttgttgtttgttttagtttgtctgttgtgtaaactgatttagtaaagaattaaaagagagtcacatattatcagagggtccgtagtaaaacaagagatcactagttttaaacggcagatttcgaaacttcatcgctgccttcattggagatggcataataggctgagaggttgaatccttcgcggggtccaggaatgaagcttccgtagtcagcatctggtatagaagcgagattgaagatttctgagacggcgttgttcgcggcggccttatggaataacatttggacgacggcaccggtaacagtgtagttgtcctcggggagtgggcatcggagagagaagagatcatcagagatcataggagcgaatagccacaaggaggaaccaactttaacgtctaggacgactgttgtaaagtccatacctagatcatgtgcatagcggacagcttcggcgtaggcggtctgagaccattcggtcttgcgggcacaaatccatgtgcttgcgaaggctgattcgagagtagggtagcaaatcattcgtttagagagactgcttacttctacgacacctagctgagagcggtagttagccgcattgagtgtaacattgactccaggacgggagatattggctctgcttttgcagaaaccgagtcttccatcaagatggagcgcgagttcgtaactcttatttccaatcaccggttgagtgtctctcgtgttacgagggatctcataattggtttccgagaggtgtggatattcaagcctgactcgatctcataaatgctccaaaagatcaactgaccctctgttcctccgtgtctccgtgacatttgcctctgtacaccctcaaatttacatttaaatttttttgaattttcattatagtctttcatagtactgtaacaacaattacttataatgataaaagttaaagtttcataaaatatatataaaacatactataaaaataatcatgttaaataatatacaaaaacaaaaatttacatgacaatacaaaattatatatcctcaccaaaaaaaaaataaattatatatgaattagaaaataaacacaacataaaacataaaaaaatttataaaattagatgtaaaattataaaattattcaatgtagttatgtctataatgctcccatatatgctcaatgtaatattattgttgtataaatttgtttttaaatgttatgttttttatatttgaatttatatgaatatacttgtaaaaattaaatgtaatagaattatttaaaaaaaaaataagtatgaggactaaaatgaaattttgaaaagattttgagggtgtgagtagtgcacactcaaatttgaaggtacactattcacacccacaaaaaataagggtttgttggagttcaaaaagtcctcaaatttaaagatgtcaaaccttcaaaataagggtttgatggtcacttactccaataacacaccctcaatattgacaatcatttgttctaatgataaaacttcataaaaaaatttaaaacatacatttcaaaaaaataatgtcaaacaatattagagaaacaaaactttacatgttactacaaaattatatataaattaaaaaagaaacataaaataaaactcgtgtatttcatgtataattttattattgaaatgataatgttaatgtgtgttaaattgctcaatgtaatatcattgttgtataaactttgttttgaaatataatatattttatattttaataattttaattttaattttaatgtattttaattatatggatatatttaatataattgaattgaatatagggtaatattagtagataaccaaataaaacatacaaattaagaaactagcagagagaaagttttttgttacaaaataaccatggacccacgttgtcggaaaaaaggaaataacaaagctacccttcatttgttgtaagatgaacagtaaacgaaacacatccgtgtaatttttcaaaatagcatgtaacattaaaatttcacatgttatatttagtttaaaaacatgctatttcaaaaaacgttatgaatttttaagaaaaaacattattatgaaattcttttacatgaacagaatcttaaaaaataaaaattatatgtgattttaataaaaaccatgtattactaaaaaataagaatatatttttaaagaaatcacgtgtgatcttaataaaaaacgtgtattactacaaaatatcatgataaaaagagatattaaactgaatagaatgttttttccaaaaaatatcatgtgttttttacaaatactatgtaataagagaaaataacaagataaaaagaggatattatgttatcgcctgtatttcggaaaaataacatgttacaaaggacatttacgtaattacacgtgttctccaacatgtttccgagaagatactgtgactcaaggttagtttgtacattcttttcaaatctatagtcatttattataaatactcttgaatataactatctataaaatatataaattataaggacgaaaatgaaatagaaaatttttttgagggtgtgacctttaaaaaataagggtttgagggtttattggagttcaaaaaaccttcaaatttgagggtttaagtgtttgttggagatactcttagtctctagtggtggactcaaaaaacgggaatccatatattttatatcaacaaaagataaaaaaaaaaaatacagattcacacattacatagacagtaaaacagatatattatataaaaactcataaacaaacatatttgcagatttaaaatgaaattttgaacgacctgaagaagcttcatggccagtgtttcagttttttttcatcagaagagttttcaaggtttcaaccagagaatcaaccctcaaatctgggatggtgcctgaagaatcgtcatcactagagtctgaaaactgcgacatgtgctctcgccgaattagagacctacgaatgtcgccaaaaccctagaaacccacaaatgtcgccaaaaccctagacttttagtttatggctttctttttagcttgtttttgggctttttatggagaagtttgtttttctttcaaccaaaatgcatgtcatttgattttatataattgattttcaatttgacatgttcacttttttaaaacagacattttagagtttcttaaacttgaatttgttactattatattcaattacaaatgatttgggaccaacaagtcttccttctcagtctttagattggtgggaaaatctaaactgagaggtgagatttttttcactcgcgcagaggatgcatgtatcttcttcttcacaagtcacaaagcgtaaatgattttaacaaaaggatcagtcttgagaaatgagactatctaggctttaggtttttgatataacagagtaaaatatgaacaaaaaacacacgggatagggaatatgaacaaattatcgattcaccaaaacctatcgtaaacataaaagattaatacaaatttatgtttacatttgagtatttctaactattactcctactaatatttgttttttaaaatttgtattaatcttttgaagagtttatttctaatatttctacagtatcaatttttttttctttttgttttctagacttaataattatttactttttatatttttcattatttttaaaaggatgttgattataactacaaaaactgcttttcacataaaccagttttaaaaattataaaagaatagtaaaatctctcaataaatttaaaattgttcatttatcgataatttaataataaattaagaattattaatctctgataaccccagcttgtcatctactagatcgacaaatggctcctattcttctagagtacctctccggtttgaagattatcatcttttatctcagagattggctagcttgttatagtcgctaaaatgatcttctcttgtttctgcctaattttgttctgaaaacgtgtgttatttaggctgtgtcctttttggctcataatattgacttcatcttttgtttgtttcagttcgtcttttgtgtaaactgatcttttaaatgtttgttttagttcgcctgttggtgtaaactgatcttataagagtaaaattggtaggagttattcatcatatactcaaagagtcaagatatgttgcaacttagaatcagtcattgtgaaatctctcaaaaacgaattctgttcttagaatttcactatcttaataggagatcggcacttagttttaatgttcaaggtggaacacatactccgtcaagcgttgtagcttcgatgaatccaccttttgctctcttttaacagcttgtttcttcacactcgccatttgagaagctgcatccactgtccatccattctctacaacatctgtgtatatatccagcaataaagaaaacaattatactgttaattctgattccgtaacatatatggttgtcataagattcatgcctacaataacactaagctaagacattgccacaaactcttcgacatttttcaaaagtatcaatataagaatcaattcagtagaattcaatagaaatgtgaaatgaggtacttaatcttttgtaagcaaaggaaattgcagaaagaagcttacaagttgtggcatcatcctccgtcatccctaggaaaagagctaaatcatggatggtaattgtggagtaggcagacaacaaaagctgaaacatcctttttgtgtaaagatctacaacaaaaccaattcagaaatagaattagaatctgatggaaagtgacccataaaggtcaggtgttgaacaattgatgtggaaaaaggtacaacttcacaaaattcagatcaacgtttagacatttggttggaaaagtctgtcaactgcttactcgttcctcctgtgtgagtctacctacctctctctcagttagaccacagaagcaactactttctaatgaagaagtgataaggcacatacattgatgaaatttgattcaaattcgagttccaatagttcaatgataagatgaaaggtggttctgtgcataacagaaatcctaaactaggcctcacaagttaaaacaataaaacaactattcgatctcaatatgtatatcaaagctcaaaacctaaagagggatatgaagtaataaaagtacacaactacataagcaatcaacaagcttagttcaagaaaccaattcatactagctaagaagtcataaacagagaaaaaatttacctgagaaggcagcaaccatatctttagcttcttgactccaatcataaccccgaatagcttcatatacacctgcatagtcgtgtgtccacagcttctgaccaatcccccaagctgcaacaacttcaggcttcctctccttgatagctgtaggtatccttttccagaggaaacgtgcgctatcactgcagtatttccaaacaagcacagcaaaacatcaaaaccaaatccatagtcaagaaggcacaaccataactcaatagtttcaacatactacactcactatcaatacacaaaggaaaaaaatgttaaatgggtctcaacaactactaacttgtgtcaagttttaatttttcaaatcactggatagaaacaaggtaatgtaaaaagcagactttagaccttagattcaacctaggacctagcaatcgaagtagtaagaacaactttgacgcgctaaaattcacaagagttcaacgaaacaatctctaatttcataaaggaactaactttaggttcacaacgcaaacaaatacatcaaagaagaaaataaactcaccaatcgtcaacgtaaaagtaacccagaagatggattgcgtaaggccaatcatcatgatattcaattccttcggaagcaacctataaaaaaaattaagaagcgataaatcgaacgattaacaccacaaaatccacttcacaaaaccctaatgaacatcagaaacaacgacagcgagagaaattacgaacctgaagcatgagagtatcgcagatatcggcgattttgtcaaaggatttggcggccaaagcttccttaacaggcgaaagatccatgacttgtttcgattgcactactctcgaagcttttgcgaagatgacaattctactcccaaaaccactccagggaaaagaaaaataaattctgtgagatttacaggttttaataatcttttcaatacggtttacttaaaccgaccaaaaaattgaccaaacacaagaggataaatgggccaagcccactaagccttagtttcccgccaaacatcataaagccacccggtctgttcccgccaaaataacaaacagtctctctcactctcacacacactctctctctctctctgtagctctctcttggcgcgagttctaccatggccgaatcagatcctatattgaggaagaagatgcgattttcgtcttcttcagttcgttatactacctctcagaaccttatggcaagcaaattacgaactcagagcaatcgttcctccgttcgatttgcatccccattgtctcacattgtcacggatcttcgtcaccatcatgcgtcaccgatcaaagggaaaattgttactcaaatgccccgaacttgttctcgtgtcaccgtgaagaatctgtgtctcagacgcgtattctctcctagttccatctctagtgattgggactttcatgtgaaagggggaaatctaaccaaggagctaaatgtggaatctccttgcgatactccgaattctaatggtaattcttattttaaggtctttttcttgtacaagtttttctaagaaaatttaggagaatgttgatataatgaaggtggaattaggaaatttcaatatctgtttagaaactataatgattacacaatggtgaaaacagttatgagagaaggaagcaaatatcttgttgatggattagtggctactggaggtgatttagaagtagtggaatgctcacaaacgacgccaccggatttaggaatgttcaccggtgagctttctttggtgaaaaatgaagcaggttctatcaatcaagagatcagtgaggtctctgggaagaaagttggtaccaatctcggcagcaaagtggtatgttttttactcatggttttatagcaaatgatgcgtttaaactacaatattggcttttcgttggttgcttaattttcttcttgtgatatgtatacagattcgtcatccggaaaagattttcaagaaccctggctctgtgagctatagaagaatgcttccttacttgatggaagctgcagatgttacccgagatggtgatgcaaaagatcctaaggatgaaagaggtgaattgatggcagcaaattaccgacttcctgaaaccgtatctgccaatagctttgttaaagctcatggaaacaatagccctttcaagaagatgacttcatccagtggcaacaaaatttctgtatgatctgtttttttttaagaagctgcagtcttgttccttatttaagaatctgtttttgacattttccctgttgtgacatgaaacagctgtgctgccggcgcaagctatttaaagtgccaggttctgtaaattacagaagaatgctttcatatctcaaagagaactcagaggataatcatggttagtctctttatattcatgtttagcacacggtataattcaatgtcagtactagtcagataataatactgtcttctgtggcttggtaaattgtaagatagtataaatgcatgatattagcttgtattgaaattataaagtcagaattggtagccttagaaattgatgtctcttttctttcattgttcttctaggaactcctgaaaccacgcatacagatcctcagaagaatatagaggagaatgcttcagctattgaggctaaaggggcatcaaatgaagttacagatttagatacatgctctaacaacgttgagacgccactagctgatccaaagaatgagcaagaaactcaacttttgttagctgagtttagctgttagtgttaatcagttagtaacaaagtcatgtatatagggtttaagcgtatttgacttgtttacacagagcttgttcatctaggtacttgtagttgtaggtcaaagaactgaaacgaaaacattagaggtacctatgcattagacttgttgattcttatgtctccatatttttctgattgtcctttattggtaagtgaaagacaatagtagtctctttaaaggtttaatttcagttgttttatattttgaaaccaggaatgctttattgatcttgacaatgtacaatggaataacagaggaatttaagaattgcatcaaacaagcagagaaatatgaggtaatatgtgttcatcagactctggacttcttgcattctggagggaatccacgagggaaccttttgagatcagagcaataattatagatcatgaagtatttctgaacccatctgagtctcctcctgccataagcattgagctcggttgccacttgcaatttaccatcaccaaaagaactcttgaatttagggtcacatcctgaagaggctgtgcaagccgcagcgttgaatcctctgtagtaagctgtgaaaggagccttggaccagtcagtcttgactagaccacctctcgtggcccaatcgtctgcattccacaggctagagtagatcctcatgggttgactctttgggaaaggaacgccgagcttctctgcattgttgaacactctaatgggtaaattgtccaccaagaatctgcagagacaagaacaagagagtcaagatctacgtctttcacttattgttagagaaaatagatcgatggatgtttacatgatgtgttggggtctccagacaatggagtaagtgtggaagttcttggttgggtcgaaccagagataaaactgttgctctctgtctcctttcccttgagcaaagacattggtgtgaagaacataaggcttccctgtctcgttacctagaaactcaaagtctatctcgtcatgtgttgctccttgtgaagacaactgcaaacatgtacgttcaaacaaatttagaaaagagtctcttcagttttagcaacattatgagtgagtgtgagtttgaaaacgctacgtagtaagcagtgacggtgccggccgagtttccggcgacaagtttgagctgcatatcgatccgaccgaccaaatactcttttttggatttgaaacctgacccggaaacctggtccagcgacaaagacagcatatttcctccgttgaagattttgcctctgtggtcaccccaagtgaggtcaaactcgtcgaagaagttgcttgcgtaggccgaaccgaacaatgtcacaagaagaacagtcgccacgatggtggtgaggctcgaacttggacccatttgggtttggttgatagaaatgaaagttgtgggggtgagtttggaaactaaaagaagatgagagctttgtgttttggtgtgagatgagttttaagaaggagatatgcatatatataggtggagaagcattgggaagctaagaccaactccagcagtagtttcttagtagaaactcatacaattttaaaaaataaaaatattgaaaagttaagaaacagatgagagaaaatctctaaaattcctaatattaggatcgtttctattactcatataagttggttttttggatgtaaaagtaaaatattaatacattttgttttcttagaaactacatgaatcctatacaatggagttgctctaacttaaccagattgtgttttgacatttatttgctcattttcaatagtaaatagctcataataattgcatcttattgcattattgagaaactcatcattagtatttcctttattctcatgatcaggcctattttaatatggatggaattttgaaacaaaatagaaaaaagaaaagagaaaatgaaagctgtccaaaagaaagagaacaaaaaaagagtgtgtgagctgagaacactgagtactgagttcgtaatcactcagtcgatagctgttgccagctcttctgctacacccatcatacctcgagcctccttttttattttgttataggcttttaaatttttcttcttttaataaaattttaatctacattgaaatgatcaaattatttaactcactatagtattgtttttagagtgaggatagaaaagctaataatacatcattccatgaatttgatcgcatcctcctacatagtgattaaacaaatttttttgtacaaaagctatatcttttctttttacattaatattaaaatatattaaagaaacctgaaaacgtttttacaagaacttgaaacttaggatttgacatccccaagatgcaaaccacaaccaataaatcaacattgtagcgtcgaccacaccattctctcttatggatgaaatcctatttcgaataatcttgtagctttgtaacaaatcatttggaaattgtaatggaactagaaaactattctatgtaatatacaaggatcgtctattgaaaccaatcaaatccatattgttctgtatataataatagtttgcaggacaaaaacgagaaatcataaagggttactaatatttatgattggagaacttccccatgcttttcaagtttagtatagtttatcaaaaagatttagtaaattttctgtttttttagtctcatataggttatattcttaaatagactattcggcctttttttttgggcaaattgacaaacgtttgtaaactaggtttctcctctgtggatcagttatccgtaattgaatttgcttaacaaaacaattagtaagaatcactataacattaaattagattttattttattttcctaaagttataggaacatttctcaacctaattttaagatttcaggattttgataatattaatgaaaaaaacttagagaaagtattacactctggaaactttttaaaagtaatcacataagttacctttttgtttttttaaggaggccacaccagtttattatattagctagctttcccacttttctatcgtttatggtgtggcatagttaaactattaattaccgaaataattaggagaaaacgacaaggtaacccatatactattttgtaacaatttaaaagatcaataatgctcgtttttgtttctagtattggaaatgagaaagtggacgacatgaaaaagaaaaaacaaaagcaagaatgggagtgagacaagctggcatggaaatggccactcttctccctttgtactttgtgttatcttatgtcttagatttagtgctacatccgacgtgtcacttccctcgtacctccttcacgtgtgactgtgacctaacggactcttcgatctctatctattccagccggcatgcgggcatggcatggcatgcaaatacaatgaaatccaattaattccgattacacaattgtttttttacgggtttacggtaacataagttttcttataattaatctgtcgaatatatctataatttatatgattagtatagacaatagacaaagtgccgtttcattaaactatattagaccaagttttttattcagagaatatgttcttgttacttttatgataccaaaagagatttgtgttcgattcttaaatcgtgatattttccaccaactcattttcaaagttttagtgtctaattttatgattttgtaggttctggttagtccgcatatatgtacctcaaataaaaacaacaaaagagcgtttgacttctttattttttttcgtttatacgtcaataattattgtggagtagtattttttaggttttttaaaacagatatattcagcttctccggcctttaggttttccgtttatacggtatgaagtacacacacaaaaaaacataacattgcatttaagaaaaaatcatatgctctggaaatgagaggccattggatagattgtaggttaaaaattttttcaccctcaaattttgaattgacattatcgatcgaaaaaatgaaaattgtatattgaatttcggagtattgactagagaattttaaaaaaattcatgcatgaccggtggattttgtttgaatgtggccatttaaagaggcaacacattttggtattcaagtatggttcctgaatcctgactaataaataagaaaatatagatagttgttgccagtataaattaacaagagtaatggataaggtggtgtggtccgtctctcaagtcacaaactcataacaaatttaaattattaaactaacgagttctttgtcctgtcttacaaaactcgaaatgcatgcagattcatggaatttcggaattaacacggcatccgtatatgtatatgtataaattcatgattacattaaaaatattttaaatcttagatgggatcttaattatatcactcatatcttaaaatctagtaaaaaaaaattattcgttttgagtcaaaaaaaataaaataaaggtcttaccaagatttagatgacttacgccgtcacacccatacgaattattaataatggaggtgtatgcataaaagcttcgtctgtgaattgatactcgcttcgaaatcagaaataaagctcattgccttatgaaagaaaaagaaaacattttggaagaacgacggaagttgcgttttcgattttttaaaatgcgacggaagtttgtaaatacaaaattgtaatcatgaatgtctacattatttaaattaaatacactaaaacaaagtctatgcgatattagacggttaaaattatcgtttaggcgtcgtcttaatgcctaaagcctaatccgaatgtagacaaccgtttagactgccttttaaaacattattctttcgataatgtttgtgttatagtttttaaaaacaatggtttgtgaagatggttctgcgcacaatatcgacaagttcgatggaacatactattcgttatggaggatgttgatcgtagtctagagatgttgtggtgggttaaaaaagtcttgcccgacctgaatctaaaataaacccgcctaccaaaagcccaaatttagaaaactcagatggatttttgatttaatgggtaaagcccgaaaaaacccgattgttccgagactatccgtggatacccaacttggtttctatcattttcttagtgtttatgtttatatgtatgttgtatctttttttttataaactaagctggtatgtaaatatattatgtaaatttcgtttcactgcaaaataataataatttgtatctcaaagtaaacaagagaaacttaaaaagtaataaaaaatctgaaaatcaatttaaaacagaaatacaaaagtagttgaaaaaaatctaaataacatcttctcatactctagagctacttgctactgatgtagtagcttcaattccatcatcaaagtattcttgaatgtcacctacaattagaagatttatatcaacaaatgaaaaaaaaataagtataaaaaaatagactattttttttaccttccaactctgcaaaaccacgcaaccagtttctagtacataacaaaatcaaactagagtttggtttttcaagtgaaactagagtttggtttttcaaggagatgacgagagacttccggcggtgtagacggcggcgactccgacggtgacttcggcggtgactctgacggtgcagacggcggagagaagaagaggtcgagagatatcgggagagagacggatgttgtggtggtggcaaaattttggggaaaaaaaagaatttaggatttttcaataaaattggctattgggctattgggcctttaacatactaaaataataagttaaaacccacgggtacccataacttagtagggtaaaatccgtgtaagactttaatgaaatgggacctgtccatttaaaacccatgttttattttatacaaaaagtagattaatgggcttaaaattttaggtgggtttcgggtactcagtgagttttaacccattattaacatccctagatcatctatatagagtaaaaagtttcatcaaacgttggagaagaagcatgagacgatgagtttagatgactgaaatatttttgatagacaagttatggatgtaagcaagttaacaactatcaaagaatgttgcgcatcacttcgcgaaagaaatgtctatagaggggttagtgaaagttctctcagatttatatgagaaaccttctgccaacatgcaataatgtttttctcatgaagaagctcttctaattgaagatcaaagatggtagtcttgttcccaacgcacgttaatgagttcaacacgattatcaaccaactgtcttcgcttgaaatcgagtaattgatgatgaggtgcgcactttgattttggcattcctaccaaatagttgggagcccttgagagtagcgattagtaactttgttggtaatgagaagcttaaattcattgattttcaagatcgaaatcttggtgaggacaacataggtcatatccctgaacaacataaaattaatcgaaggatagatacatgagaaacttcaacgagttcttaaacaaatttgttataaataaatttaatatataagtaccattaaatatgttaagtaacatattaatgatattaataaaccattttaatattgcataaagttttacaaccattgtcatcatatcctctttttctataggtgttactagctctcatctcaaggtctccaccatactctttaattaaccggctattatttattttaatagtaacacatttgttcaaaataacactagatgttttacggatggtgattttaagatgtttagatatttataacagaaagtcaggtcgatccaacattctttcatgccctacacaaataaacatattatggcctgtaatttttgtttttacaaattcacaaatcatagtaataaagaaaagatcatactaaaccttaaataataaaacagtttttaaattcattagcagtttgtaaaaagagaaaaaagaaaagaaaaaattatatccatttttttttggtaagggataggggacaaagtcccttaccgtttgttaagaaaacttaaaagaaattagaaaggaacgattcaagttttagttataaaaaaacttcaaaaaaatatatcatttaaatatagctctagttacatttttacctgtaaaatcactcatcaattagtcaagtttttcacacaaaaatcattcgatcatgtctagttgcctacaaacaagtaaaccaaaaatcgcatgccctttacctacgaatgactaatataatttaaaattgcaaactaattagatttaaagcaaagttgcaaaattaaagtccagacacaaaacctagagagacttcagactttttctttagtaatcaaactcgattttgcaagtttagtattttacgttttttaaaaccaaatttttaccaaacaaaattcattaactagacgtaaatttagctaaaaaccacaaaatataatgaaaggaagctaaaaaaaaatatatatatatatataatgaaagcctatattattttttattttatcataaaaggcttataaaagttttttgtaaaacatgttctattaactttgatgtcctaagccataacttctcttgattttgtggtgggccagacctaaaacattaaaaatatgatattatatataaaaatatgatatcagaaaaataaaactattaatttgtaaacaaaacttaactgacattttactttctttcatataatatatgaacgtttttaactatgtacatgaaaataaaacataacttaaaattagaaaactacattaaaacgagatctatataatttttggccgtcgaaacgatcgtctaaacgttatccagagaacctagatgaccgtctagactgtttttaagaacatatgacaatgttttataaacataagtatatttgtcataatgtttaacataatagttttgaaaagagagaacaaagtgcaacactgttgttatataatacaattttttattaactattgaaaatatgagatttccatgggatattgcacaaaagctaaattgcaattcataagattaataaaaatctttatgtacaatgtatcacaccatttctgtcagttttaaaatattagttttagaaaataaatgaggatctaatacttttttttttctttttcataatgagtcaattttattgttatggaggatcaaatctcagtgttaaaaaagggtaacaattcataatattaattaaaatctttcagtaaaatgtatcacaccatttttgtcagctctaaaatgttagttttagaaaataaatgagaatacgatttttttttttttgtctttttgataatgagtcaactttatgtttatgaaagatagaatttcaatgttataaaggggtaacaatttataagattaattaaaaaaattatctacaatgtatcacaccatatctgctagctcgaaaatgacagttttagaaaataaatgagaatagaatatcatttttcttctttttcatagtggatcaactttatgtttatggaggataaaatctcaatgttaaaaaggggtaacaaatcataagattaattaatatgtttatatacaatgtatcacaccatttctgccagatctaaaatgacagttttggaaaataatgaaaatataatatcattttttgtctttttcataatgagtcaactttatgtttatagaacataaaatctcaatgtgaaaaagggtaagaaaatcttctatataaattggtcaaactttctttcaattcaaatcattattttttattaataaatgaaaatataatattttttcaaaatgagtccactttatgtttatggaggatataatctcattgtttaaaagggtaaaaaatctcttctatataaatttggtcaaagtttatttcaatcttcaacaaaaatctttatttttctatgatttaatggaaatatgggatttatgatattctctaaaagctaagtttcaactaatataaaaataaaaaagctaaattacagctcatcacattaaatgaaattgtaatggacagtgtatcacaagatttttgccagtcttaaacgttctaaaatttcaggcgttttttttgttctatttataaatatcaaagttttagcttcataatccattcatagtcctctgctcttgttttactactcttactaaaagtttttttaaaaaagaaaagtcttagctactagcttgctccatttataatcccttcactcaactttcttgttttactactctcactaaacgtaagtttttctgtatcatttatctaaattttattgtcaatatcaaactagatttgaaggatttcaattgaaagtcttatgatatttaattgttacgtcgatataatctatgtgatgtagaaacactcatttggagtggtttaattacatatattgcaaattacttatttaaagtgcatgctaatgatttagataattttgtttcaaaattaggtcttttcatggaaatggagacaaaagctggaaagcaaaagaagagaagtgttgactcggatgatgatgtctctaaggaaaggagaccaaagcgagcagcagcttgcacaaacttcaaggagaaatctctccgtatctctgacaaatctgaaactgttgaagctaagaaagagcagatcttggcggaggagatcgtggccatacagttaacttcttctttggagagcaatgatgatcctcgtccaaaccggaggctgactgatttcgttttacatgattcagaaggagttccacagcctgtggagatgttggaacttggtgacatatttattgaaggtgttgtcttacctttaggtgatgagaaaaaggaagaaaagggtgtcaggtttcaatcttttggtcgagtagagaactggaatatatctggttatgaagatggttccccggtgatatggatttcaacggcgttagcggattacgattgccgtaaaccttctaagaaatacaagaaattatatgattatttctttgagaaagcttgtgcttgtgtggaggtgtttaagagtttgtccaagaatccggatacaagtcttgatgagcttcttgcggcggtttctaggtcgatgagcggaagcaagatcttttctagcggtggagccatccaagagtttgttatatcccaaggagaattcatatataaccaactcgctggattggatgagacagccaagaatcatgaaacatgctttgttgagaatcgtgttcttgtttctctaagagaccatgagagtaataaaattcacaaggctttgtctaatgtggctctgaggattgatgagagcaaggtcgtgacatctgatcatctggtggatggtgccgaggacgaggacgtaaaatatgctaagctaatccaagaagaagagtatcggaaatctatggagcggtcgagaaataagagaagctcaacaacttctggtggttcaagcaggttttacattaagatcagtgaagatgagattgccgatgattatcctctcccgtcttactataagaacaccaaagaagaaacagatgagcttgttctctttgaagctggctatgaggttgatacaagagacctaccttgcagaacactgcataattggactctttacaactctgattcacggatgatatctttagaggttcttcccatgaggccgtgtgctgagatcgatgtcaccgtctttgggtcaggtgttgttgctgaagatgatggaagcgggttttgtctcgatgattcggagagctctacctctacgcaatcaaatgatcatgatgggatgaatatattccttagtcagataaaggaatggatgattgagtttggggcagaaatgatctttgtcacattacgaactgacatggcctggtaagcttaaaaaatctcattgcatgtttctaccttatttgttaattacttatgttgcttgcgaatcaggctagtgcctacgtggagattgaccaactttgctaaattttatattgaaagaaaattggttttactaactttgaaaaattgggtagtgattttgcaaacataatgcaaaataaattatgtattcaatatttttttttttttttttttttagtaaagggtttaacatttttttttttactagttctttatttactttttgggacgatgattgttattataattatttatttttaattatcttatatgaactaaagtttttttttttcaattgtctctatgcaggtaccgacttgggaaaccgtcaaagcaatatgctccttggtttggaactgttatgaaaacagtaagggttggcataagcattttcaatatgctcatgagggaaagtagggttgctaagctttcatatgcaaatgtcataaaaagactttgtgggttagaggagaacgataaagcttacatttcttctaagctcttggatgttgagagatatgttgtcgtccatggacaaattatcttgcagcttttcgaagagtatcctgacaaggatatcaaaaggtgtccatttgttactagtcttgcaagtaaaatgcaggatatacaccacacaaaatggatcatcaagaagaagaagaaaattctgcaaaagggaaagaatttgaatccgagggcggggattgcacctgtggtatccagaatgaaagctatgcaagcaacaacaactcgcctcgtcaataggatttggggagagttttactccatttactctcctgaggttccatcggaggccattaatgctgaaaatgtggaggaagaggagcttgaagaggtagaagaggaggacgagaatgaggaagatgatccagaggagaatgaactagaagctgttgagattcaaaattctcctactcctaagaaaattaaaggtatttctgaagatatggaaataaaatgggatggtgagattcttggcaaaacttctgctggtgagcctctctatggaagagcctttgttggaggggatgtggtggtggtaggtagtgcagtcatcttggaagttgatgatcaagatgatactcaattgatctgttttgtggagttcatgttcgagagttcaaaccacagcaagatgctacatgggaaactcttacaaagaggatctgagactgttctaggaatggctgctaacgagagggaactgttcttgactaatgaatgtcttactgtccagcttaaggacataaaaggaacagttagtctcgagattcgatcaaggctgtgggggcatcaatacaggaaagagaacatcgatgtggataagcttgaccgggcaagagcagaagaaagaaaaactaatggtttgccaacagactactactgcaaaagtttgtactcacctgagagaggtggattctttagtcttccaagaaatgatatgggtctaggttctggattctgtagttcatgtaagataagagagaatgaagaggaaaggtcaaaaactaaactcaatgattcaaagacaggatttctctccaatgggatagagtatcataatggagattttgtctatgtactccccaactacataactaaagatggattgaagaagggtagtagaagaacaactcttaagtgtggtcggaacgttgggttaaaagcttttgttgtttgccaattgctggatgttattgttctagaagaatctagaaaagctagtaaggcttcatttcaggttaaactgacaaggttttataggcccgaggacatttcagaagaaaaggcctatgcttcagacatccaagaggtaataactgtttttacatattaaccaaaacaaatactatattcttacgtaacctttctggtaatgttttaaagctcatcttacactccttttttttggcaattgttttagttgtattatagccaggatacatatattctccctccggaagctatacagggaaaatgtgaagtaaggaagaaaagtgatatgcccctatgtcgtgagtatccaattttagaccatatcttcttctgtgaagttttctatgattcctctactggttatctcaagcaggtaaatattttcattattatttcttacttagattttatttcttatgatcaattttttgtttcttaatgaagttcatcaactgtttcttgaaatgtctcgtaacagtttccggcgaatatgaagctgaagttctctactattaaagatgaaacacttctaagagaaaagaaggggaagggagtagaaactggaactagttctggaatgcttatgaagcctgatgaggtacctaaagagaagcctctagctacactagatatttttgctggatgtggtggtctatctcatggactagaaaatgctggtatgtatttatattctcatgtcatgcatatacttttatcttctaaacacttgaaaacttttattaagatgcatgttttgtgtaacaaggtgtatctactacaaagtgggcgatcgagtatgaagagccagctggtcatgcgtttaaacaaaaccatcctgaagcaacggtttttgttgacaactgcaatgtgatccttaggtaaaatagccaacggttttttctattcttgttggtttcagttgattaaggtttattaattgtagggcaataatggagaaatgtggagatgtcgatgattgtgtctctactgtggaggcagctgaacttgcagctaaacttgatgagaaccaaaagagtaccctgccacttcctggtcaagtagatttcatcaacggagggcctccatgccaggtatatatatctttaaatactttctataatttttgtaaaataagtgaaaagcttcttaatgatttgaaaatttggcaggggttttctggtatgaataggttcagtcacggctcttggagtaaagtccagtgtgaaatgatattagcattcttgtcttttgctgattatttccggccaaagtactttcttctcgagaacgtgaagaaatttgtgacatacaataaagggagaacatttcaacttactatggcttctcttcttgagatgggttaccaggtaatatttcctttttgtgtcacacttgattaatgctctttagtagattttagcatatgcaatatatcagcaatggtttttaagaatacaagattcgttgaactatgcaggtaagatttggaatcttggaggcaggtacatatggagtttcccaacctcgtaaaagagttataatttgggcagcttcaccagaagaagttcttccagaatggcctgagccgatgcatgtctttgataatcccggtagtaaaatctcattacctcgaggtttacgctatgatgctggttgtaatactaaatttggtgcaccttttcgttcaatcacggtgagagacacaatcggcgatcttccaccagtagaaaacggagaatccaagataaacaaagaggtatggtttaataattactagaagaaagtatctatacatttacattaaataaaataacatgaactcatgtttcttgtgtcttgtatgaagtatggaactactccagcctcgtggttccaaaagaagataagaggaaacatgagtgttctcactgatcatatctgcaaagggctgaacgaactaaacctcattcgatgtaagaaaatcccaaagaggcctggtgctgattggcgtgacctgccggacgaaaatgtcagtcttacatttatacattccactacaacaattcttactaaatctatacgtcaacttcatgcaatgtttttaatattacaggtgacattatcaaatggactcgtggaaaaattgcgtcctttagctctatcaaagacagctaaaaaccacaacgaatggaagggactctatggtagattggactggcaaggaaacttacccatttccatcaccgatcctcagcccatgggtaaggtgggaatgtgcttccatcctgaacaggacagaataatcactgtccgtgaatgcgcccgatctcaggtaaaaaaagttcttatgttccttcttcgtcagccctctagcattactaatagagtacatatttctttttgttttggacattaagtaatgttaggttatggatacaacagttttaagtgaaagtgttgttttatgaaaatgtaggggtttccggatagctacgagttttcagggacgacaaaacacaaacataggcaaattggaaatgcagtccctccaccattggccttcgctctcggtcggaagctcaaagaagccctatatctcaagagttctcttcaacaccaatcataattggaaatgcagtccctccatcatttcattttttttagtataatctttttcttaaaactcaaagtctatgaagcaagaaatgatgtctatgaagtatgagaaattttactagaaaataaagttgtgtagaaattggtataaagatgtaaagtctaactggttataaaacctctttcagatctatttggacgtcgtaaatcaacacgacaacatgtattatcaacaattggcaagtccctcgttgttcttggttttaggaagcccagacagaacttactggaatttgtacttgggcgattatgtgaactgaagagtcatttaaaactgaaacacatctaaaaagactaatcttatacaaagactcttcttaactcgacttgctttcgtttagctttggaattttcttgtactcgtacgtgtttatgtccaccttctcttgcatagcctgcgttaaacaaaacccagtcaagattttagtgtttcatcaaagcttttatgcagtctaattgagcgtatatcctttgttaccttgagctcatcttcaatggatgtgtttttaggtttataggcatcgacaggtcctgttctcgaaagtgcctttcttgtttctataatctcccattcttggtcatcttttacctttgcaatatccttactgaactaaccaaataaaccatatgtggtgaattctaaacagaatcattgacatttccccagacatttatagattcagaggttttccaatcaagaaagaactgacctgccttgaaggagttggccgagtccgagggctccaaatacagtgagagatatcatcggaagtccatatcttacaaacgggtgtctccttccccaccttttaaacgatgctgatgactgcttaagagtaccagtaggggtagtaccagaaccggaaggagaagacttttgagttttctgaccggtttcgattgttgtcatctttgtattaactctcaaagcatacaactgcaaggaaaaagcaagagtgagaacctactacattgttatcatttttcttaatcctgaaaacaaacacaagagtagctactacaataagcattgaggaatccattttctactctctaataacattttcttctgaaattagtcacaaaacatagtgtgcaaatatggtaatctgtgaatttcagatcgactcaatcaatttgataatagagcagagttaaagatcaatactagctctgtttcacgtgactggatttgtttcgtcgtatcttctacaaacaacagattcgtatgacctaaataacgtttcctaaaccgtagaaattctcaatctaaacccagaaatcagttccattctaggcacaacacaccgattcgttgtttgacataaataaaaactaacctggagctgcgtgatggccggaatctgaagtagctcactaggtcgacgcaggacgagattagatagagacggcgatggagacgccgagaagcgagaagagtgatgacgaacgttgagcttctcggtgtatacggcgtcgttcgttcttttaggaaataatcaaacaaattaataaattcccctattattagtttcaataatgggcccagcccagtaactcatattttgggttacggtgtaaaagaaacgacgacgttttttcctttgttgtggatctttgttctgtcagagatgaacaatttgttggtctttggtggtaagaataagataaaacaactttttggtttctgggattgtacgttcgaacatctacgatcaacagaccacatttgataagtatcgcattacatacactacaattaccaagccgatggctcggtactttggttgtgttagaataacagagaaagtagcaaaatgaagagtagatggattttaaccaaataacgagtgattgatacaatgaagggttacattatactacttcaagagctgctttacatgaactgtttcaagaactccgtagcaacgagtcttcctcttgtattcactgactccttcaagtcccttatttctttctctatatcctgcaatttccatggttaaaaaatagtcacacttcaagtttcaaatctattttaagcggagattagcatgttggaggacataatcagagtaactaatctctgttgactcttgtagaaacaattcaaattcaaagacggatataatgacctttgttaaggcaactattcagaatactacttctcaagttatttccgtgagaaacacaacgacgtaaggatgcatcactaacattaggtttgatgcaaccaagacatatattgattgttaggatgctactaatgggagcaaccaaggtcatagaataaaaagattaggtttcgagagagacttgcctccataaactgaataatgaaatcaattagcttctgtttctgcatctcttcgcagtggtagtttgttataagaaagcttatgtcatagccctgttcaaaacaccaacaaagaaaccaattgaagggaataagggaatggatcgttcacacaatgcaggggaataaacagtaaaccatctaaagccaaggcaatgcatttccgcacagtgagatgattcatgattcatgattcatagaagggaaaaagaaaggaaaggtgtggtacatacagactatctatcatcctaaacctaaaaaatgcctgcacagaaagctaaaattaaggagaatttgtgaatactgtctgcgttatgtttaatcaattcgtgatgcatttaccattaaaaaaaaatagaagttcgacaaaagagggaatgcattgcaacttctagataaaacctagtagcactcacaagtacctaagtgttgaatcaataagaaggtctacctgcactggcttcctcctcagtacttgaaaagcttctgccctcatggacaagaatctgagaaattttttggttagtatgttttcaagttcatccgcttgcttgacctgcaaattaaagataacaaatatttgtaacagcagaacaagacagatgtctagactaagtcacgactcgtcaagacgttatctcaggagaaagaaacaaaggaaacggtgagaaacaggaaagtaaaacaacacaaagcctttgttgaacagtgtaccactggggctcttcctggaagtatttgaaggaaaagctagggtaagatgaacatttaccttgaggcttatccggagtgaatttatagatgtttctattaaacacttttcagcctcatttcggcatattaaaacctgcaagttgcaaaacttagcagtcaactacaaaacctaggtaagaagacaatgcaatatcaacgctaaactgggagggaaacaagtaaacttcttacaggatttagcaaaagttctgggctcgtcctacaaaatttagcaaacacatggtgataataagattctatgcttgaaataaaaatggaagaagagcaccccattctcacatgcatcttcttgtgagaagcttacatactttaattcaacctctggtttattatgcctttcaacttcttgacaaggaaaattctgcaagtagagaagtatagaagctttcaggaatataaaccatgtaaagctgaatgttttcaaagactccacatggcccctttcacctactttaacgaaatcggtaggttctgacaccaaatattgcgagaaaaacgtcaaaaagtaagtgaatgatggtacaacatgtctaatcaaaaagtaaacaactaatacaagagaataacagaccaaaggtggatgaatgagatagaacgccaacatgaagctttaactgccttaaacaaacttaaccataaagatggaaactttgagacctatgccatgatatcatgaaccaaaaataatttgtacctgtaagcacatggcagcctcgagtgtattttttatgcatgctagatacagccgtaatgagtttgcctggaacatcaaagacccatcggaagcaaattttaaacaatttctgcagtaaatcagtatgcgatagacattgtttaaaagaattgtttctaaacaggacatgtttgaatgaaaaagagtctttgtcaagtatgagaagaatcaaaattagaattacagtcaaggttcttaccatgtcctagaaatgatgttattctactcgagacttgcaccagacttaggattttatctttcttctcgatgaatctttatgagctgaaaaaataatccaaacataaacaagaaagcatctttagtttcatagaatttaggttaccaacttttttatactaaacgtcaataagaaagcaactttaggatcaaaatgtctacaagaaaacaaaacactctcaaatgtttaagataagaagagaacaaaataacaatcaagtaacagcaagatcccggagactagagtttctatgtaatcaactcgaagcaacaacaagatcatgattattgagagacccacttagagaaataagccaatctactgaaagtctgaaacttttggaaaatgtgagaaagggaaatcaaattagatccctaggaatcaatcagacaaatcaaaagccctaaaaccttggtcgtgaacaaattgcataccttggacgacttggagactcgtgagaggagagatcgtaaggagatttagagatcaacgatcggaaaattgaatcacgatcaaattgaccggataagtgaaacgaaatgcgtcaaaaccgaaccaaaccagacactccgaccggatctggtacattctaaaatggaatgttcattgacccacaaataccagcaagattctgcggattgaaccggtgaaccgggttgctctacttctaagttctaatctacaactacaagcggtacttgcgctttaacacatctgtttatgttactgtattcatttatagcaaagactggctctgcttcttgtagaatgttctgtatccgatgagtagtatatatcatatttgcatgcgtagatgttgcagctgggagagttaacgcagtcgatttcttgctcagaggcaagacttccttcagagtacttttctcttggcaagagcattccaagattataagagactcaaactcaattccaattgaactcgttgagtccttaactacattcaagtgatgaatttgttcaagatgaggtacttaatgttgaagatactttgggttgctatgtaaatttttccactgttttggttcctctgaaagtttacttagctgtgcgttgtgttattttaggtgccgcccttctgggaaaacgatcttcagagtattattcagatgggtttcgagagatagtcagcaacagagcaacaactgtatgcaaaacgaaacaaaaagcaacaacatatgtcttgttttaagatgtctaatatctactatatgagtatgacattcccatttggttgtatattgcataggttcggaacttgtgaaaattgagccaaacaaatggtgaacgaagaacggtacggagttattaatagtctctggaagtaatgttttacttcacatcgtttcttcttgtatcttttgttttattcataagaaaaagtctgcgtctgtgaaaagaatggtagatgaagaacttgtggacagatttgtattagtagagaagaggtagattcaaaaaaaattatatatggatcttatagaagtctttgtgtgatgtttttggtatattcaggtctcacttgttggtctagtgtgtgacaaagatgtttcaaaagtcacaaaagttagatttactctttgatgatggaacaggacgaattgattgtaaaaaatggtaattaacacacatagactatacccttttgagatatggaagagttgtttttaggtacaatggtaatttgctatttagtgtaatcacccacttagtgacacatccttcatgatagcaatgcttacaataaggcatctggcaacaattctcagatctcgacatattctccaaacagattgcacaagtctccgattcttcttcttcttggtccaaatctgtcgccgacggagaagaaatacaaggcacaacactgtataacttgtgtgtcaatctgacagagactatcatgaataaaggttgttgacgttgttgtggcaagtaaaaactttgacttctttgcagttgggcttcgacaatcttagaacatatttgtccggacaggtcacgatcgtggagttggcgttgaagacgttgatagacgtagttccgttagtgtaatttgctatttagtgtaatacccaaaaatatgaatattgttactagaatatagagagtgcgagataaaggaaggagcacgctcatgaaaatgaaaagtagaattgtttgggaattaggattgcagtctaagctaagagatctgcatgaaggttggtttaatcttctacgaatccaggaggtttgcgtcatttgtacataatgagttgcaagttatgagtgaaattggacttatatcacagaatcagacacccattttatacacattaaacacacaaaatagatattagaattatatgttgcacctatcataacccgaaaaccaagaaggctcagcaagatttgaaaactcagtttcttttttgtaaagcggctcaaactcatctctccattgctgctcactacttgcatttactgatggttccacggcttgatcacatttggtagagcattcattgtgaatatgagattgtgggacgagttggttaagtgtgttgatttcgttttcatgtttcttcttcagcttgtcaatctgtctatatgcttctgcagcttcatactctgcatccatcgcacgtttctgttgacacaagccacatagattttatgtaagaacatgcatgcataataataaaagcaacagacttattcaaggatgtgacctgacatgtttagaaaatgtaataacgtacctgtgcaactgttaatccctcttcggcttctttaagccgaacaagtaactctccagctgcttgtatggcttcagctgtatctcttagttgtgtttggagacttttgttctcatccctcaggtattgtctctccttctctttttctacctttaaggctgaaatttctgctgcaagtgcatttatgaatctggactctgctcctctgactccagctcttgcagctgcctttttgacatcatctattccgtcttgaatccttctatgtcttgcaagcaattgcatatgcttctcttccaggtctgcatattgttcaagcatccgtgcatgcccttccatggccatctgcattgcttctttcaactcctccccgcatcttttctcaatttcaagttcatgtttctgcttattaatcagcgccttactggcttcaagctcagttcttaattcctcggagagagaaatccatttggtctctgcctctgtccaacaaagtctttcctgttctaatgtcttctcaagactctcgtcctgtgactcaggaatagcgttaactgggggagcttggtatgaaagcttaagcagggtacacgttttcagagctgatttaagagaagggtcaatgtaacattgcagctgcaacttcaaatcctgaatctcttccaataacacttcccgttctcccatgtcaccataaaagttcttgaaattctcgacctcttcttgcgttctttccaactcaatcttcgtcttaagcacttcagggtgattctgatacatgtcctttagaagctgcaacattacatgtcagtaaaagggtaatgcaatcaaatacccttttacaaaacgagaagccacaattaccttatgttcatggagaagagaagcaaattcttcatcaaggaaatcctccttagataatacgccatccataaggctttcaaggcgaataattttgtcctcccttgtttgtcctatgatggcattgcactctctctcatgtttgtattgttgtacctattacacggtttggaccaatttatgtttgaggatacagttactaagggagattaaaaacagaaaaagacgcaagtatcataccagtcggttaagttgggttatctcagaggcttgtttagtgcagaactcttccagagccatttccctcctgatagaacctgctagaaccttttctactgcctgtaaagtgtaaaactcgatcagttggaggaaccaattatagaaatgtggaaacaaaataagactgtgaataactatctaaatctatgttagaaaaaagtcacagttcttactttgggaacttgattcttggatttttctgccacttccgagttgtcaacaggtactaactgaagatttggcatgtcacccatttgctgggcatcaaattgttctctgcatttgcatttacagcacagaaactcttttgtattctcctctgatattgcatcagctccgggaatggtctgcacacctgcatcagccttacttatagaggtcgaaggctcactatctggagctttgaaggaaaacctgtacgtcgatcgtctttgagctgtactctggcaatacgactcaagaagtttaattcctttgtggaggctagatgccaaccgctcagtccgtacaggaaaaactttgctcttctgcgtagacaaagcactagaacagttattcatctttttggatgtagccggagatgggtccgcagcttctgtaactaaattttctccttcactatccttctgagatgctgttgacaattctgatgtcttcaagcttttcctgctatttctaatcgtaggagagacgctcagtgtgggagattttaatacaggagtcgcaccaactggatctatacaaagactgggagatgcagaatttactaagtgctctggatcatctactccatcagctatcaatacatttgctgaagtaacgtcttgcggaactaagtcagggcatgatgacacatcctctgacttgttcagtgaagaacaaagagcatccttgactgaaagaggctggaaactggactcgtgatctaaagtttgcgagtgtgtcttgatctgattttctctgatgccagtctctgtctcagttctcatattatccacggtttctggttcatggttctcagtatggcaacaagcatcctccatggcaacatctgagtcctcaggaagccgcttttctatagattggccatcagatgaatgtatactctttactctgttcatatcgtgattgatcccctcagaagctaaagatgattgcaaacccacttgaacacaaagcctttcaacagcagcctcatcaatttccatctcaatatcaccatcattatcttcatgaggtaaggaccttggatgacccagaccgaagcttcttaataaattcaaacttctacgtgcattccatgcagtggaataagcaacatttggattggttggattatttccatcattcttcatcctttgtagttcatcctgcacaatttatccattaaaagccatattcatatttatatttctatcttataaaatatgtaaaagaatccgtaccctcagctggtgtatcactccacgcaagaaatttacatcatcctgcatcacttcattgacaacagccttattctgtattgcctttgcacgctgagcaaatctcaaggtgctgaaggtttcactcctgcaactgcagttttcgtatatactttatattctagaagatggagataaaataattgctgaagtggaaataggggtcctgcgttacctttgagaaggagaaactgcacaaaccattgctaactttgcattcccaccaagagactcttgcaataaaaatgttaatctggaatccctgtaaggtatatgccttggcttccctgtttgagaaatctctgcgaggatgttaatcaagttcctgcacgtaacaaatttatatggtaaacatgtagttgataatttcatcttgtggtaaacatcctgccaataacaggactggtgaacaaaccaagcaaatctttttctttttaccaagcaaaatttgtatatcctcagcaaaagggtaaaggatatacaataaatccactttgataagacaatcagcagacaaataattgccatttttgaggtctgaagacttcaaacaaataaatatgaacttctgggaagcccaaagtatttttagatcctcagcaaaaaggtaaaggatatacaataaatccactttgataagacaatcatcagacaacaacacatggagagatagttgttctaaaattaaatatcaaaaagcactgctcaaaagacacaagatcctcataagctactaccaccatatttcaaattattttccattatcccaaattttcagttcttttataatcaaaaactagatttctagtgcctgccgcagtatcaaaaactagaagacacaagaacagcagaagctaagtgtcagttctttagtgcatcctgcagtataaaattaacgaaaattccatgctaactgagatccaaaaataacaagagagactactctgaatcataccccagctgagagagcgatcgattgatgttcccagcttccttcagacgttctccggctgccccagttgatttttgtcgttcagaaccagccagatcaacaaggtttattcggcttgtcttaaagctgcttaagccatctgcaacattctgcaaaaagtacattctaaagaagtcagacgtatattccatcatacattcatactactctatatattttcttaaaaacaaatgaaaaaatctcaaaaagccagtatatgaaaaatttaatgtagaagagtagcttaccttgcaccgagattcaacaacgcaagtaaatacgcaatgtgaccttgaactttctgtgtttacactcgttgcaccagtccttctatttcccaaaccctacaccagtttcagacacaagtatagctatcaaatattatttttatcaggagagaaaatatgttgaccgtttcatatatattgccaactaaggaacaataatttctcttaactatcactataaaatgtaagctttgtgagatcatttgattcacacagcatcactaacagaacatcaacgttaaaccccagtagcagcattctatataatctgtggcaatctcttctttctaacaaaaacaagttttcacattgcttcattaaaacttaatagaattacaaagatatgataccggaaattgtattttgtgtacttttagagcagcaagtttgattaagtacttaagaaatattgcaaagcaaacatgatttaaggtgcagtactgcagtgagaaaccaaaaagaataacaaaccttgatcagaagctgtgacacgtctgtcaagttttttacgtattcctcagtcagattttcaacataaacacctgacttgacatcttctctaatctggtgacacattaacgaaaaacgatgaaccccatgttttcctacagaatataaaccaagttaaatttgaaagttcattttaccatcaggtttttctggcttgggtccagtaggtctgttatttgctcgttgtaaatctgaaaaggaagaagaatgaaattatatatcaaactctataaaatgaaaccttcaaacaccatccaaacttatgtaatgcagccagtcactaaacctcgagtaatgagcaccgacattggtaattgagttgcctttcagcatgcttgacttgttcctgcaatccaaaaaaagaaacaagaagaatcttcttcttaatgtgctaataattgaacaaggtcaaaaccacgaattgaacaaaaccaggcatcacctctttgattcgggcaaacaatcgttcaaagacacgtggggtcaaacctctttggtcaccgcagaggtgctcttccaacaatccatttgcaggaccccacatggtatatgtttttccactaccagtctgagagaaataatttcatgatcagttaaatcaataagttacaatcaaacaatccaataaatggaaccctgcctcaaaggaagactttagaaaataaaaactacctgtccataagcaaatacagaactgttaaatccagatagacaattttcaacaagaggggctcccacaagctgaaacatttgttcctgaggaagaaacaaaagacaaagttagagattcggaatcatacaatgacatagcataataatatcaagaatcatgcaaacagatatcttgcctgtgtcgactccggatttgcaattgagtcgaatgtgaaagtttgtccactaactgtgagggaatctttggacatcttttctactatcatatcaccttcctcccctttgtttagaggcttcattctaactataacctgaaaattggctcaatctgatcaccttctcttcctcattataaatgagtacggaatttcacaattgagctatgttctaaaacaacctaagccttcaccaagtcactctacacctctcctattagaaacgtaaccaaatttagaaagtacacaaaccatctccaattagaaacctaaccaattctagcaactacacaatctttcaattggggtgaattcaaagatatgattcaacattacttaattagaaattttgtctcgataatacctaatttctgagaaaagggtgaaattaccttgacacctgagtctgaaaacccagattccgtcgcagtctccgcactaagtttccgtttaagaggattagacggcggcggacgcggaggcaacggattcttcattctcatcgacctatggtcaggcgtcgacgtgttccgatctagaggtggagcattttctttggcggatcttaatttgcgtggaggcttcgatttcgagatactagggtttggcgagtgtggctctccgccgtcgcgtaagatagcgtttcttggtaacgtaaagtgcttcttcatctccgccgtgaaatctacaattagaaacccaaagtagaagaaagagggaaagtaaatcgaatctgcgcttctacgagagcgtcagtgaaaccctagtgtttgggcaaagaaaagaggaagaagaacgagagaagagaagagagagagagccgttaaagagcgagaattttgaatttgtttttgtcagatcttgtgaagtgttgacgattcgcatcacatgaatttctaaattattttatttaaaaagaaatgaattttatgtgatcgtgactttatggccgtaggatgaatccaacggagggaatgagcaacaaaaaaagaaaaggcccacgtgtgtgtttaatggtgtgtgttttagtctttagacgtgtggtagtaatactgccgcacgggttttttaagatccaccgcgcgtaaaaatccaatccatccgctatggagcgggtatgggtttaaaacttttgacccgttacgaagcatggctcgcgagtaatcgtatcgtgggttgcagatttagtggttgtcattgggcagcagtagtactcatttctatcttcaactatattatatgtctttgactgtgaataaatgtagttcgaacgacaaaatcatcaaagcagtaaattagtcaatagcacagattttttttttttgggttaaaagtcaatagcacagatgcgaccacatttagtcatttacttacaatttagtcttaccaacgacatgaagagctaatatgagtgtcaaaaaatacaaaattcgatggtagcgatgagcaatctcttcaaaattgaagtaagtgattcttatgtcataaaattcattgaatactagacaattcattgaagatgatgcaatttaaaaattaaaaataaaaaaattcatacatgataaagcatgaattgaaattcttcatgcaatttaaaaaaaaaataaaaaaattcatacatgataaagcatgaattgaaactaatgtcaggtcctccggacttgggagcgtgtgctaaactgctaataatatcaagagagtaaacaaaaccacttgcaaattttataaaatctgccaaagattagcagattatgctgataacttggtacaatagtaggcaaaatcttattctactataaaatcttctcaagtcttcacaactattcaccatgtacttgaagtcgaaagaatgttctcatatatatatatatattttgttacgaatgttctcatatatagtatgccaataaaaccacaaaatttgtctgacacaagatagagtatcatgcttagtcaaaatatgtaaatattctcctaaagttcacaactacttgcacactttcattaagtatgctgctatgtttacatattatacaaataaaatcgtaaattttgttagaaacgtggcaaactagcataaataaataatctaaggcttctagtaatctttgcattacaacttgcataatttccataagatctattggatattgtaaaatctgccaataaaaccacgtatcttttaagaaaacacaggagactaaccaaaataaatccaaccgtattataattctctaaattttacacattgactcacgaacatttataaaatctgccatattcgaaaaatttgtcaacaacatccctataatgtttgagagacatgaaaaattagcaaaacatatgctaaatgtgctagtaatccctaatgtacgtttacataattttttttttgaccgattttaattagagctcaaaagaatcatccatgaaaaatgtacgtttacataacattttccatactttgtaaaatccgtcaatgttggataaacaatgttatgaaaaacattcaagtctacaaaacaaaacctaagtttctatggcttataattaatcccatagttttttaatcatgttagatttgttaaaattttgctagcgttgatgattttcttgtattctaaaattttaattttttgaaaaaaattaattcgagaaattttttcactaaaaagacaatgttttttttttttaatttaaaacttaaatctaactcttctttttgtcaaatatagattcttattattcttaccttttaaaatttatcttatttccttcttttttttaaaagagatttacaataaataagtaatattgaccaaagatatagaacacaccaaaaaagaggcaaagatatagaaaacatactatttagattttttataaattttggtagatatcttagattattctagcaaatctcctttaattgttttttttaacagcaaatctcctttaattacatcaaatccgtaaaggttgaaaaaaaaaataacaatagaattttagtaatgaattaattaccaatacttgacccaaacccgaacctaaacaccagatccatcgtcatcatccatccaatcaaattgactcatcgtgttgtgacctcccagtgattaagccgcgactcctcctaactcgtaatccctcacgtctctgagaattctcagtttcttcagtttcattgcaattcaattcccgatctgatccgttcctgcttagatcggagcaaaacaatggcggagatggcggataaggcgaaagtggaggagatggattgggaaggtattgatggagttcgtatgacttggaacctttggcctcgcactaaggttgaagcaagcaagtgtgtgattcctctcgccgcttcaatttcaccgatccgtcgtcacccccttatccttgatctcccttatgctcctctcgattgcaagacttgtaaagctcttctcaacgccttcgctcgtgttgatttcgccgctatgaactgggtctgtcctttttgctatcataggaatcatttcccttctcattaccattcgatctctgagattaatctccctggtgagctttatccccagtacactactgttgagtacacgttgcctcctgatccgtctcgtgtgcctccaccacctgtgtttgtgtttgttctcgatacgtgcatgattgaggaagaattgggatatgccaaatcggctcttaagcaggcgatcgggttgcttccggagaatgctttggttgggtttgtgtcgtttggtactcaggctcatgtgcatgaattggggttctctgagatgtctaaagtttttgtctttaaaggcaataaagaagttaccaaggatcaaattttggatcagttggggcttgggtcttcttcgaggagagctcctacttctgggttttctaaaggagcgcaaaacggattccagagttccggtgttgacagattcctgctgcccgcttcggagtgtgaatacacactggacttggtgggtaatggttttggtttggatagatttacgtctatgtttgttttaatttaactcgtgtttgttgtcaattttcaatcggattcttctgcttctaaatgattcgttatttgtaacatggatttgaacactggtgtggctgatttttggtatgcagcttttggatgagctccaatcagaccagtggcctgttcagccaggtcatcgtccccaacgatgcacaggggttgcattgagtgtagctgcaggattgcttggagcttgcttacctggaactggtgctagaattgtagctttggttggaggtccatgtacagagggccctggaacggttagtgcttattgattcctcggttgatggcactctcaagttttatcgctccatattttgaaccatatttgttatattctgaatcaaattttctttcttttgtcttttcagattatctcaaaggatttgtcagatcctgtgcgctcccacaaagatctagataaagatgctgctccttattataaaaaagctgtaaagttttatgatagtattgcaaagcagcttgtcgctcagggtcatgtgttagaccttttcgcttctgcacttgatcaggtattaattgtcgtgattatagtttgcttgttggcatgatgcccaacctctggttttgttcttcaggtataaatgtgtagtttcttgcaatgcttgatttttcaattttgtctatgtcgctgttatattttagctaaaatgaatgccatgcctcattaactctctgaaagtgttgttttatgtgtatgatcttgaatatgtattcttagttactaaattgttaggtgaatttgacattgttgatgcacaccaattgtgaaagctcttacttgtactcgagttgtttaactaacctgtgatcaccagtttctattcttttccttctgattatttttgcagatgttagtagttgcgcacgaaagagcgtccatttgtagatatctgttacatacattttgaaattttgaagggcaatctatgtgattgttttagaacatccctttaatctagaaatcagaattgtttcttttaacactatagaaaatatgctttcccaagccatatcagaaacccccgcttttctattcacattgttttcctttgcctcatgaaagacgtattatatcaataccatgttttctttttaacttcagtgttgataggctttgcttgttgtatctatcaaaaaattccactttagctatcatttccatcacatgatacgatacctaactataattgtttctgctgttgcattttgggtatagttaggtcggggttgctgaaatgaaagtagccgttgaaagtaccggtggtctcgttgttctgtctgaaagttttggccattctgtatttaaagattcctttaagaggatgtttgaagatggcgagcactctcttggtctctgcttcaagtatgtttctgctctgcttctgtgtcaacactttgctattatatcttctgttgagttggtgttgcaagataaataatattttggcaattaagaccctttcttgtagagcattatgcataatactgcttgtatgctatgataatatatattttgcattccttagtgcaaactaactccgaacctttcattttcagtggcacgcttgagataaattgttcaaaagacatcaaaattcaaggggttatcgggccttgctcatcattagaaaaggttttacctggagtgcttagaatccattttatttcaagatgtatttttaatgcttggtgaatgaataaagctatctgctattaattgattttaatttattttcatttgatgccttgcagaaaggtcccaatgttgctgacacagtcattggagaggggaataccagtgcttggaaattgtgtggcctcgacaagagtacctgcttgactgtattctttgatctatcttcaaccgggtcaactgctcctggagctttaaatcagcagttgtatttgcagtttatcacaaggtattcttgcagcttttgtttgtctctaattttccttcatttgttaaactttttatctgtctgcattaagctattactttatatctagaagcattggatttactgttgttgactcgattgcagataccaaaactctgaaggtaaaagtttggcccgggttacaactttaaccagacagtgggtagatactgctgtgagcacagaggtagtcttgttttctgccaaacttaccactttatacaaatgttatacgcaattgggtttatatgtaatctactagctcttttaccgtagcactgtttattatgttttggtagcgttgctatgttaggattataatctataactctgctagcaagtattattatttgccaagtgaaaatgcggttaacgatagtaacctttttttttttttgttaacgatagtattgttaagcatggtatcattttttgttctcattttggtcaaccaaaaattaatttccatttctcactggtgtaatttagtaaaagctatttactgtgaatagaaagcaaaaaaagctttggtttttgggatttcaacgggacttacatctttctttcttggaaaaatttgtttgttaggataaacatggatcccttaaataccgttactgtataacatactatgattcctaatgctttattttatatgattcctaatccttagcctcccatgagtgttttgcggcaaattcatatcatgtgaatctcagaatcatgatgttggttgcatgattttgacatattatccacatgttaatgctagtaccagcttgatagccaatttcttttacattttactattgtcatggaatcaataataaccgtggtcagggttatgtgccattcatgtaaatgtgttatggtgttcaaatagttttctggcaagcaaacattttcttaccatggttgctgtatacattctcagaatcttgtgcaaggctttgaccaagaaactgctgcagtggttatggcaagattaacttccttaaaaatggaaacagaggtaccttacatcatcttttctttgcttacaatatgtgagttaatttgaccgtgacttaaattttttgtgctgttggggtaagggttaagctcatattgcttttgatgaattaaaatatgggttcttttctcctggccatatttatttacctagggttcaggatctttggccaaatgttcatctatatgtccaaaggaagtaaaactttacttttcccacaactaattgaggtggattacagttgtccctgtagcatcttgtttgaggaactattgtggctgtatgagatgtagctttcatctctttataccaataatttgtagtctgtgtgaggctcatagtgaaactctaagtaacagttgctatatactcatgtcttgtactttgtttagtgatgtctactttatttttgtcatatactcacgtatgcagtgtattatgtataacctcaggagggatttgatgcaactcggtggctagatcggactctcattcgtctgtgttcaaaatttggtgaatatagaaaggatgatccaacctcgtttacgctgaaaccatatcttacattgttccctcaattcatgtttaacctgaggcggtcacagtttgttcaggtagactaccgtttttagatttcatcaatatctgcctttatgtaattggcctacatagttgaatcatgttttcttttgcggtgttggaatggtggcaggtctttaacaatagtcctgatgaaaccgcatacttccgcatgttgctaaaccgggaaaacatttcaaatgcaattgtcatgatccaaccttctctgacgtcatattcattcaattcaggacctcaggcagctttgctggatgtggcttccattgcagctgacaagattcttctattagatgcatattttagtgttgttgtcttccatggaatgactatatcgcaatggcgaaacatgggttatcatcatcagcctgaacatgaggtaatgcacgctttgaaccagtaattgactgtttatttgtaaaagcatttttttaccatcattttacactttcgtagctataaaatatatgtccttttgagttgggttgttaacatgacatcggtttagggtagaaatccaaattgagacatctagttttgaaacaatactcttcagagctggttccatttatatgcaagtgaaataatgtgggttgtagcaactcgcaaggtcaataatctctaccatggggtctcattttgtgacatctttataccatcattaattctatgatatcctaaatctcggatgtctcgtgtcaggcctttgctcagttattgcaagctccgcaagaggattcccagatgttagtccgggagcgtttcccagtcccgagattagttgtgtgtgatcaacatggatcacaggttagcattcacatatgtttttagtttatctgtgtgggatttgatctgatggttttcatcaccatttcctttataactttacatcctttgatactgcaggcaaggtttttattggctaagctgaatccatcagcgacttacaacaatgcaaacgagatgtcagctgggtcagacataatcttcactgacgatgtgagcctgcaagtctttattgaacatcttcagaaactggccgtgcaatcctgagcaaagtagtcacagtcccagtttgttttttgcttaaattatctatatcttcctgattacccgcatgcccgtttgtactattttagagctctttgttattttggtctcacataaaatacatcatagttggaagtcttttatttgcattgggatttgtctggagtacagagatttactatttgcttcttctttcttttttttttgggatgaaatctcttgtatgattgatcaattatatggtttgggtctgtggctttagtacttttggtccttggacaacttctctgcttctgatccagtatgttgcgctactgcgtttaatttaaaaaaatctcttccaataattattttttgcaagtttaccctcaacttgcaaaaatgaagatcaaacctaaaaagtaaaatttaatgtgcaatataacatttatgtgtgtcttccactgtctttgatttgatatattatttatcataattttaaaaattgaaagtgttgaccgagatttatattgcagattcaattagatttcttggagttgatttgtatttttgtaagttaaaggttaaaattgcaacaacaacaaatattaggatttttttttttttgaagaaaaccctgacatttatatgatgaattcaaatttgagagtaaaacatcttatgatagtaacttggtcttttaagttatatcgcactgacctaacaatcttcattgtcttattttatgctacgatatatattaccttttaatcaaaatactacttacaaaatattgaaacttttaaggtacatgtcttattatctcacctgaactatgacatcgtatgagatagaacctaaactgtattatcacatacagttacattaaacgttttctacatgtgtaattcgttacagtttgaaaacaaagcagattattgtcattcttcaacccgagaaaaggttttccaaagaaaaatataccaattaaaatcagatcaaaagaagtcacccaaaacccaaaataatattaactcctcggattaacgtttcaccaaaaggtcaaaaagtatctcatcacttcatacatcataaggttatgacgaggagtaagcttttcattttttaggataaaaacaaatacaatcgactcaaatgacgaaacctcgagtgaacaaccatgcttccatggaatataatgctgatatatagttaacctcgagtagacaaacatgcttgaacacaactcaaatctaaaacccaatgttgctgtttgtatctttgtgaaaaaaataaaattagtttttcacatctctataatattcaaataagcttgtttaatacaaatatgtttttggatttttgtttcatcttggcttatagagagggaccttacatttaacttcctatgtttattgttctctagctacaagagaaatgattatctgaccatacatctcaacatcctttgagtatacatcacttttaagccaaaaaaaaactatcacctgatcatcattaactagggtcaaataacatattgattgaaacaagaaaaacagaaatatattgactagaaaagacatatcaacattttagtgcttgaaactaggtacgaaccattgagctccatagaattgaactgatgaagaataactatcaagtgtgtgcagcggctccgtcttttgtgtctcgagattgaagatatagatatcatgtgtgttattcccatgactagcactgaaatagatggtatttctaatgaatccaccagtgtcattggctagcacagtgatgccttgatccaaaagcatcgactcatctcccagagaattaataagccgctcttttttcttgaggaattctgatgaataaaacctcgaaaacccggaaggaccaggttctaggcctcgctccccccatttcttcaaccttgaggacttttcctgttacggtgactacaagttttgtggcaagaactttccatggattacttggtggaggaggtccaaactgagatctttcaactttaacactccactcaaaggtttgttgtggaatatctccacaaaaatcaaagattttgaaactaccagttttgtttaggaagtaaagcttgtgatccttgtaaaccatgtggaaacaatctgaagttttggggatttgattccaacatgtatctcctttcttgcaataaaatacacaccaatccataagtccccaaagaactacataatctttggttttctcgtcaatccaaaacacagggtctcgtatattcctacccacgtacggtttatacctaacacggtaggtgctaattgtcctctgacttgcatggcgtaacgcataatctttccacaataaatctgcaggaggtagactgatccaatcatgggtaaagagattcacaatatagagatcacaccatcgatctcccataaggagccaacttccatgagttgccctacaaacactctttgtaaattcctcaccaaaatcttgcgttttgtaaactttatctttttcctcgggattcaacaacgtgcatgaattgttgttgttgtctcgggggaatcaaatcagccaatggatgtgtttttgggcacgacttgtctggaagcagagtaccaagaggaacacacggatttagctcgggaagctccgaccaggtatgagacgtatgagaagtagggttatgcttattctccatggcaaattggagagaacaagggaaatctcaaaatgagaatagggttgttacgatttggtgaagaattagggttacgcttttaatatagtcaacgagaagaaaaatttgcttgttttgggattttaagaagttattgggccattaacatatctaagcccacttaaacaattgtttttggtgacttagctagaaccgacgaagaagaagatgaagtagcaattagagagaaaaagacaaggacaagaagaaagttgtgctgtcgcaaccaaactaagggtgtatatatgtgtgtgtggtaagtagaaaaactactaaggtatgcttgtatgtatcatgttgtgtaaaaggaatccgagttatcatgttccaaacgtttttgtgtttcatcaaacaagtagacacaaaacagagagtgaggtatataagaattcgcaataaaagattattctgaaataattcaaaaaaatgttccttccggtatatcaaatcccatgatctacaaccctaataacaaaaagttaactttgaaaagagcttatctttatcctattaaacaccaagtatattctacatcaaaagcttacttaagcatatcagtttgtgtataagcacaagacatttttaacttatccataacaattgaaactttgtaacccttttgaccacccagctactcttttggatgatgaccctctgcagacagctgagactgtagtctccaggccatgtttaaatgtcttatttgctgaggcaatcaaaagtcccttgctttccactaacagcgaggtgaaacatgccgtagtagctaaagactgttttcaaagtcggaccagacaccacaacttttccatgtacacaattagctgtggtctgagcctcattaccaaaatctagatgtaagtttcaagagcttttggtgcggttttgatctttaccattctggtaatctttcacatgtacaaccagaagacgctgaaatctccatcccatctttcatattgagctacacccgggaaccttagaaatctgtttctccttcatccactgcctcagactctcagcttcatcaaaccgacctgcagctgaatatagaccggccaacgttacatagtagctagcttttctcggcttaagttgaatcagctccctcgccactctttccccaacttctacatttccatacaccttgcacccactcaacaccgcacccataacagcctcatcaggtttcacgggcatatcttccagaaacttctctgcttcctccagaagacctgctcgagacatacaatccgccacactagcatagtgtttcagttcaggaactatattatattcctgcattagtctgaaatacagccaagatttttccacaagaccgccatgggcacaggctgataagacaccaagaaaagtgacagcattgggttcaattccttccttaagcatctcatcaaagagtttaaaagacattaccacgtctccatccaaaccataccccaaaataagcgagctccaagagatcacatctcgtctcgacatatttacaaatacagtgtgcgcatagtccagtatcgagcactttacatacatatctgttatagcattgccgagattcaagcccaagcaggagcatctcctgatacaccatccatggacgctcttcccgtgcttcaacgctccaagttgtccacaagccataagtaaactcaccatcaccactgaatccagcgcaaatccagaataccccatttctctgaacatggctaaacccaacatagcttctccttgctgaacatacccaccaaacatagctgtataaagaacagagtctctcacaggcatatcgtcgaacaacttacgtgcatgtaaaagtttccccatatctacatacattatcactaaagccgaactaacaaacaaacttgagctaaacccaagtttcaaacacagaacatgaatcaaatctccagatttcgcttccctagacgcagagcaagctcgtagaataagaggaagcgtaaaatcatccggtctaacacaagactctcgccacatacgaagaaacaaatcaattgacttggaagcaaaacccgatctagagaactcaccgatgattatattccaagagaaaatgttgcgataaggcatgtgccagaagacagaaagcgaagtaggaaagagatggttcagcttggaataagcgaggacgagcttggagctgagcacaacgttggaatagagaaatgtacgaagaaggtgagcgtggagatggcgtagatgtttagcgtttggagaatgatgtagaagcgagaagagatcaggaggattctgtgtagttactgataaagctcgagctttcaagaacattgcgaatagactcttcgtaggagacgagtacaaggaagaggaagatggtaagtgcatcgcatcacaaaatccagagaatagtggaagatgctttatgatttaatccaaaactttattttatgattttatatcaaattttaaaataaggaactcttaaaagtaatataactgtaaaatcatttttgttgggacgccatttctaaaagttcgaaatttcccagtctctctctttcgcgctctcacaatgttcttccaacactcacagttgcaaaactccgatcatctcctccatgaatctatggcggattcaaaccatcaatctctttcgccgccatgcgctaacggccaccgatccacaatttctctccgcgacgaccaagggggaacattctgcttaatctgcttctccaatctcgtctccgatccacgcattcccactgtacatgtctcctacgcgcttcaccagctctcaatcgctatctctgaacctatcttcctccgaaccttactctcctctcatatccactttctcgtatcgcctctcgttcacgctctctcttcgattgatgatgctccaatcgctatccagattatggatatgatctctcttctctgttccgttgaggaatcttcaatcggtgaggattttgtggagagaatatccgatcagctttcttctggtgctttgggttggagccgaagacagctccatatggtattgttacatttctagggttttaattggggattctcgttgagattttcgtgaatctatcggataagcttgaaatctatattctctcatagattgcttattgtctgtgttttgcagcttcactgctttggtgttcttatgagttgtgagaatataaatatcaattctcatatcagagataaagaagctcttgtttgccaactcgttgaaggtcttcagttaccgaggtaatgtgcataatccacctttggagaccactgtttttactatattgtatggggactgttgtgatttatcttttttctcatactagtgaggagatccgtggtgaaattctttttgctctgtacaagttttctgctctacagttcacagaacaaaatgttgatggaattgaggttctttctttattgtgtcctaagcttttatgcctatctttggaggctcttgcaaagacacagagagatgatgttcgcttgaattgtgtaggttcgtatgagcttatatatctacttcgttcttatgcggtagacattgttttcatctttaactcaaccatgaatagatttgcatagtcatatcctaaagtcctagttcctctactttggagtcttgtgacgcttaagtaattattcagcgttttccattggaaaaatgtttggtgatatgttgtcattggctatagactgactagaaaaccatgatagaattgttaatgaatttcttatagcagtagtacattctcagtttgagtctcccattattgttgttgttgttgttgtttctttttaacttgttatgtcagctaacagagaaatttgaactttgtagccctgttgaccatcttggcccagcaaggtcttttagcaaattcacattcaaatagtgccagcagcatgagcttggatgaagtggatgatgaccctatgcagactgctgagaatgtagccgccaggccttgtttaaatgtcttatttgctgaggcaatcaaaggtccgttgctttccactgacagcgaggtgcaaataaaaacccttgatcttatcttccactacatatctcaagagagtacaccaagcaaacaaattcaagttatggtagaagaaaatgttgctgattatatatttgagatactgcggttatcaggtaatggcagtctccttgaataataagttaaaagtatactgctattgggcattcctttatactggaaagactaaaaagttttccagacactagcggaaggttgagaagctaagaaatgaagttatcatttaacttctttcagatgtcaaatgcataattcattgtttcctacacaattttaacaacttgttcagatagtctttatactgtttgccaattacaatttccgcttgattcatatctttctcttgcttgccattttttcctctggaagctcacatctcaacgagcattgatagatatttgtttttatgtacctgactggcgattttcttttcatgaacagaatgtaaagatcaagtcgtcaactcatgcctcagagttcttgatctcttttccctagccgagcattcctttcggaagagacttgttattgggtttccttcagtcatccgagtgcttcactatgtaggcgaagttccttgccatccttttcaaatacagacactgaagcttatttcgagctgtatctctgatttccctgggattgcttctagttctcaagttcaggaaattgctctggttctgaaaaagatgcttgaaagatattattctcaggagatgggattatttccggatgcatttgctattatctgctcagtctttgtttcccttatgaaaactccatcttttggggagactgcggatgtgttaacatcattgcaagaatccttgagacattccattttggcctctcttagtctccctgagaaagattcaacccagatattgcatgcagtctacttactcaatgaagtatatgtgtattgtactgcatcaacatccataaacaagaccatttgcattgagctaagacactgtgttatagacgtgtgtacatcacatctattgccttggtttctctctgatgtcaacgaggtcaatgaggaagcaactcttggcataatggaaactttccattctattctgctacagaattcagatattcaagccaaggagtttgcagaattgcttgtttcagcagattggttcagcttttcgtttggatgtctaggaaacttttgtacagataatatgaaacagaggatatatttgatgctcagttcccttgttgatatacttctcgaacagaaaacggggtcacatatcagagatgctcttcattgtcttccttctgatccacaagatttgctgtttttgctcgggcaagctagttccaataatcaggaattggcttcttgccagtccgcagctctgctgattttccatacaagttcgatatacaatgacaggtgaattagctttttgataaacgcactaaggatcctgatttctttctcttccttatattattcttcattttttgcaggcttgcagatgataagctggttttagcttctttggagcaatacattattctaaacaagacaagtttaatatgtgcgatctctgattctccagctctgctcaacctagtgaatctttatggtctttgcaggagtcttcaaaacgagagataccagatatcctacagtcttgaagctgagagaataatcttccatctactaaacgaatatgagtgggacttgggttccattaatattcatctagaatctctgaagtggctttttcaacaagaaagtatcagcaaaagtttaatttaccagatccaaaagatctcccggaacaacttaattggaaatgaagttcacaatgtatatggagatggcagacagagatccctcacatattggtttgcaaagttgatatcagaaggagacaactatgccgcaactcttctagtcaacttgttgacacagcttgcagagaaggaagagcaagagaatgatgttatctcaattttaaatctcatgaacacaattgtttctatattcccaactgcctccaacaatttatccatgaatggaattgggagtgtaattcatagactcgtttctggtttcagtaactcatccttgggaacatcgtttagaacactccttctgctagtattcaacattttaacttctgtgcaaccggcagtgcttatgattgatgaatcatggtatgctgtatcgataaaggtaaggccatctagacttattctccaccaacattgccatgttatcaaagagctcactgaatcctctttgtcttgtagttgttaaattttttgagcttgcgagacactgctataaaacagaaccatgaagatatggtggtgattggcattctttctttggttctgtaccactcgtcagatggagcacttgtggaagcttcaagaaatattgtgtcgaattcgtacctggtatcagcaatcaacactgtggttgatgtagcctgctcaaagggtccagcattgactcagtgtcaggatgaaactaacatcggagaggctctagcattcacgttacttctctattttttctcactaagaaggtagcatttgaaattgttcacactgatagatcctacttctaaccgttctgacttccttttggcctactagtttgcagattgttctagctggagcagtagattggcaaactttctttggcacgtcgaccagcctggaaacactacccgtagtctgcatccattgccataatttgtgcaggttgatgcattttggagcaccacaaatcaagcttatcgcctcttattgtcttttggagttgctcactggactatcagaacaggttgacataaaaaaagagcaactacagtgttcatcgagttacctaaaatcaatgaaggctgttttaggtggtcttgtattctgtgatgacataagagtagcgacaaactctgcgctttgtctttccatgattttaggatgggaagacatggaaggaagaacagagatgcttaagaccagctcatggtacaggtttattgcagaagaaatgtcagtttccttggccatgccttgttcagcatcaagtacatacgtgaaccaccacaagccggcagtctatctaaccgttgccatgctaagactcaagaacaagccagtttggctgagaactgtttttgatgagtcttgcatctctagcatgattcaaaatctgaatgggataaacatcagcagagagattgtaatattatttcgagaacttatgcaggctgagttattgaattcccagcaagtgaccaagttggatcgtgcattccaggttagtaacgcagataagtttactcgacataggtttgaatacatcaaattgatttcataaaaatctctggtcctgcaggaatgtagaaaacaaatgcacaggaatggaactcgagatgagacagttgaagaacaagtgcaacggaaaattccctcaatccatgatcatagtgagttctgcaactatcttgttcatttgatggtatctaattcgtttggacacccaagtgaaagcgaaacatacacccagaagaagaaacagattcttgatgagatggaacaattctccgagctaatatcaacaagagaaggccgtgtaagccctatacaagaagaaacaagacaaatgcaaacagagagaatcgtgtagaagagcagacttaagagaagcttacaactgttagtctctacatacagtctagtgtttgtataggttcaaatttacatactaaggtacagttttctgattcttaaccactagttccattagatactggtaagtccatgacttcgattctccgtctctcgtaccaagagactggttcttcacttcttcacagctcctgagaaactgccccttaccaaaagcagcatgaaccaaagggtctgtcttcatttccacaggcttatcaagaaacccaatctttttccaagtcataaaaactccagtgccgtcgaacctagcttcactcaagtcaaagacaattcctacagttacaagatcaagcttcacatgttttatccggagctcagagagtaacagctcaatgctcgtgaaatctcccatctttgagtaagctaaaagtgcgatattggcaaaagttgtattccaaggaactctagcttcttccatctctttaacaacataatccaaacctttccgactcacaagtcgggcatgacacagaagcctgagacaccaagcaagttcagtcctacgggttctagaagcagaaatgccacgacccaaatcatcaagtctcgagaacatgaggttttcaatataaacattagctaatttcctaactaaaccctcatccaaagaaatcccaaaccttataatcttgttacacgtttcctccatcttttcaattagcccaaactctgcataagcttcaagcatagacaacaacgtagaaggctccaaagtcatcttcctcgacatcaaactctgatacatttgctccattctcttaagcaaccctcctcgggaaaactcgcgtatgagtagattataagtaacatgatcacgcacacaaccatcagattccattctcttaagacacaaaacaatctcatcatacattttccatttaccatatgcttcaatcaatccatcgtatgtctccgttatcggtaacagaccattctccttcatatgattcaagtagaacatagcttcctcaaacttcccatcatcagcataactatgtatgattgaattatagatttctaaagacggacttagctcatgatcatcaatcatactacgaaaagctcgaattgcttcactcatcgatttttcctcacataaaaaccttataatcctttcgtaattgttctcacttattcgcgaaggctcaagattcttccacgtatcaaaaacctgtaattgaaagaagaaacaaaaagtcatcttcatgttctgaaattttatgaaagagatagatacagaggaggaaagtacaggaagaatctcgtggagtcttgaggactgacggagaaaacgaataacggcccagaaatggtctttgctccaatctccatcctcctgaagaagccgtagaggacacgaaccggaaagactgagccgccgtgtcaatgaactgagaaaccggtggtggtggagaagagaggtgggctgtgtcgcgtcgccattgatagacaagggcaaagagcggcggagagaagaaggtctaggtatcgaataggaggtagatgtgagaaagcttgagttcaaattccatggaggaggaggtggcttcttcagtagcgtcgctctgtggagaaattgcgccgtcgtcagattctccattacattcgaagctctgcaaaaagtttgaaccttttccagaagaatggattattttcccggttctggtacggtttagtttgatttcggtttaagtcttaccaaacatttattcggtttgatcaattcggtttaagttcaagctggtacactcattcaacaaactaggcattcaaacgcaaacagaaattgaaaaaagtcaaattcaaaagtggtctgcataaaagtattcaaagcctaagcaacagtagcgcctacaagaaccaaactactaacacgtctttgtactagcaagtcttcagaaaccattcatcatctcctacacattatacaatagagtggtggtctatttaacattggagcagcaaacaaatggcacccaaaagggtcttcctttcactttcttctcctctctctttaagtccactggatactttgctggtgaattccattcctcgctcacttctcttttctctggccagtgaccatcttcaggggatgtctcctgtcccagtatcgaactcactctcggtatgttgttactctcgtgatcctttgcttgttgttgtagccttggtgatcttgcttcactcagaaggttctttagagggacgtgttgctcctttgctgtgccccagcttgttgtcttctccaaggtgatctcttggttctgagatgcgtcttcctgtttgttaactccagcgcttagacctgttccatcaaaatcgacttggctattacagagatacacaatattcattttaatgagtgttatatcttgaagagagttttgttttttcgctcatacaagatgtataggataagtacctgaaactggtcccaagttagattcagaagcattagatgtattatttctagtgactagcggactagaaaccagagatctaatgtgagcttctgaaagattctgcaatctcccaaaatctcgatgatcgtttgattctattgtcactgggacctcagcataattgttgtgtgctttgacattaccgtcgacctcatttgcttgaattacccccaagccaccaacaactctattgaattctgtccttccgatttccagtgacgtctgattagctgtattaacagtgtcaggtgcagtgcctgttgatccaaaatggcttataggatattccgttttatttggttcgtttatgaaactgctttcctccacaagccttccgttgttactctctctgcaaacttcatctttactttcagcgctgatttggagggcggagtctttggatgtttctgttgaacttttgatctgatcacttgcatcagatccctcaaatacaacagacacaggagaagcataacaagaggattcagaactcaaagtgtcttttggtttgttccccttctcagctacaacatttgcttgcataagttcactttcattaccagcgagatcaactaaaccagttttgttcgctgcactgctcatatcagcatttgagtcaacaactacagaatctacagcaggtagagaaactctcaaggtttctgattcaacagtttgtgcattccctaatgatgatttaccctcttcagctttcattccgatatcttcagagttaatcttagatatcagtatgttctctgcactgggaaattccttgaccgcaaccaaatcggtttggccttgaggttcagttttgtctccagcgagaagcttgtctgatgaagaaacctctgagccaatacttaagccttcaggcttaattcctaaattctctgcctcagtaagtgtatctatttcacattcttctcccttagatgtctcaggaagaaaaggattcacagaatgactcacttcaaattcttcaaagcctttgattccatgcaaatagacatcagcattctcaacaaaaggcatatcatcaggaacagatttactggcactgataacctgagttgcatcagcttttactggagaagtatggactggaacatcctcactgactatacagctagcttcatcaggatgagtcatactagttgcttctgatgaaaaaccatagggaccctccacatctgagtaaatcacttcatcgttccacgatgaatctgaagtatcctctctctttcctaatgcagatgctaacttagattgagattctttcgttaacttccctttgcattctgtctctaatctatcatttgatatggtatcaccaccgtcaatgacctgagcttcctgtgatgactcaatcacagtttcagatgacatagagtgtccttcagtagaatgctgtgcaccttgtcgattctctgaagctgattcaacttccacaggtggaacttcacagctgtcttgaaccacttcagaacttttcatctcacaggccgtagatgaattgttgcactgctgagtttcacctgagaagttccatattcatcaactatatagttgaaataaagcagacacatcacacaaaaacatgaaagccaaatgggaataaaaccgagcaatgtgacaaacagatgagtcagtgaactaaatagtttccctttgaactatactctacaggtttgagattctattacttgatgaagaaaacctatcaaacacattagcatcggaaggtaactcaccgggattctcagtaccctttgccgggaagtttgtagctgtctcttccttgaaagaatcagatctcgaaaactcacaaacagcatcagtaaacacatcctcttcagaaacatccccaattctctcattagcagctttttcgacaactgttggagcagatttttcgacaactgttggacctaacctcatcattaagcatacattataacattagaatcaaggaaagaaagaaactttatccatccaaagcacaaattgttcttacttggggttggtggtttttgctcatcatccaaagagtgttcttccggcaaatcaagattctctttcttcatttcagagtcaaagatctcaaatcctttgatggttccacagattttcttgtgagcacgacggtttttagcactaggatgtggatttgaataactccaaccacatttagtacagacatggttcttacctcctcctatataacaagggttcacaaaatcctcagtgtccatattctcaaaaattgatattttttctaacaaagacttttctaaagattaaaaaaaaataaaaaaattcagaaagcgaaaccagtcgtaatctgaagaaacattaatcaaatagaccattacaagacaaaaaggaagaaaccattattgctacaaaagttacacacaaaaaaaaaacacatgaagaaatcattctaactagacccgacaagagattaacacacaagtaaaaaccgaactagacccgataatgtgacgacattggaggaagaaagatgcaaaattgggacttaaagaaggaaaccctaaagacattgataatgattagggaagaacctggagagttgctgcagtggtcctgagaatccatgtgtgtgtgttggggttttttttttaggtttttagagaaggaaggagagaagtagtaacagtttcagtttttggggagttttaatttaaaagcaatgaatgtgagagagagagagattttggaaaacgaagaagcgaagcaaaaagcccactactacaaacaacactcacttaaccaaactaaacgacgatctggtgggtggggcccaatattatattagttagtagatacattcgtatatttgtacggattattatcattggctcattgctaattctcatgaccaacaaaattcctttaatcatatcatttggtgacttttgtttgttaccaactgattgttgttaccattatctcactaaacaaaatccaacaaattaataactgatttttaggattctttctaagatcttgagtaatagatattcggatcccgtgaatggaattataattggggttagagactattaactatcttgcatggaaactctctccgtacttcattcccgtttcagaattgaaatatatggaaactcacaaaaaaaagcgttttttaaattttatgtttgtaaacacgatggaaacgcgataaacattttctgaattttactttggaaacttataattaaaatttagaaatattaagatttacctaattttgagagattcgggttttaagttttcctcccaacgaatcagattttaggtgctttatatatgaattttgatgaaactaataaaaatgattgtctatatatttgatattaagccttttaatctttatttttcagaatttagttaaattatttgatatttatgttttgaatatctatatacgtttccaaaaattttcattccttaatttaaaaaaaaaaattgtttcctgtttcgtttctgtttccgtttccatgtaacataactattaacttcctttttaaattggatatttgattaatatgtttatctttatcttcttcttttttttgggtaaagtgtttatctttatctttgaggtgtttctgtaaatcatgattttaatagattttaaatcaagtcataatatattttaattctttttttttatatgatatgtataaatcacatttcaaagatttaaagtttactattgttactcaattaagattttaaatattttaataaattttgtaaattcaatcatttgaattgattatttatatatatatatataatcaactgttacacatttgtatattaccaaaaaaaacaaaagatatttgatgtcttttgtactgtatgtatgatgtacatatcacaccacctgctgtatccactactcaagccaaaagctatttcaggtcgccgctcacgtggcttgcaagagacctttttagaccttaccggccctagctagctatagccttcaacaacaaaacaaatggaatttttgtggttgaaaacaatcgtcttcctttttttctgtttcttttaattgttcatgaacatttgtttttaccccttgatcaatcaatgatgatcgaccttttataatttgtaccagaaaaggttttaaaaagagagacataatgataaatcactatgattacaaaaggtcgacagtaattactttttaaaaattataaaattgacagaaacgtgagatgtcaaatctgtgagattcatttactgaagagagtaaggttaagtttggattgcaatgagatttatacacaaataataatgcttacaagcaaatcatctttaagttttgtcctcttctcatgatgatgatactgttgcctccgacaactttcttggtccagacgcagccagtagctcgtaatcctgtataaccagtaaattctgactttagcaatttctctacataaccggaacagtataatagtgagacaaaatcaggtaaaccgaccggttattggcgatatattccaacaagaaacagagaacaaggttactggttaactatttgaatggcaagcttgtgtttacctgaacaatagactgagagcagaatttgccagagaggacagcgccttccatggaagctaagtacttctgttttgtgtaatctccagctaagtagaatccttcaataggtgatctttgtagaggacgacatggttcacagtttgggatggtcttgtacacagatctgatcatgcaacaatagagaaagatgttgaatttatcaatgtaaagcctggtccctcatttgaagctaaataaatggtacaacttcactaaccttggagtcttaacgacatggtacttcagaattttagctttgctttggtcagctgagatttcatcagggaagagtttctcaagttctttcattgttgcatctatgatgtcagaatcagtccgtgatatccattcctctgctggtgcaaatactagctccagcattgaccggttaggatcgtaatattcctacagtttatcatagaaagaaaacgctttgttgaatcagattcggaatcaagataagccatcaaaaattatgagaagatccacagagcaccaatttatgatagataaacaagtggaggaacacgtttagaaaaacaagccgcgttcttaccttacaagttaaggacatgtcggcatacacgctcagaaggttacttctgcaaaaaacaacaaaacaagattgttgaatatacaacaaatgtttaaccaagaacaagccttaactgttgctgattcaagacaaaacacttgtattctttttttccaacactgtatccaactaagtattctataagacataattcctcaaaactgcataaataagaaattcacctgctaaagagtaggtgatcatatgtgttcttcagttttcgatcaaacctgcaatattagttcacagcagttaagacctgcatgtaatctcgattctcacataatggccaaaagaaaacaagggagataacggtttcactaaccatatatgaacattaataactggtactccaactaatttatccaatttcttgaagtacggtatttctttccagggatctggtaaaaggagcttcaggatatcgactacaagaaaaacataaacaacatattaataagcaggataccagatgaattgttaaacccacaagacagcatggtagtaaacctggagcggcaaacacataagcgtctccttcgacagtgcttccattagtgagtaagaaactcttaaccgtgccatcgtcattgagctcaattttctttatcctagaattaagttgcacttccccacctagtgatcgaatatgatccactactggcatacaaagcctttccggaggattaccatccaagaatgccatcttggaaccatgtttttcctgtcaatgtagttcatattagtttgcatttgcaaattcacaatatcctaaccatctgttgcagcttatgacacacaataagtttcaaaatgagaaacatctgattattgggatgaggtagtacaagttaatcaacatcaaactcaagtattgtttgggtaaaaaaattctattatagttttcatgtcgaccatgtgaatggtaactatgattgccagtgagataaagattcacaaaaagacaggcaaaaggaagaacaaagagaaataaagggctagagtgtcaaacctgaagaaaccggttcaaagctatcaaaatgcattgcattgacagttcatcagggtttataaagtttagcgcctttgacatggcaataaacacctcgtcggtcacgcgctcaggtactccctggacaagtatacaattaatcagaatgtattattatctgctgagtgaaagcacatgcacgacaatgaaaccacaacaaccacatggactagaaaagtcagagctatccataagaaagctgacaaatcaacactacatgattcagcatgctaactactctaccaagttaagctcatcaacatgcttacgagaatctcacagaaactgtgaactcaatagcctacttgcctgcttttccatccattctttgactgataaaccatcttgggcctcaacataagcctgaccgccgaccatggctggcaaaagtccaatagcaaactttattttctctggccatgtcagcatctcgttgttccgcaaaatagcccaaatacctacaacgtaaatccaacagcaacaactttaattatttgccagaaacaaattaattcaaccacagaacatttcagcgctaatgctacaacggagttcagttatatcgtcttgccttgaccagtaacaatattttacagtttgattacccatcctaaagtatggggaagctcaaaatctagaatttcttactttggaaagacaaatgaccatgttcttcctgacgtctaaattagatggagatacttcatatcctcaaacattcatcagttctttgattactattaaatgtcaaaatctataattagcttgaattgatcaatacaaataaatacatgcatcatagttactaacctcacttttttactcaattacatcatactttgttttacattcaacaagtgtgtgcacattaatccaattttatcaaaccaaatacatggcgccactaactaatagttcaaccactgttttcatcagatagtttaaaagtttaattacttgaagcagtaatattataacagctgactagcaagtaagaatatgcgataagtttattctctcaccatttaagggtgctggtaggacatctgggaagtcaaatctactaaattctccaggtttacttggcatagcaaaaatcatggagtgttccttccactgcaaccgatcattgatcccaagttctccaaataaattctgcacattcggataagcaccgacttccaacaagaacatgaagagagtatcagtaacgaaaagtaataacagggaaaacaagatacaatataatttaaccagtgttttgcaactttcttcaaattgatggtagagctgataagatatatgtaacaaatatattgggggagcaacagagagggtatgagttttggacttacagaaaatatgtaaaccagtctcataccagtccccatcttcatccttccatgcagctatctggaggaagacaaatatcacatcataaatatcgctctccaataagataggtaaattgttaaaacggaacaaacaagaacctaacctaagaaccagagaacacaataacaacttaacaaaatatatatccaaaagatatcttccagtaaactactctatatttgattcacattaagcctagaaactggaaagggttgtgcggtgtgtagcacaagactgaagacattagaacataataaaaaacaaattgggcagtacaagactaatacaacaaacaggacagatacattgggtacctaggagctgtaacactctaaacactagttataccttgtagtctcacaaacataattggtacagcctttgggaatcagcaaatcatataagaatgagaaatgcaaacaacaataagtaattcggaaagtgagaccaatcaaagtacctttccaccaagaacatctcttgcttcaagcaacagaggtttgtggcctgcatcagccaggtactttgcagttgacaatccagccaatcctgcaattatttgagagccaaaagaacttcatcacatgaacattaattccatcagatcccaaacaaagcagtaagaaatgaagttgtagacataccagcaccagcaattacaactttcaaaggcttagcaggacgaggagcactacggaaggatgcagataaactagcagcttccaagaaattgacagtgttctctagctctggccttggaatatccacacaaactacctgcaatttcctctctttaatcaaaattacacttatacactagatgaaatttcgagaactccaagttaaaaaccagaaaggtagatacctgcaaaggaccagcagtactcctcctccttgttcttgtcttaagcgcttgagaagtgggaaccctaaagctatgtcccattagttcacaacctccagatgaaagtgcctccaaaaacccgttttgataaggcaaattcgccgcagaaacattcccaaacacaaccattttctccaacttaactcacaactgcttcaatgaatctaaaaattgaagctataaaagaattagaattacaaaacacacaaaaagtaagaaaattgagtatcttaggtgaaaccggtggaagcaaatcagacaaaagtttgtatctttaacacataattgaaaagaagaagaacaaaaaaaaacggacttgaattaaaggggctatagtagttgtttagtatcttatcttttacctagcgagtaatcgtgaagtagagaaacaggagacgcagcgaaggaggaggctagtggaagtagccgataacaaaatggagtattcgagtgcccatatggtcttgtttggttttcagaccaagctcttttgttgcttacgaaacatgtagatggattaaataccacacaaattaaaattttgatttacgaattgatgaccatatgattcttttccttatttggttaattgagtagagagagaccatgcatctcaacgtaatttggtttaggggaaaaagaaattgacctctcagctaatatgtttttgcccaccaaagtaactacgacaaaataaaaataaataattttggtggagttggtgtcaaatagatatgaattctgtgttatcttattcgttataatcatgatcttccttctcgtgattcccaagtataccctaacccaccttatatttaacggagccatccgaatccgatcgaaactttgtggaatacacacatttgtacaaccagtggcttgtttattcggtgagagagtggtgatatctcaagttctgttatatgctccaacgcatcaacttctgttcccattgcatttcctccaaatctcttctcgggtcggttcggtttggatatccgattccgcttagtttgcccacataatttagcccaggaattgggtccattgtctgatgacgaagtatgttttagaatctaaaactagtggacttaaacaaagcccaatcataataagttgtgtaacaaattttaaatataaaaaccaaatactcctcctccttgcattttctcttttttgacttttcctttgctttgacttgtcagtcttctcttccccttttctcttcttttttttttttgatcaaacaaatcaatctcacacctcttcttcttcttcttcttcttcttcttcttcaacctcttaaatctcaaaatctcaatcatcaagcttctccttcttcttcttctttccatcttcgcttcaacaacaatgtctaatttcacttatacatctgctttcaacttatccgacaactccccttttaatcccgccattggttcttcgtcttcttcttcctccgcgctcgtcgtagcttccgatgatgataataataccgatgatgcttgtagcatctgtctcgagcctttcaccctccaggatccttccactgtcagattcttttaatcctctctctttttgtttttgtctataagctcttcggggtttaacgatctccttctcgcttttatttcgcttttacttgaaatctgggataatcggattttgtgccttgcgatattttgactcagattaataacgagatcgtttgattaactcgatcacttgttcttgaaccatcgttgaacatgtttgattgatcctctcgctttctcattttggtcctattggatctaacataaacatcttctattgttgtttcttctccgatatctaaagctttccgatggttttctcaggtcaccagctgcaaacatgaatatcaccttcagtgcatcattgaatggtacttgcaaacatgaatctgtgatcttttttatctttctttggacttgaatcttctcttcatatctctatcactgattgatttgtcattggggtttattattacacaggtcacagagaagcaaagagtgtcctatttgctggcaattgtttgttttgagagaccctgctaggtactctcatccatctttaaggagaaagaaagattttgttctcatgatactttgctcatagttaggtcttgatagtattattggttcctttgttttgtagccaagagcttttagctgctgtggaaaaggaaagacttttgaaaaccaggaatatatcttcatcctctccaatctctattcatcactctcatgacgattttcactctgaggaggttcgacaaagtctccagtgtgatttattaaaatttaggagttttaagttatagtagttgacttgataatgtttccaggaggaatcacagtttagcagctttgatgaacaattcttgaggcatcttactgaagctgcacatagacgttgtttgcttcgcagaagggatggtcaaatatcctctagtcttgtttcgtccagcgatcccactacgattcatcctactgatttggtcaatctttatcgtctctctgctatttcccatgttgaacatcaaaactcaaacccttgtccaagtcctggctcaatgactccatctcccgtctctggtcattcttccattcctgcagatagcaataacggatccaggtattgacatacacataatcaagtctggtttattgataacgagctttcatgatttattcgctttccatttgcttgtgctgtctctataaccagctttcatgatttgtatggtttccatttgcttgagctgcacaatgcagatgctcttatacttcctgtttcgcttagttactgggattatcgtctactgataaataatttagatggctctggaattctagaccatgtctctttattatgcagctacttcttggagaattggtcaagcctttaaattgtttagaacttacctaaaccatatgtaatatatcttcatcttttcttgtatctgtcatcagaatctctcctggcccttctccatctcgttcatctcaaagtccaaaatcacctgaagcatcctcgcttccggaagccattaaatcgaaactagctgctgcttctgcaaagtatggctatctcaattcctcttcatttgttcagaaattggttataaaaactgactgggacatacatgcatgcctccaggtacaaggaatcgatctctaaaagtaaacaaggtcttaaagagaagctacttgctcgcaataactcagtgaaagaattgagcaaaggagtgcaacgtgagatgaatgcaggaatagctggtgttgcacgaatgatcgaacgcatggatttttcttcaaaacgttttggagggtctgctcatgtatcaacctccactgctactgcttctggattcaatttctcattcaaagggaaacgtgtagaagccaattctaagtctaacaacaatggagacaaaaccgaaccccaaaagctgcaggtttcagacttctcccggtttcttgtcttctaacatttgtatctttaaaacataaagctttttatgggttttgctaatgagaatcgttgaattcatctcagggaggagaaacgtgctgaggcaatcagaaaaatggagagaggcctttaatgcaagcgatgtacgtttccattgaatcaacttacccgttggtcttcgcatcctgcattgttcagagctcacggtctcgtctctcgtctctctgttacctttgcgatgcgtacttttagatggctaaaataagcaactgagtaataattttattactcgattttgacggagccaaaactataatatttattaatttcaaaggataatgttttatgttttttcactaagaattggatcagtcctaatcaatattgcactatgaatctatttatagacaagtccataaataaaataggaattttgaagataaaaacctaatttatatatgacataaaatacctgaatactggcagaggaaggctttcaacagctctataaaaactcaagtcatacaaagttttgagacataagattagatggtgaagagcaaaaacaaataagaaggccaagccaaagtacacaaaacgttgcaaacataacacgattgtaccaaaacaagaagacaatgacgggagaaccttctttatgcattagggggtgtggcttcttcagcacgtcacagacgaagaacctctgttctaagtgctacaacgatttcttaaaggacgagtctgccagatacttggccactttcaacgtcaacacgaaagccgctgaagaggtcacggcgcaagaggcgacggtactcggtagtaaaggcggttgtggtgaagaagaaggataagattataagaagagtagtagtagatgcaaagcgtgcaagaagaaggtggggttgctagggtttcactgtagatgtggccacttattcttcgcgtctcaccgttacccggaagagcattcatgtccatcggattataaatctgccgccattgacgtcttagcaaaacaaaaccctgtcgtcaagggtgataagctcttcagactttagtcaacccttcgatgcttgtgtttttttcttaacttttttttctctgccattggtattaaataaaataatttagttcttataacttaattacattgtgttcgattagtgagaacgacaaattgttagtttgaaactagaatatttatttttctagtgattactcgttcgaaatattcgttaaaacttgacgttgagcgaacatatctataaaacaaacaagatttagtcgattgttgctgattgtccatgggaaatttgtttgagtaatggaagcattaaggccaaagagttgttcatccacgccctccactttccactaatcttccgggttgtgtccagagaaacttcagggttctcagcttctggattcttacacataatgaagttcatggaccttgttgacccgatcctagtgcatggattcagtgctgaaatttagataaagcaatgacgttaatgtagaagtagaattatgattaagtagacctaggcaccttttttttagatgaaatatttttgcaaacgtttatctctttttataacaaaaaattgtaatcatcatttgttctaaatgcaaatgacagactcaaagaaaaaaccacacgattgtgtctcacgttgatttggagagtatggagagtaaagtaggaaagaagaggtgaaatgagaagagaaaataggaagtcttccttggcgagcatagcatctcagggtaatatctataacatttgtgactgtttcatcttccttgacaacaaaacgaataggtccactactccctaccactttgatgcttacaagcaacctattttccgtcaaatttggtatcttcttcttcatcatcaatctcgatttctcgacttttttcacccgaattatatccatctttgcttttttgtttagttttggtgtgtgatgattagttcaatcccctttttaaacttattacacaagctgtataatttagtggtgcttattaggttaagtggagagtattagcagccagtggattgttaatgtgggtttaaaggataaactatttctttcttgttttataagttcccaacacggaatctgatgattggtgtctacgttatttatttttttacttccagccatctcaatctcaacgttcttgcaagattacaaagagagagtatcgtgagaatcttgaaacagtaacattcactatcacttttttctatggattcttacataacactctcctaaccgccggtgatgaccaatactttctctcttgatcatgtgcctttagccgccttttatggtcccccaaaagcctttggaactgatttttaaaattgatttaccaaagctttaaaggacaacaaagtgcttagtgggttcctactaagtctgctagttctggtacaatcttttcccccaaaaacttgcaaatgagaaatatatatggtttgataatgtcaaggatctaataagcatatacaaaagaatatattcggattttttgaaaaataagttgaaagaattgtagattatatcgacatgtattatacatatgtagttaagcagtgaaagagagaaggtgctctaaactgatctaagtttcaaaaccttatttatttttcacatctcaagcaaaaactcaacacccaccttaaataatcagttgtttccttgaggaggaccggtcatggttcccatcagtttatcatccggtttgggagtagaagatgcctttggcgtttttggtcctccctgcaaaaaaaaaaccggctcttatctccacggatctttcaacataaccattcgttctgcaagagagtgtcacttacacttccttttgggccaagtaacctccggcctgaaggtgctctcgctaatgatgaaatggccactgctgctacagttgccacacgaatccttttatgcacgtctatatactcatctgtttcatccacaatctcctcctgcaaaagttcttcaaacacatcttctaatgtgatgataccaattacgtctccatcctcaatctcctctgaagtatgtgagaacccctgtctgccggcctcgctgatgaacgattgtccattagccttgtcgatgcggacaatgacactgtcgtggtttccttctcgctttagtaaaagaggtgcagtcaactcggagttgttacttgagacgttgctttcaccgctattttcttcatgcaaagttgaaggatgacctttgcttttccccttaaccttcacaactgcagccatgtgactgctccctttttgaaactcattcagaatatcatacagaggcatattagccggaaccctgttaaatcattaatcacaacaggaacttcatttttcacagagatgcttaaggaaataatatgaaaatatagcaagcataataataatgacaagaccttggaattcggcgtataccaactgcgctgacaagagtccctgtttcagggcgaactgtaaggagactcttcacctagaaaacagaagaatttcctgattagagtttgcataagctaccagagaaacatgcaaatcagaccatcggaaaagggtcaacgactcctaccaagagaagtccaataacattttttggattatcggagtagacaggaacgcggctatgacctcgtgcttgaatcttatccatagcttccctgggagattaattacaagcaaaacagttcaggatacagagtcatacatgttctctgaagatagtaacagaactgaatgtcatgttccgagtttcataatcaaagatacaaataaccatatacattaatctacaataatgaacactgagataacaggaaaatgtttcatcacagtataccagttgagaaccaaactcaccggtccaactttgaatttacatccaaggaaaacgttgattcaattggtgtcatggcttcttgagcggtcttttcagtcaaatcaagtgctccacttataattgtagtctcatcatgtgtaagttcacctccctttccagcagcttcaccgtgaatggacacaagagcttttaactgagctcgcctaaataaagggtcattgtgtcccaacacccaatccaacatctttgcaataggaaaagatatcgggtacgatagaaccattaagatacgaacaagccagaccaaattagctcccactgctagtccatatctagtacatatagcttgaggaataacctgaaaaaaaaacagtgttcaaatctcatgaagcttataaacctagcaagactttaaaggtagaagatcaaagcatacctctccaacgaatagaacgaaagtgacggatagaataatagcaacatactcattgaatatcttatccaagtatataggaagcccctgcaaattttcaacaagtgaagcctcttaagatcctggtttcatcatcacaacacacatcgaacgtccgagagactttgaatgaagataattacctccatagcaagagcattaaacagaagcagagtcactaaaagctgatgctgtttctgaacaaccggaaaaatcgcagctgagaaaaaaaatcaatcaatcgcaagcaaattccacaatcacagcaaaattcacacaaagtcaaatgatcagatacagattcatatcaattcaagcaattccttataatcaattgatcggtgacgaattacgaaagagaaggatcaatttaccagattgtttcttctcttttggagtaccactccgttggagaatctcgagctcaacgagaccgagagacataagccctaaagtgagaccagacataattccggcgaagagaacaaggaaacaagagattccggcgtaagtgatccactcaagcgatccaaacggaatcgcctcgctttgtaaggcgttagattgactgattccggctaacatcctcgccgcaaccaccgcattaatcggatgcatcttcgtcgtctctatatctatctgtttgcaattttccgacgcctttcttagatattttctcgtctaattttgttgttttttatatctctctcatcgacctaatggggtctgggttttgtacaattttgaattcttagcatatacagcaaatatttggttttgttttttaacattggtccccaatatgttttatatttttcaaatccacccctttactttcttttttttctggtggtcctggtgcaggatcttcttgtacggaatggatcttatacaatctgacaaacaccctttagcgaatatcggaattgtatatttcaaatgtgtgattgtgctgtcatctacgagattttttgttttttgttttttaacatggaggggtttgggccttgggccctagttcctcatgacccggaaccggcttgtgctgatatcaaatacatcggcgtaaagcatctcttctatcaatcgagtacattggtctaatatccctgcaataaaaccattagttcagacgaaaaaaaaaaaaaaaacattagttcaacactttccctagggagcacatggactacacttaaaccacatggatctaacgtttgcacttgtaagaaacacatggatccaatctttgcacttaaaccactagtctaatgcatcggttgttgtgcgagtttttttgtacaacctttactattttgagtttgaaatctgcattgtaactcaaggactcgagtttgaaatctgcattgtaacacaatgacgacactaatacaaacaactagattatatgttatattgagtcattcacaacttaatggtgtaagattttgatattgtgatttaaaggaaaaaaaataaagtctaaatttctctcacttatttgttttgtcccaaaaaaaattcttttgggaaacgtccaaattttatttctttgaagtacattattaagcaacttttgcgttaactaggataaattggatctaacgttaatcaaacttaccatcccgttaccatcccgttaaaaaggattaagtttgactaatatttggtctagttcgaccaaatcaaatcattgcaaaaattttgttgtctaataaaaaggaagttaacatgagacacgaaagttgacaaagccatcgatgaattatccttgtctaaaagactttgtcaaaagccaccggtcaccgaatcaccggtgtatcaaagattagcgatggatggagaaacttttgatccattgtttcaaaagtgcaattacaaaatagcggccacaacagtatgtgaccatatagctaactattactactgcattctacgaaaaattgagtgaacaaaaaggaaaaaagaatcaagttacggagtaaattacaaattgtaggtattttgtataatacaaggaaacaaagcatcttcaaaaatcgggttgaaccattgcttctgctgactttttatatttttatatatatataatttatgtgatggatcaaagtatacagaagaacctggatcttataatttattctttgttttctttctttataccgcaacagagtttttgcctccttaagcaagaacacaacatcagttgtttcttcgaatcggctcggtaatagttccaagcattttatcttgttcctgaccaggaactttattcgtctgcccttgcttattttgtcctccctgcaaatacaagtttcaacaattctaactttctctcttgcataaacaacaaagaaacaaaagagtgttaactcacagttcccttttgcgcaagcaacttccggcttgaaggagctctcgctattgatgaagcagccgctgctgctgctactcgaatcctgcaaacgcggaaattctcagtgatgatatgacaaggtgatatgtgatgccatagagagtatttagccgaaccttttatgtacgtcaacatattcatcagtttcatccacaatctcttcttgcaaaagttcttcaaagacatcttctaaagtgatgataccaattacctcaccatcctcgatagcctctgaagtatgtgaaaacccgtgaggtccactctcgttgttttgaaagaaagattgtccattagccttgtcgattgtgacaatgacattgtcatggtttccctctcgttttagtaacaaaggtgcagtcaagtcggagtcattgctttcatcagtgtgttcttcaagcaaagttgaaggtgggactttgcttttccccttaaccttcacaactgcagccatgtgactgcttcccttttgaaactcattcagtatatcatagagaggcatatcagctggaaccctattcaaacattataacatcaataatacgaaacttcattctacataatagtaaagactggaggttaaaatggtaatggcagaaccttggaatccggcgtatacaaactgcgctgacaagggtctctgtttcagggcgaactgtaagaagactcttcacctagaaaacagaacaatttcttgattagagtttgcagaaacatgataagccaccattgaaacatgcaaaataagagtcagcaacattaccaagagaagtccgataacgtttttcggattcccagagtagacaggaacgcggctatggcctcgtgccagaatcttccccatagcttccctaagagattaattacacagacagcagtataagatacatgtcagaaaatagttgccgaaacaactgccatgcaggacttttcagaatcattgagacaacagataaaatattttataccactgacagttgagaactaaactcaccaatccaattttgaatttacatccaaggagaaggtagactcaattggtgtcatggcttcttgtgcagtctgtcaaaccaaataccacttttgcataaataactttcaccatatttctacacagatcaagccatggttcaggaattctagaaagtcaagcacacaccttctcagtcaaatcaagagctccactaatgattgtcgtctcatcatgtgtaagctcacctcccttaccagcctaaaaccattgtcagagcaacaaggtaaccaaattagtaatctaaatttccaaaaggttgtgacttgtgaggaagtaaacaaagtagttaacaatttcaaagtctctaagaatacctcttggctgtgaatggatacaagagctttcaactgagcccgcctaaataaagcatcattgtgtcccagcaccaaatctaaaatctaaccaaaagcatacaaaaatggtaatttccacttgatcaaccgtcaggcataaacaacacataccagactacattccaaaacattcttgaccaaacacactatatttaccttgccaatgggaaaggcaatcggatagcagagagtcattaaaatgcggacaagccagacaaaattcgctccaaccgcgagtccatacctagtgcatatcgcttgaggaataaccttaaaagacgaaaacaaatgttaaacacagttcaatctttgatatataaccatagagatagactagcaaaactagagacacctcctccaagtccataaaacacatacctcaccgtaagcaagaacgaatgtgacagaaagaataatcgcaacgtattcattgaataacttatccaaatatataggaagcccctgcccaaaattccataaaatcaactaagtatagatctccctcatattaaccatataaccaaacgaccaacagactttgaatgaagataattacctccatagccatagcattacacagaagcagtgtcactaaaagctgatgctgtttctgaacaaccggaaaaatcgcagctgaaacaacatcattcaaaacaatcagaaatcaaattcaatgataaagaatttgattgagaaagaaggaatcaaaaatcatcaccggcttgtttcttctcattaggagtaccactacgttgaagaatctcaagctcgacaagaccaagagacataagtcccaaagtaagaccagacataatcccggcgaagagtacgaggaaacaagatattccggcgtaagtgatccactcaaacgatccaaacggaatcgcttctcctccgttattaccgttagattgtccgattccggataaaatcctcgccgccgccaccgcattaatcagatgcatattttcttcttgaaaacagagctttatgattcgatgatgaatctctctgtgtttgtgattctctggtcacacgaccttcttttttaattttgcctctttttgataattttataattcgttggatctcaccaacatgtcggattcagttcagtacaattttccaggacaaaacggcaaaaagttttgtaaggaaattaaatttagaccctaaagttattcattatgataaaaagacccctttgatttttgtttttttcgtgaagctctctattctttacaaccacaaatgttaaaattgtagcgtgtccacagagatttgtgatctcagacaacactctttagaagcaacaaatttatatatatttcttatagaagattattttctatgttttggaatgtgattgttttcaacaaacaaaggttatttctaagaggaaagaaatttcaaaaattgtttttaagagaataatattttgcacctaagaaaaaagaaagagaaacatatctatacaaaaatgagaacttcccaaaaatcagcactctcaaagaggatagttgggtaggcgtgatggataaaagagttgagatgctttcaaatatcttcttgtcaaagaggctacttatatgagggagcgagtgatacgcttttggtggatgctatcgtatctctttataagtttaaatggttgcggcggttgaagtagaaaaacttaaatggttacggcggttgaggtggaaaaactagtttggagattataccactttttatttaacattgataaattaaagtttgtattagtatggattaaaaaaaatagaagaaagttgttgcggaccacttcaaacataaaaataaaattggtttagggcacattattgtccatccaaaattagtctagtccgatttcgccacaacatacattcaaaacttatatgtgcgaacgatgtaattttttttattattttgttaaggttgttttgtactttataatgaagttctttgaacatttgaaaaaaagaaactatttatattgataaaataaatagaaccatatccactgaaatctaaatcgtctgaaaatataatgaactatatattgatgatttctctgatacttaaaatttaaaatcattggtcctccatacaaatcattgggccaaacaagtcgcttgtctttttcatgtttcataagattcttagtcaaattagctcaaaactccatagttaacttaaatctttctaacccctaacatgaaacagaaataagtttaatttagtctacatgttcaattttgaatggtgctaaaatccgtaaactagtgactattcaagccgtattgtgtggtcttgtctgctataaaattgatattttgctctaaaacagaatgtgaaggagtacactaacgtgagttagcaattgactattcgcatcaaaaatgaaagatttctgatgcattttgcgatttcgaggccaagatatatcttaatttatcgaaccactaaagtgatttagaagagtgatgtgtgttgatctaatcgcatatttgaacatgatattcgaaacacaaaagaatatatataatactagaaaggtacttgttttcttcacaatgcactacgatggaataaagaaggaactaagtcaacaccaaatttgataaaactcaaacccctatttttggttacaggttaacctaaaccttgaaagcttcattcccaagtaaccgagatcagcgaattagcaagcccagattggtcgaacgtggcgtcagcttcacaatctagagtctttgaagcaccgggaatcgcctgcaccagcttgaatgcctttttctcagattcatcaatgtgagaataacagaatgaccaaagaagctgaatcggttcgctcttgagaaacttcctctgctttcttctcccatctggaaatcgaacgcagagactacacacaacgcttcgatcacagtctccttttggctcttctgtcaaaaccgggaacactaaacatatctcctcctcctttacttcatccggatcttcatattcgtcccccataaaaggaggcacgaagtcatcagtgtcactgcgtgacgaccaaatctcccactcgtcttgttcttcaagttctttctcccaagtaggagccacgacttgattattgttgcttcttgacgaccaattatcctcctcttcaaactcttcaccccaggaaggagcaggggtttcatagaagttgtagcttgacaaacaagtctccgcagtttccgtgcgcctgttccttgtcagagaagcaatgttttcgtgaggaccagcgtcccaaaacatcatcaaatcctcgacaatactctcagcttcaatcacgccgctccacatatgcatcttctggccagtgatgggattgattacaaacaccacaggaggaggagcttcgatcttgtagaaactagagattttctgaccttcgtttgtatcatcatagacctgccatacgatgaagtgggactcaatggttctcgaaaccgcgtcgttcgcccatacatctcgattaagtatatgagaacctaactctgtcctggactggagattcactaccaaccatagattcttttcaatggaaacatatttcgcatattcaaacaaaccctcgtgaagtatatatgaaggaggaggaaacgagaaagacgatctcgagtctgaatcatcagaagttcctgatgtcgtcgagtccacaacctcccgatacatcgcgttgttggtgagaaagaggtttacggcttgatcaatattccaatctgtcgtctgtaacaatatcttgcggtttcggcggtctgatcgacagcgatctcgaggaaagacgagattagttgatcttgacgaaagagaacaatctcttcgtcaagctgtagccttgttgttatcgctctctgtcggttattcgctgagaaaaagtgccccattgttgctttgttctgagagaaaacaaacaagtacttgggaaaagaggaatggaagaagagatatagaaaagttttatttatatagagagatcgagagagaaagataagtttgtttttaggtttgttttccttttttctgctccgactttgttttaaaggaaaaataaattatcttttcgtctttaaattgtgtatagatatttccaacttttttcgggatatacacaatctttcatatttacttttaattatgattaacttaggtgggattatttatttattaaagtgttttctagaagaaaaaaatcttcttaaaagattttatgagaaagaaagactagaaaaataaatacaacaattattttgaatgacatatatccatacctttttataattaaattacttctattgtttattaatatcattctatgtaatatttttaacattaaataggttttaaatatacttctcaaataagatatgtgcaaattaaagttttttttagtgtttgagtaaaaaaaaaaaatagataattttgattaccttaaatcggcgaccaccagagacatgattttgtgctcaactgatcaaatcggcgagcaccaaaagaatgattctctgagataagcatgtgaatttggagctaaataccagattatttatttattaaattgttttctataagaaaataatcttttaagagattttatgagaaagaaagactagaaaaatacatacaacaattattttgaatgacatctatatatacatttttataattaaattacttatgttgtttattaatatcattctatgtaatatttttaaaattagatatgtttaaatatacttcccaaataagagatgtgcaaattaaagttttttctaatgtttgagtaaaaaaaaaaagagaggtaattttgattacctcaaatcggtgaccaccagagacatgattctgtgatcactgatcaaatcggcgagcaccagaggtatgattctctgagataagcatgtgaatctggagctaaactcctctgttttatacggttaatacgattttatatggttcgaacaaattggacccggtttaatacggttaagagttaaaaccttgacttttacatttaactattaagtttcagtgcaagacactaatgtgtagatggttaccttcctccatgaggatgctccactgggttcatcatagccacaccacgaaccttagcccacatgtttctctttatcatcagcttcttagttaggccactactagcaatttgaccaatcataaccctgcatccacttaggacagtcttctttgaatccagtggcaagttaatgctgtccaaacatatattcaattcatcattgtgaacttaagaaaccaatgttatgaatcttattgtacctgaatcttatgaagttatgataaataggtttatgttaagatatattggtaatgcgatttgtgattatgttgtaatcttcaaatattcggatcagcagttttcaacagttatggttggagagttttagttgcagaatataacttcttcactgtgttagctctatattagtaaaagaacagtaaagcggataagtgatctgtgttgtaagaattgtatatttgaacttaatactccaattgacaaacaaaacaaaagtagtctagaattaatctccagaatttaagggtttcttcaatataacttcaagataatataaagaagcaacaacatatcgaaatcttcactcccaagtaactgaaatcatcgaattagcgatcccagattgaacaaacgtggccttagctccataatccagagtcttggaagcaccaggaatcgcctgcacaagcttgaactcctttttctcggattcctccatgtgagaataacagaaagaccagagaagctgaatcggttcgctcttgagaaacttcctctgctttcttctcccatctggaaatcgaacacaaatactgcacacaacgcttctatcacagtctgctttaggctcttctgtcaaaaccggaaactcaagcaggtcgcatgacaaacaagtttcctcctcatgttcggataaagtcattatgtcttcaaattctggcccccaagaaggagccacaacgcgatcagacgtaaaagtctcctcctttccagatttgattacagtcttttcttcttcaatagcgtttccccagaaagtagccatgtcttgatcatcagcgttgttacttgaacaggagatcttctctgttttcatacgtttgttgcttgtcagagatgcaacgtgttcgtgaggaccagaatccatgtacttcatcaaatcctcgagaaagccctgaggttcaatcacaccgctccacatacgcatcttctggccagtgatgggatcgatgagaagcaccacaggaggaacagagtcgatcttgtagaaagtagatattttctgaccttcgctggtatcatcatagacctacaacaagatgaagctggacttgatggcttgaaaaacagcgtcgtgtggccataaatctcggttaagtaagtgagaagcaaactcggtcgtggactggaggttaacaagcaaccatagatcctctctagaggacgttgctttcgcatcttcaaacgaaccgtggaaaaacagacttggaggaggacggtacaaagaagacaacctagaatcggattcctcagatgtcgactcgtcgtcccagatctcttcaggacatactgcgaccgaagtgttgtgagacatgaaaggatcgtagtcgtagagagtattcttcttcgaaggtaaaggaagagggactagttcttctccatggtgatgatgagggtttctccgagcgatgagaaagaggttgatcgcatcttcaaggttccaggttgttgcctcaaggaactgtgttgcgatttccacagtttggttaacggtgatatcgaggaaagatgagatcagttttctctgttggtgagtcctcgttgcagtctccattgtttcctgtgtgtaagagagcgagagaaacaaggaatttgtgggaaccctaaattacgaatggaagtgtttgtgttttacctttgcttctatttgtttagtatttatagagaggactcctcagatttgtgtttccttttcctactccaattttgttcaacgcagaggcccacgaaaaaaaaggaaactccttttcgctttttgtttttgtgatatatttccattttttgggattttgtacattgtttgggccttttgggtttacttttatattctttttggtgattaaaaaagggtaaaaaaacaaggacttcacaaacactaggttttactgattggtggttacacaaaacactgctttttttccgaatcaaactctgcttttgcttctctgcaaacgaaacaaagaaagtgaattggggacacaagcgaatttacaaattcatatgctaattatcgaggctcagttttttttttttaataattcccaacctatgctcatcaattccacaaagaaacaccttttaggctcttgtaggcctgtatcgttgtctccttccgtaccaaaatattcgagtttgagcttgtggtatttgtcctggtttatacctttggatgagagagaccctaagttttcatgagtcatgcaattcagtgtattgttctgatatatacttcacatcagagaggtttctcgatcggtttcactccatatagtataccacacacattaggaggactgtatgaaaatttaaaggttaccatattttatggaatcgaagaaaaaacgtatactgaaaaagaaacataggatttcactaatagcatgagaaagcaaacacacggcaagagcaaggttaattaattaggagctagtagtgaggaattggaggaggccagtaagggaagtccaagtttcttattgaaacttcgtcttctgtgtagaaggtagtgcaaattttggtggtgagatcgtaaacaccaaagttatcgccaactttagttttagtgtttactttatcaaaaaaaaattctttctcatattatcttgtttttttaaaaaactatcatttgtgattatattgtcatttttttttctcaaatctttcttttgcatttggcttagaattttttttgacccccatgattaactattctgcctccgccactgagtttaaagactcggctgattatcagatgtgccattgctgaaaccctaaattttttgtgtgtttcgtgtcccgaatctgtatgttagacttaatactgagaatatacgtgctcaccaagtacaagataacaatgaacatacaatatttagagaatatttagaatttatcacacaaggcacataaattgctctttatcatcgaaaaaataaataaatccgattcttgttttatttttcaggaagtaaaaataacggattttgttgttgttcaatatttgttccgaaataaaatctattgtcatatgttatattgttttattcataaaatctaaaatcattcctaaaatcacggcatacttattaacagtggcaaagctagaactttctgttatggggtctaaaatatatttttttaatataaaatcatacattaaaaaaaaatatttttatttttgtgttttgtaaaaattaaaataatattaggttaatatttttttatttaaggtaaattatgggtctaaacttttagtaaaaatacaactttcaaatatttgtactattttttctttcatattgcaacaataattttgtactggggtcaaaatttatcctaagttggggtcattaaaattattgctaatgacagataatgaatttttgaaaatttatgagggtcaactgacctccttgtcaaacctctgcatcggccactgcttattatccgggcatacttattttttttggttatagtaagtgatgttaaatatttctgtcaaaaataaaataatatatatatgtatttgtcaattgtaaataaccaatgttaagattaatatcagttttaataaatgatttaaatgatttgtatcatttacaataatagctataataattgttgtatcatattacaatatatgttttcataaagaattgtgttattttcaacaatcaataattataaataaaataatataaaatcttaaatttcatagaagaaaacacgattacatggttcaaacgtcaaaaacaaaccccaaaaccataattttatgtacatcaatctctaccaagccttgaatctcatgctgaaagccctttggatctttttcatcaacatgaatcacacagagacgataggcctataatcttgctcacgatgccgctcaactcctttacgatagatctaggcctaaaaatatgcttcaattgtactttaagcgtttaactttctcacgatctctctacagcaccttgacaatgaagacaagagctatagaaaatggaaccattgtgaccttagcctgaagattctacactacgtcactaccgttggcattttttttttttttttttcgatgccttctccgatcatcttaatcaggggagagaccgagagaccgagagaaccgagaactggcgacttggacttcttcactggttacacgaatgtagacatatacgatttggttcggtttaacgtcggctccaatttcgttcaacgaaataaaaaaaaagaacctccttttcgggtttttgttttgtttgctatatttccattttttttgggatttactctttgcttttaatgtactgtagtataacacgattacattaaagaacatattgagatctatctttatagatctaagttggaaaacaaagaattcacaaacactagattacaaaacacttgttttttagttttttcctaatcaaattaaaagttaaaaccactgcttttggttataggctttcaataatctttctcttgcacccgtatgcagtggcaaattcggaaaagacaaaagaaaaaaaaaatctaagaataacatattgaaagaggcacataggatttcaatgatagcatgggaaagcaaatacacgtgcaagagccatgttaattaagtaggaactagtagataggggttggcggaggccagtaagggaaactaacgttctttagtggccttacactagtgtaaaaggtagagcaagtttcggtggtgagatcataaacaccaaagttattgccaacaaaatagatgcagttaggctcgagtccacacgacgtactagccgggatgcagaaagcctcactatgtccaagaaaaatgcaaagatctccaatgtgttctgtgtagatcatagtcttcttcttttcgtcagaagcctcatttgctctaaacaccatgaacttttttgttacgtgcatgggtgtattgtcgcaaaggtcctccacgtcctccacgaacctgcaaagacatgatagaaccaatacgattctcaagccaaaaaaccaccaacgaaatgaagatatattgtaaatatgttatgagagatgtctagttaattagatactataccacttgacgaggaaaagttggccggtgggtgactccacaaggtgatctgtcttggaacatgaactcactcccgccaactgcttaaacaccgactctggaagattttcataatccaagtcgatgaagctgggttgcccattctcctgcctagagttgaaatgatcatcaccctccttagagttgagatccaagtagcacaagtagttgcctccgtaacttggaatgtagaacctttgatctctcttggagaacatgaggctagataaagggtttatacactgagacatgaatttcatgttgatccatttagagctgccaaaaggcctgcaaagactaacccgagatcccgataatttgacacccactacccaatctttatcttgaacaggtatagaggacatggctaggttatggattttggtaccggtgggtacagaaggtaaatgaatggtcaagttttctagtttgggattggaggtctcataagtgatcacaggttgatggtcgctgcttctgtacgaaagatagaattttaatccatcacgtaaaaatccgacagtcatcgcctcaatgacctccttctcgagtttcttgtccttaatagtgacttttgttgcctttccctttgaagaatcgtcgtcgtatactattacgcgaccatccgaagaagaattttggatgttagtgatgtattcaatcaataaaaacgggtaggctggttcagacgacaagagttgagtcactttagtctcgtcatccgaatcccacccgcttgtgtgagaagttgtagatgagaacatacgaacaacatttttgtgtctctgccatatatatgttcaagtagtcagagacgatatcaataacaagaagaagttaaagaaaaatgaatttattacttagaagcttaagaggaagtttttgcagacagagggtttaaagactcggctgattataagctgtgccattgttgaacttctttaagtgttttcgtctcttgtataatctgtgtcattattgtacttaatactaataagaatatccttgctcagcaagtacaagacataaatgagaatatttagaaattccataaatagctcgttaaaatcttattataatttttgtttttttctgtggaatttgttgttcaatatttgttcccaaaaattgttttattcataaaatctaaaatcatttcctaaaatcaatgcatacaaattactctatattctacccttttttttttaatttttcgatatgtttttaattgaaacagaaaacttttcatgcaaccacgttcgattttttttttttttctttagcttaatgggcttatgggcttctacgttctagaaatttcctactacacaaaatatctttcgttttatccaaattccaaaacagtaataagattataagaacaataaatatcttatccagtaactaacgaacgtatatcccaattattgtgaacatcaccaccgtcagatcacgcccttatcattcatgaccgtcagatcctcatattttacatcacacgtggccgtgactctttaccggataaccggattgtctcttctttaaaaccgtgcccaagcgactcgtgagtgagactcgctctaagacccagtttgactcgttgatcaacgaaaggtaacgacaaaactctgatttccgatttcattactatgaatcgattcgaatttctgagtttctgactttgtttcagtgtgagtttgaggtgaaagatgacggcgacgatagatcggaggttatcaacgctgaatccaaacgcgccggtgtttgatccggtggaatttcgtgaggtggaggatttttcaccgaaatggtgggatctagtaacgacttcgaaatggttccgtgacttttggctcagtgctaactctgagaatgagttcctcggcggcgacgatttctcagttatggaagaagagttcgaggagatgatcgcatcgtctgatggtggatccatggctgatacagttacaggtaacgatttgtttactgttttgaaattagttgagatttagggattcgaaacattcagatctgaggatttttgtgtgttttaatggcagaagcagatgtggctagttatttgaagatgcttttgaacatagcggagtctacgaaagagaagatttatagatcgaaggtttcgtcttgttcaccaaagtataatcagaagaagtacatgaatccgaactttaattgtcgccggaatcatcatatctatcagccacggtgaagcttctagaaggaacaaagctcttcttcttcttctttcgagatgataatcagagtcgtgtctgtgtttatggctgaatctgatcttttctgctttcttgttttttgtaattctgtgaatattcctactttctataataacatcactttatgttatgagcataaccaaattgaaatcgaaccaggtcgaatcgaaatgtttgggtcggtttaaaatgggattgtatcatttgtctttggaaaccaaatctaacaacaatattgaaaccggtattaaacacaaaccaaaccgaaaatgggtattaaacacaaaccaacccgaatatggttagagttgagctaaaactttaccatgcgcatatgaagataatgatgtcataaaagttggaatccaatttattttggataacctttaatttggttgatcaaacaataattttttttatattaattactatgttatgtaaatcattcaaaggagcacttgattataattttgaaacaactcctttgttttgtcctcattcaaagaaaaaagggattaacaattggtgatattagcgttttacgaaaagaaaaaaaaacatgttaagagcaaatgttgtcgtctctttggttatatttgcagctctcatgcaatgtgtggcagtgtgggtatgttttcttttactctttagtactaatactatattgttatattgttttctgaaattttgtaaatttaacaatcatttttttgggggttaaaagtaggatccgaaaagatgaatggaaaagaaaacattacgccatggatatacagtatgaagcagccggtgtcgtgtaatagagaacattcggaaattggaatatgtctttcaggtattgatgatgatattcaaaacgatggaaaatgctggaaattttgcttgatggttgcgaaaagcggaggttataatgcagacaaataatcatcccagaaattatacaagtctaaaatataacgcatgagacaaaaggattattttgttgtctaaataacagtgcaaatttcatgtttcttcccttcttttctgtatcaaatttttgaaaaatctataacaagaatggatcgcatttttaccacctaaacaaaaaaaaatcgaaaatttcataaaaatataataatcaaaatataccacctaaacgtttgtatgtttaagtctctctttttttttttttttttgggaactgatggttaaatggtaggtctataccaattccaacacatgccaaattaattcgaaaatcaaacaaaaaccaaaccgatctaagttttggtttagagttcaaacaagaatattacgacaacggaatactgtatgtttgatatatttcacaaagagatacagagcattgtttatattgtacaagtagtaggcgtgagcctcaagattatgcaataagtataatttcctaaactagtgaattggaatattgaggaatgaatgagcatctaatcatatctctctagctcgacagaataaaccaaatacgtttatctaaataagtcatgtatatcttgtaataatgtagtcaaggttggaatccaatctttttggaaacatgtttttaatttggttgactaaatatattgtattccttactaatttattatgtaagataatgttaattcgaaggatcccttgaatatagttacaattcttactataaatacgaaacaactcctccttcattctcattgcaatacaaaaatatcaaaagttcttaatattttaattaacaaagaaaaaagagagaatggttagaacaaatgttgtctcttttgttttatttgctgctatagtgctatgtataggtatattttttttagtactaaagctttaacctttttcatgaagttttcatgttgggaaattaatttacatgatattttttctattgaatgtaggatccattcaaatagatggacaaaaacacaccgcaccgtggatacctgaagacaattcgatatgttgtaaagaacatccgagtgttggaagatgtcttccaaacatcgatgatagtgctgagaagggtgggaaatgctggaagttttgtattgaagggtgtgaaacaggaggtttttgcaaactttttggacataaacatatatgtcattgcaattgttccggttaatatgcatcatgcaaaattaataaggctcctacgtacgatacaaggaaaaatttgtttgaaaatataattaataaaggttcaactacattgttcaaaaatgaataacagattgcataaattttatatctcttctcttcttctcacttctcaatatcaacttaaaaaataaaaatcaataatcacattttgaaacatttatacaaatataaatgaataactcgtatgtatgtatatatatacttaaatttctgcatatgtatagtattgttccaattagtgtttaaagacacctggattattctttatataaaatttacgaatttggtaatttatatctattatgtatgtagtactccgtttttttttgttaaccgcacattagttataaaaaaactccattggagatttcttttctacatatgtacaacatggtattttttctacatatgtacaaagcttcaatttaaattgagacggtataatcagataattattccaatatgtaacatgttaactcaagaatacatattttactataagaacagttccattggtagtatcttattaaggtttttaaccctctggagatgttctaaagtttcaaaagattaattaataataattttttcaaaattaaaaaaaagagggaaggggtcattatttaccatttataacttgatcactagccattaggatattgctattgcatgatcaacatttatttagttgcaaatagtgattaattttaaaattgactaaatcatctattgatgacagaacatgggtcacaatcatgtagttgcagattgcaatcgacgtgggtcacaatctttgcagttttatcccaaaacaaaaataagacactctttaatcttcaagttaagacacttaaatgtcgtagactgttacatttactgatcaatcgattatttcagagaacaagaaatggaatatactgatatgattaggattctgtgattggaaggaatgtccagctcaaccatcacaagtaacgatctaatcgatcctaaaacaacgtttaatgctttataaactaccaagaaaaatacaacaatacacgagattaagaaatgttataatgtaattgataactaatgacatcagaataaaatggtgcgtccaagattgtcgttgtttggacgccttttcttcaaaaagtcaatggaacgaaactccagacgtgcatggtgcaacaaaacaatgtcactaacctaataaataaaacaagtttatcgatcaaattaattatctgcgtaaaaccaaaccaaaacatttgtttctctgttgtttgtctcaaactcaaatggttgaccgtcctaccgatgtggtcgtagaagtcggttcttccggcagaactattttccgaccggacgagactccgactccagaacctcggagaccaacacaattgccgccagttcctgcaccggagaaaaaactgaccctttttgccttaagactcgctgttcttgagaaggtttttgagattccaacattctagttcattatttaggagtccttttcttgagttttaaattgtgttcttaaatcttaatcacagattgcttcagggttgggatctttaggtttcgtgtgggccacggttgttcttcttggtggattcgctggaagtttagagataacagatttctggtttgttactgtgattcttgttattgaaggagctaggcttttcagtagaagccacgagcttgaactgcagcatcagtctaagtacacaatctctggaatcaacatcttccggttccttgtcaaacaaattaaccaaatatttcaccaggtggctcacattgccggagacgacaatagaccatcggttcgagaaacgagaaccgtacaaaggaattcgggacacatcacgcggacaaggacatggaaaagctcagatgttcctatgttgccttacacaggatgggtttttgtttcaagaaacgtgagtagaatcttctattggctccagattgcttctgctttcgccagcatttttatctccacgatccaactcatcaaacaagactatggaggcaacgacttgaaacccaaaagcaccaatcttcacgcagctttgactctcttctactctctagccctagccgaggctcttctgttccttgttgagaaagcttactgggaatatatgattagtgttatccacattcttgagaaagtgaatgaagaatgcggtcttgagagatttggtacgggatcggtgagaagattcttctatgatgcctactcaagatgcctcaacgggagcatcttcgacggattgaagatggatatggtgatctttgccatggagctcttggtagcgaattctcttgatgagcagctcattggagcagagattctttcgatattctcaacccacgacgactattcggttgatactttgcagaagattgggacaaatcttgcaatcatagaaaggttagtggagatgttgaattggagagacaaaaatcaagaagatgtgagaatgtcagctgcagagattctctcaagattagctagtaagaagcagaactctctgagagttgcggggatcccgggagcgattgagtcgatatcttctcttttagagagcacgagagattcaggtgaagccactgatgagattggagaacagagtataaaccattcaaatttatggacattgaacaatcttggactgctgattctgaaaaggctagctcgagatcatgagaactgtggaaaaattgggaaaacaaaagggttactttcaaagatcattgacttcacttatgctgagaagaatttgttggaaaatccaaatgttgctgttgcagagccttataagatcttggctgtgaaacggtctttgaagctgttaaagaagctggtgagcacgacaggcacaacagggaagaacttgaggatgactatctctgggattgtcttcacagtgagcaacattagggaaacattacatcatggaaagagtcagcctcatttgcagaagcttggtgcagagattttgactttccttgcgtttgaagaaggtgcaaccgagaaaatcggaggcacgggcggggttttgaaagggcttctctgcatattcttgaacaatgagattccaaaggacaaaagtggtgtgagagtctctgctggtgaatctgttgctatgctagctcaaggaagtaaaagcaattgccaaaagatattgagagcaaatgttcttaagggactcgttgaagcgttggacaacccgttgattcggttgaatgcagcgaggatcttgcgtaatctctgtgcatatacagctcctggtcagttcaatgaacagatgaaggaagttattaaatctgcaggagcaacagtaagtcctttcatatgttcttgattcatacgaaattgataagaatcatgaatcactagttatcttctccatgcaggttcttaaggcaataaagtctgaagagaggaaacctcaagaagttatggtgggattagcaccacatattctcaagttaatgaatactcccgaagaattgagagggatgttcgaggaagccggagtaaccgaggaagaactagccaaggcattaatcaatatcctcaagagatatgaacagccagttccaaaggttccaagaatcaggaggtttgcaatagagctaaccattgcgatgatgaaagctaacgttgagactgtcaagaccttccaaaaccttgagatgaagaatgaattagagaccgtctttgagaccgcggctgagcttgagaactttgatatattttctggcacggtcggtttggcacgccatggttcaactatcaatgaactcattgaagaagcaatgctgttgttgaggtagacaaaagttctcatatgtaacaattttaaagacattgactgtctcaaccccaaattgtattgaactaattgtctttgctcaacaagtttatcaaatggactattttctcttcttcttcttccacagtattttctctgcttcacacctacaagtcctgaaaattcttaacaaagacaaacatgatcaaaacacatgtaagatgattgcattatacgttcataagaatgggattaattaatggtatatgtgtaagatgatctcattacatgttcataacaagaggataaaaagacatggaaggaacaaaagatgatttcttctcttgacagagatttttgccaaaacacaacatatatgcatatgaataaactcatataaaccataaccagaagagaacttgtcatgacaaacctttaaacattttaactttccattctattttgcacaaacaaaaacacataacttaatggaattatctacttttgaagaaattaagatcccatcggcgtaataacccctctaaaacgtttcctgatgtgctactacgtccaaccacagtcactgttgcctttgtacgtgctgacaaatcaatgacatcatttttgttttgactcgttttaggcgaagcacccaggaacaaaaccatttacaggtcccggcagagaatctgatgttttagatggaacactggctacagaagataatcgtgcatcatggttacatggtgttggaccagaagcagaatctgtatcagaaagtgccagttctggttctgtagtagaagcagcagcattaccttcactggtctctgtattggtcctggaaggttcttttttctgatgagtttgttcaacctccatgtccttcagcgatttcatcaccgcttccatcagcatctgaggccaagaagatatgtgaataaacgaatttatagagcttggtcataaggagagttcaaagtgcaaaatccactttttttactctcaccctctcttcttcctctgcatttgatggaaaatctgccagctcatctacgtgaaactccacatattgatcatcatctaaagctactgcgagatgaggaggatatggatctccattcgacaaatcaaaactgatcatatcagaagatgaactactggagacttcaagactctctttttcctgaaataagtccatatcatgcaacatcaggaacaatctacccatctctacatttttgtttctcagacagtattttacatgtacagaagttggtcaccctgccactagcgtcactacaaatgtttactgaatatacatcatataatatatacataaatcagatagcttagtcaatgaccattgaccatgcccataccataaacaaagtaatgcaaaaattaaagagatgctgagtttatgtaccttggtttctgatgacgattgattagatgggtcgttggaaggaacctgagagaagtaacaaaaaaccatcaatagggagatataaaaaccatatacagtaccacatacacctgttggtagtttctttgaagaaccaagtgaagcaaactcttttagtttggtatctatgcaagaacagttacggtttcatgattcaaattttggaattaatcggatgtgaatttctaatttttggcacttgatgcgtttcgaaattaaaagctataattataaacattagggagacaactgattattccacatttcaagggaatcagcgttagagaaaattatacttcaaaaatgtgtattaaaaacttgcagagcatagtcacagaccaccaacctctgtgcgactcataggtctttttaagcggacttcatttatagcatcagaggtgctacctggagctaaacctgaaaccaattagaagagatgttgcctaagggtacaacaaaacttggaataaacatagaagaagttgaatgacgtacttttctgtgctgaggatgggggagaacttagttgttgcatggtgctccaactgccctgaacataaaacagttaacatcattgacctttcttgctaaagaacccccaaaaaaaaactaaatatgcatactgcaagattcattaccttagcaaagtagtcatccaccgggtcaaaaaatgttggcccaaccacctctggaggttgaagaacgttatggaaaaagatgtttattgaatcaaagtagaattgtggccgtggtgaattgtggtctccatcgaatttgatgatatttttgtctccctggcataatcaaaagccagaggtttaaaggctacatggtcaagggttcatcaagaacttatgagaagctagaggaagaaaagtataatatggaaaacttactatgtatgcttcatatatacgctctgagtgatgaggctgaataaagtcatcatctacggcatgtccaaataaaacaggaacaaaacaagatttcgctacctgcagaatgaacgatataaattgaaaaaaaaaacgagaaacaaaacatcacttaatataaaaacacaacaaaatctctactaccaattgactttgatacaattacacattaagaacaatcatgaatgccaaataatgagggaaaataagtaaatgatcaccaaaaacaatgatgatgttgccttccagtgaatagattagttaatcatctaagtaatcaactagactaaaagtaaaaactaacagaggaaacgaccttaatggtgttgagatccgttatgttaaaattggctttcttctgaacagctctccgcatatattgtattgcaaattttatctgaaagagattgaaagagcttaaagtcgtataatagattcaatgtggaaaccttgtagtatgaagaacaaatcccacaagaaacagacactacaaatttacttttacttacagtaaacttcggtagtcggaacttatacgtatctacaagctccatcatcaaatcaaccaaatcagagaatgggctgtctagaaccatcgctgcgatagagggatcctctgctccgtacatcaagctggaaaagaagtgttgcaacgaaatgatttcatagttcagcagaaagagagaatgattgtagcaatcaaattttaagttgcagtggttgacgtttgccatgttgtagatcatttagacacaggagagtcagctaaatagacaacaaacccgaccaaagaatatttcattcggttcttagcaactattctcctctccactggtaaagaaaaaggggctcacaagataagtaaatcctcaattgcttacaaaattcagttctatagtaaacacttccatacagtttcatgcaacactggaaatgaaaacgctcttattaagtagttcaacaaatgaaagacttaaaggaaccttgtgacagcacccattgaacgaccccataagccaatcagggagacattcccatccgtgcgcaaatactcaaccacagccttcagatcatctttctgcaaccaccaacgtcacgtttaacagtaataaaagaagtgactgctctcacaattcaggattatgacttatgaaggcagcgactgtgagggaaggaaaaatcattgacaacctaatcaaggacactcaaaggcacctaagtctaccatgaaatagagcatcaaaaactctaaatcatttggaaatctttcttcagaaagataacaataccttcatagaccaaatgaagcatcataggtgtattggttatagtgggatagaattccaataaaccacgagacattcaatctaacaaatatcaatcgagaagcagatatattgacttaagacagcttgtttactccaaacaacgataagtttaggccataacagctgaagggaagaagaggaatattttgagaaaagatcaaaggaggacatacttcgttccaacccaaagtgacatgctccccgccagagagaccggatcccgaaaagtcaagcgtgaaaatcgtgatgtttgaaggaagtaatacgatcgcagcttcactggcatcagctctacatccactgaataagaatgaatccattaatgaatagtatactaaaagaaacattaagctattatgataattggaaaactttagtaatgttggcaaccatatcagttgtttcatttcaatgcatggttgtcatagtatcctaccagctattgcatcgattgaaggatgagttaactagtttatttcaccagtacagctcaaatcacgttttattaaaataaaagttacgattacctgttgccatggcagtatattacacaaggtagaggcctatcttcaggacgctcaactggcatgtaatgactacactgaaggatatctcctctgatgtttttaacctgtcacaatataagttcttctatagtcttaggtgaacaaagcacaactaaaaccttgagatcctaaaggcagtccaaggctggaaaataaggaactcacgctgatcaacagtgaacaactgatgaaatctacattgacattgaatcacaacatgtttgcttggattctctagtcaggagttcacaacaacaacagaagaaaaaaagctttacctctaaatctttcctctggtaccatctccctttaagcaagaactcttgttccaagagatcatgttctggattgtattcagctctacatcaaaacaccagttatattcaaccgtagatgaaacaaactaattaaaacaaattggatttgaaagaggaacagggttttcttgaggaaatgcaaccctaaatcctagtatatattacttcatctatataaaaatccaaaatcaactcaagaacaagaaccaaaatttcaaaactcaaatctaaaaatctaaactttgtgtgaaacccaattctacaacctagtaaagagaaatagaaagatgaaactgaaaactaaattccagaatcagtaagtaatttttttcaattttctgagagaatcatcaccttggaggtcgaatgacgaagttaacaagctgctccattagaaaaaaatcaaacaaatcaccttcttcttcttctcattcttccatatttctcacaaatagtcaaaaatcgaataaaacctaaccaacgaaagagattcagatagaacaagaaatgtaactaaaaaaaccctaaatcaaaagatcgagctgttccagaagaaagacagtgagatcgaagaaagaaaaacacagagaaagagaagaaaataaagcaaagtaatagaaaaacggctttttcgttgttgaagcctgaaactgtttttatatttaaaaatatataaacaaactttataaattagccccacatttttgccgctttttacatttaacgtcttcacatttcattatggaaattaattaattggtattgtcatgtataatcattaatcattattactaattccaaagttttttcagtgaaagctgacattgaccaaagtctcttaaaaaatttcgaaaaaaaactcaaaaattcaattaaggttttttagtggagatcgtgcacgttaattgtcgtttataggctattgttttaattattttaaaatatatacgaggtaattaagagattaattaaacttaaacatatgaggttaattattacaagtactaataaagctgtaatgtggagtttggaattttcgacaacaaagtgcacatctggcacagagattgtcacagcacgaaagatttttttgtcgttcttgtaggatttgctggcacgtgtggaatagaaaacacacgagtgaaaccatcgtcggtctttgtagcccattatttatacttctattgggctggacttaagcccataagtaagcatctctgttacaagaaaacgggaaacagatctgaaccgttaataatattagaaaggatctagaccgttgatttatttatctgctgacagattcgtaccttcgcgaatatcaataccaaaccaatagaaatattcgttcgctgtcttcttcctcttcctcctctcaaatcggctacagccattggaaaagctaaagccttttcgtaatttctggaagtttctgcagtcggttttcacggtttcgtagattgaggtggatttgtgattctgggtcagaagtaagatagtggaatataaattcatggattcggatcaaggaaagctttttgtcggtggtatttcatgggaaactgatgaagataagctgagagaacatttcaccaactatggagaggtttctcaggctattgtgatgagagacaagctcacaggtcgacctaggggttttgggttcgttatcttctcggatccttctgttctcgatagggttcttcaagagaaacacagcattgataccagagaggttattattgttctcttatagctccatttctctaattgtgttaaagttttatcctttttgcgttttgctgtgttgattgagaacgagagtaaatatagaattttgtttggttggcaaattcgccttagtgtttcttagattctaggattggttttaacttgtataagaggtattatagggtactcgatatatgttaatcgtacactctatgaagtgattgagtatagtattagaaaagagagcttggtttggtttattaggataaggaaaaacagatgtatatattttctgttgcgttatgttctcgatttgggtaaagtatgattcttggaagtttattatgagctttattgattttggttaatgtttaggttgatgtgaagagagccatgtcaagagaggagcagcaagtctctggaagaactgggaatcttaatacatctagaagttctggaggtgatgcttacaataaaaccaagaagatctttgttggaggcttgccacctactttgactgatgaagagtttcgccagtactttgaagtttatggccctgtgactgatgttgcaatcatgtatgaccaggctaccaaccgtcctcgtgggtttggatttgtttccttcgactctgaagatgcggtagacagtgttttgcacaagactttccatgatttgagcggtaaacaagttgaagtaaagcgtgctcttcctaaagatgccaatcctggaggtggtggacgatcaatgggtggtggtggctctggtggttaccagggttatggtggcaatgaaagcagttatgatggacgtatggattccaataggtttttgcagcatcaaagtgttggaaatggtttaccatcttatggttcttctggttatggcgctggctatggaaatggtagtaatggtgccgggtatggtgcctatggaggttacactggttctgctggaggttatggcgctggtgctactgctggatatggagcaacgaacattccaggtgctggctatggaagtagtactggagttgctccgagaaactcatgggacactccagcttctagtggttatgggaacccaggctatgggagtggtgctgctcatagtggatatggagttcctggtgcagctcctcctacgcagtcaccatctggctatagtaaccaaggctacggttatggagggtacagtggaagtgattctggttatggaaatcaagctgcatatggtgtggttggagggcgtcctagtggtggcggttcaaacaaccctggtagtggtggctacatgggaggtggttatggtgatggatcttggcgatctgacccgtcacaaggttatggtggtgggtacaatgatggtcagggtcgacaaggccagtagtgactgtgtaaggggattatgaccgccctggtttctggatccttgtcaagaagaatttagctcaaatcaaaggttccacaacttcctaacgggttggactgcttgaatctctttataagcatgtgctatctattacaataagtcacttctattaagttatttttcggttgagtgtacttttgagttttggcagagttattataactacaggctttgctgttttcgtattatgtttgtcttcctagtattcttgccggattgtttgttttgattgtgttattttgttttggccctgatggatataacttaagcagggaataatgcttcagggtacttgttaagaaagcagatggtgagagcagaactcgatggaggtgagagtcaaattgctgaatgtatggtttgagtagaaagtagaggtagttggtaacgttagtggtaccattaagaagaaggtgtagaaaatagtgagaggtagctttgagaaaaaggcataatcattttgcgtcgtgtgtttgtacaggacttatcaagggctgcttgagttcttaggtggggcaacgactcatcgaggttgaattcaaggtctgctcctactccgagttgaggtaatcacttgaagaacgaagaggcaaggtgttatcagtatgtgagctactaggttcttttgtgaggggtgagattgaaacaaacatagataggcacacactgtgatagcacaaggcagagccacattgttaaaatatcttttgggattacggggtttgatccgtaatgatggatattaggataccaaattctcataattatagatagaaactagtggaaactcaacagtacaaagcttatcttgagctgtgaaactcaaagttacaaatacgtgaaagctaatttaatttattcagaagtagttgctttaaccaacttgtttacgtgagacatccatgcaatgcaactacaatcttcttctcatttagctcagtggtgtccaaaccagccaacaccaaagccccatcctttaccttttccaatgccgcctccaataccaccacctttgcctattccgccgccaaagccccatcctttaccttttccaatgccgcctccaatcccaccacctttgccgattccaccaccaaagcctccacctttactaatgccacctccaaaaccaccgcctttgcctattccgtggccgaaaatgcctccacctttaccaatggcacctccaaaaccaccacttccccggcagcgattccacctcctttgccaaatcctccaccaaaaccacctccaaagccctttcctccgcctatgatggtcttctcctcttcatcttttccaaaggtcacaccttctcttgcagccacataattcaccacaaaaacattgaaccacaacaaagccaagagagcagctccgttaacaacgagactccccatctcttttgttttttttgtatgtattaagttatgtttgtttttgtataagccaagacgagaccagctccgtttataaaggcgagtgagtagccaattaattacaccaactactaactgatcccgattgttttaacctcaactcgtaaatgactttacgttttcgtagattacccatcacatattcactcttaccatgacttcatcgacgcattttctagtctataagactataagactacaactccatacgagctttaagttttcattttggtacagtaagcatataacctttttttttgtcaaatacagaagtatataactttctccaaatcattttctagataaagtaataacattttcgttatgttcttttttgaagcacatcatttcaataaatttgaaaaactttttttcttttttttgattgagaaactctcgttatatggaagtgagagaatgatcagaataataaactatagtttgctacgtcaatggacaacgtttattattggttttttagtttggtggtttgattctatgtacgtagacgtttaatctaaagttctctgtaaagcgaaacattatttaggtttacaacgaatgtctaatattgacaaacaaaagaagaagaatgtctaatagatagatacttaaaatgtagataaataaaagtgttacaggaaattgatttaaattggtatgtgtgtttctcaaatctactaaaatatggttagaattaagtatctacatcaaatatgagtaagtgaagtaaaagcagcctgattgtattcgatagtcccactccttcctactagttctttaattttataggtgggactgtgggagtttagtacttgatacatattctaaattttagagaaaattatgtatttatctaactatttttacagcaaacatttttgctaaagtgttcgtaattgtgagagactgcaatgtttctgtgaaacaacaaaacagttacagagtttgatctattcaataatcatcacatctctcagattttacttgagattcaattcttgaaacttttgtacatttcaagaaaaacaaaagagatccattcttgtttcctccatatagagttctctacgcgtttttgatcaccggagatcgcgctttcaagttcagaaatatgctcctaaatatattaaaagacaaagatgttaccagaaaactctcttcatatcaaaatgagagaggacggtaagagcttttaccagcaagaggcgacgaagctgctgaacaaaacacggaattggagaggcacatactgataattaacccatcccacgataggccagaactgttatttacatagacagttttagaaatttaaaccaaccaaaagtgtaacaaaatgaaatggtagtgagtctcatttattaccttccatgcggttaactggatagtagggtaatcttttccaagtttgtgcttcactagcttccatggccttcctgtgaaaacattacaggacaatgtcagatcttaaactccaaatcacaaatcactaaagagaaaacaaaacaatacatttcagaactagaccatggtcgttaccttcaactactaaaccatagtaagacatgaaaagaaaattgttccaaggagatgatgtaagttgctccaacaaaacctgattcaacacagtttttgttaggtccacaaaatccatccttaagcacacagtaagagatctctgtacatatattgatcatacgattatactaatttaagcacattcaaattccaaattgcaacaaggaaactaacagaatataagttaaacaagttgttgtaatctagaatccaattccaaggatggatacaaacaaactgggaaaacaagtgtttgacttgttatataaccaagaattcaaaaagcattcaagaagatgatagtttggttcaaaagacaaaacctttttggcaacagttgaattacccttcttccctttgaaaatggtatccatcaatttgtggaaaaagtgaccaaatggtcctccataagcaaagccatacaactgcacaaaagagatcatcacattttctccagactaaaaaagtatataactgcaaacatatataagacaaataaggaacgaaccataaggagaagcaatctccggaactgaatccgtttaactccagagatcttctgagctatagcatcactacatccagctaaaacccctgcagtgatcgcctgaaaaaatatcattacgacgacatgatcatcgcaagattctcataaactgagacttctttgatcgaaattaacaaaccttggttcgtaaaggatgagcttgaagctgaatcagatactttcgccatgcgtctttagcaagatccgacatggctcgaagattcaatagcaagattttgacaagactaaaagatccagatttgatttaagagaagttaaccatgtttcgtattaacaaaaaaaaattagattatgggtaacgaatggatttactttaggccaaattaagaaatatctaaattaggaatatattcgttagtcaaatatgctttgtcatatctttttcttcggaccattttataacacagaaatcatctgagtaatgagaaagaaacctaggaaattgatcaaaacaccacatgtatgtacagagtaaagtcaaataagcaaatagcacgaaagagaatccagaaaagcatcatagttggtaacaaagagcaatagtatgaacacaacacaagagaaagcagcacaagctgtgctaacacttgctaaatataggtctcgtgggatcaccatctttagattgatttactcacctgaaagaaacgaaattcaactataaacatcagccacaagtttgtattcaagacttctttcttcaacaattttattgctttacctataagaggtatctccataaagccgggcggtctcttgagatgaggagtacacgacaacctgagtagtcaaatgacgggcaatacatatcgtttggaccgatgatctctcttactgtttgaacgcttccatagtcacttgtcaatggctgttgttgcaaggtctcttcttttgcagtatcaaacacaaatagtcccataccagaagtagccatgacaaaatttgaatttccccagacttgggttattgcagagtggtgcgggtgagagtttgagtcaggcagactgtatgtgctcacgagacgctgtttccttatggagaattgctgcacctgagaagaagaagccatttgtttcttgacagttgatttctgattggtacatcctagaaacactgaatctcctcgagatgatacacattgagcattaacaccgagtttggggattttagcaccaatgccagatgggttacgaaaatctaagatgttgattgaatcactagtgcagaatactccgtcgtttccttcagcatccaaggaacttactctgcattccatgtgaagagaacattataagtgaatgagagagaaagagtaaagtatccacattgtttagcttccacatattcaatttatgaggccaagcgaggagatagtaagaggctaaatggtaaaataaagtttttttacctttgacgaacaccacccccaacttcagcatctgtgttgttgatatgaaaagctgagatttttcgccctgaagaggaaatggtgtgctgtgcttcagggtgaagggaattgacatcccaaacagaaattgcttcagtttcggctatgacaagttttcctcgattcctccattgtaaagggctcgaataatctaaagctgacacaggattttgcacaccccatttcatgatttgttccccatctcgtatgtcaaaaacctttactatactttgaaaactaccagttgatgctataagaggaccacacggtctgtaccaccattgttgagtttctggtaccactgcacaagccggagtgttcctaccatgtgatgtgttattgggtagaggagcaagagctgttcttgaaactcttgaagatccgtcctcgatgtggagtgccttaatgtctttcgtgtagaaatcccatgaacaaaagccagattctaaggtattcccagcagaagcagctacgacatatctgcctgagcagccatcagcacccggtgcacgaactacccagcaatctctccaagtgtttggtgagataccatctggaggactgtacacagatttcacctgaaaaagaatttcaagtctttgatgtaaaagataataatgcatacatagtgaacaaagccaaaaactccagtcacttcatacaaacgcacccagattgacagagaattacattcattaaccataaactgtgcatactattagcccaaaataaagctttagtcactaagtatttctgcaagtataagatgaaaaatccaatctaaatcaaaataagatatgctaaacatcttctcgtaacttgagatatgtgtatgttgtggtcaatatgagattttaaaatcaatgttccacactagcacagttcaagttagatcaaacatgatactaaaaacttttcataaatgaagaaacgcatagtacctcagagttagcgacatcgtaataggaacacgagccatcatcatgagcaagtataactgcctcgccctctgatacaaaccatcctcctgtagaagttttggacccaatgtcattgagttgatacatgcatccatcatctatttcttccagctccatctcctctctattctcttcatcatcaatttcctcgagggcttcgtttgctctaagaatttcagttaagttggaagtcagattgacgtcttttgagacatcattttcctttgacggctcctctgtatccatctcctgcacttccagattttccagcgcattctgatcactcataaatgtgactttttccttgtcaagtgaggccaagaactctagagctatcgcattctcctcaacaggagctgacggcttttcttcagcattcactgccttgttggactcaacagaatcatggccttttgagacatgcgaagatgttttggactgagttctgctccttagcaacctctggtgaggcaagagtctgtcttccagctcttccttatttaatcctttcacagaactttttgctttcgtagttttgtttttctctggaccatcaataacatgactcatagacttttcaatccctgtgattttctgatgtatatcagagattataaccttagacgaatccggattgttcaaatccagcatatcctttgtcttcttgatatctgatgcaattttcttaacctttccttcaagaaaagcaagcttctcgtgcagcttgcttggatacttagcagtactattgctgcttccttcatttcctcttatatcctttgacatctccattgccttcccaacattatccaaagacttccttcttaaagctacactagtccctttcccagtcttttcaatcttactatcagatttcaaagcaacagtagatttctctccagaaccaactaaagcatgtgcctttggatcagaaattgaatttctcgccacactagaaccttcaaatttgcttgaattcactggacaactacttccttcatctgctttctcacaaacactacttggctcaaccttaatttcactcgtaccctgtttgaatccagaactcttgagcccagacttcttatcctgacccgattcacccttttccccaataaccctagattcatttctctttctcaaatccgagaaaaccctaatcaaatcagatggactagaactcctacctcgcaaaccagatgacgtggatcgcgtaacccgaccctcgccactcacggcggacttatcaatgcgcggtacaggccggagcactggcttctgagtcgatccaaatgagcggtgactaagcttcggattcggattctctttgctggataatgatttctgaagagcgggatttgaatttttgcttgagatcggaagtggagttacagacctcaatggttttttaccagatgatggattttcaccggcgccggtgtttatatcttttagccggcggcgattcgttgaagctgacatctgcaaaatcgtagggtaaaatgatttaggattttgaaaaaaaagtttgggggaaaaataaaagcttttgatttttgaagaaaaagcacaaaacgataaatggaggatatcactaccgcaactccacaagccgacaaatttattagagtttcaatttcaaaatatttgggcgggatttccaaaaaaaaaactcaaaatttttggagatcgcgaatgttcaaaaagtcgattgattaacgaaacgcagcgtttaggtaaatttattaaacacgtgatagcaacaaatgcagaacgcgacattttgaaacacgtggcagtgtagaaatagcgacacgaattttgttaactaaaacgctgcgtttttaataaaatatacagtaacagttgaatagttgattgcgacacgaaacgatgcgtttagggtatgctgtttttaaaacacgtggcagcaacaaataaaccgaaacgcagcgttttgaggtggttattaacgtgaaaggtctcgccagtttttgtgtttcatgcattagtacacgaaacgttgtcttctacttctcggggaaacgacacaaccgtagatttgatgtctgaatctgtgtatatataacttctccaattagagacactaacacagaattgatcactactcctatcgaaaagtagacgaaaatggcgaatgagtatggattcgggatgggttcggttttggcgattgttgtcgttgcactaatgttactgtttgttccgttgatgatgggaccggtgactgcaccatctcttccaatgatcttgatgtttccggtcgtattgctctttgtgtttctctatctccattttacttccaagtgatcaaacatcaaatctctttctattattatcgtgtaatatgcagtacgtatttatttcgatagtattgctcttacgtttttggttatacatttataaaaacaaaaattgtatttgttctattatatacaatatatcaattgactaacgcatgcgcagttggtttggatctctattgatttgcaagtaaattttttggatttatctttctttctcacttcgtttcttacattattagagaatttgacttacatcgcgatgtatgttttacaagcaagtagaatcgatgccactttccttagatattagcgtagtagacaatgtcaatgatcgagaaatatacacaaaagtacctaacttttgtcagcatgaacagatttgaatgatattacgtaattgtagagaagaaacttaccttaaaattaacacctctaaaaggtaagaatgtgttagtagaaaatggctattcatattgtaaaattaaaaggccgtataattagtacagaggaattcgacttggaaacagaaaattagagattaaataaaacacgaattttaaataacggaaataaaactttagtgtaaattatctatacccataatatatatagtaccagaatctaagtataataaagtaaaaaaagaaaaactgaagtagcatccttgaccgtcaccacatcttccgccgctggctgcctggctccaccaccaccactactacattcaccggttcattgtcaataccaccaccaacaggtccttctcctctatcaccacagcagccaggaccaccacagcagacacaagagaatatcatctcatctaccattttgcccgcacagctctcaattaaaactaacacaaaggccaaaacacataggactatcatggtaatataaaaagagttgttcatgttctcttttgtgcaataaggagccaggaaacatgttcttctatttatataatttggttttattgtaacacattagtttcgggtcagctaatggcatgattatcatatagccaaaatagaaccttcattttccattcacgttgcggggaatatagaaccaccaatataccgaggagaaacttctgtatgctcttaagaaatttagtgaaagttagtatggctgaagttaaaagaagaaaacaaataatatttagtattatcaattcatttctatacgtatatgtcattttaatttgccaagctcatatataacactgatttgcagcacaaaacgataaatgatttttcgagatccgaaaatagaaagtggtttttagaacttaaagagtgttatgtctactttgtcgcaagttatagagaatactcaagggcagcctaatgaagaaagattggttaaccaaattaaaagacatccataagaccaagtcctatttaaattaaaaaccaggaccatttctggtagattcaaagtatatcacagtattgaagcaggacaggtaccaaacaaaacaaaaaaaagtagatagatgaaacaacaac

SEQ ID NO: 581 - DNA, 206606 bp, Arabidopsis thaliana
tttgcccgcacagctctcaattaaaactaacacaaaggccaaaacacataggactatcatggtaatataaaaagagttgttcatgttctcttttgtgcaataaggagccaggaaacatgttcttctatttatataatttggttttattgtaacacattagtttcgggtcagctaatggcatgattatcatatagccaaaatagaaccttcattttccattcacgttgcggggaatatagaaccaccaatataccgaggagaaacttctgtatgctcttaagaaatttagtgaaagttagtatggctgaagttaaaagaagaaaacaaataatatttagtattatcaattcatttctatacgtatatgtcattttaatttgccaagctcatatataacactgatttgcagcacaaaacgataaatgatttttcgagatccgaaaatagaaagtggtttttagaacttaaagagtgttatgtctactttgtcgcaagttatagagaatactcaagggcagcctaatgaagaaagattggttaaccaaattaaaagacatccataagaccaagtcctatttaaattaaaaaccaggaccatttctggtagattcaaagtatatcacagtattgaagcaggacaggtaccaaacaaaacaaaaaaaagtagatagatgaaacaacaacttaaaagagagatgttccctttcccttcttgtctccaccgatctcaaagtgcttgcacctctgcaaaaaccacacacaaagtgtaagaaacagaactgagactaaagagtgattaacaaaggtaaagaatgtcgcagacattaccttaatcgggcgttgcgagaaatgcttgcagctttggcattgaagcctcagcacaatcttcttagttgtcttagcctgttccaaagaaagacaaataatgagcaaggtccaattaacaaatcattcctataagacatatttcacagagtcaattctgaaatcctaaattggttctcacatagaagacagtaattagagatcaagacaaggaaaagcgagtataccttcttgtggaagacgggcttggtctgacctccataaccagattgtttacgatcataacgacgctttccttgggcagcaaggctatctttacctttcttatactgcgtcaccttgtgcaaggtatgcttcttgcactccttgttcttgcagtaagtgttcttagttttcggaatgttcacctacagaaaaccaagtttaaaactaccacaagatacagtttcaacagcatacagaattaattacgatcatagaagtgaatctaaatacgcccttcagaacaaaccctaaaacttgttaataaaatttcctgcttctcctaaatcattcagaattaattgctaccatacgatctgactactcaactagtcaatattgataaccattttgtgaatcctacaagtccctgaagtacaaatccttcttaattctcctaaaaatcagaacagaattgcagcaacacaaatgaagatacataacactatatcattttgaatctctggtagattggagctaaaactcttcacagagacgaagtgaactgaatcttcgaatttacaacacagaatgcaacataacagattctaaaaatcacaattagactctaataattctcgatttaagatgcaaaatcagaaataaacaacttaaagaagaagaaaaatcacacagcagatctataatcaataatctcgttcttcaatagtaaccaaggagaaatttagcagaaataaagaaagagaagagagtcaccattttcgctcttcggtgaagctcgtgccgtcgtcttccactgccgcaaaacctttaataaaaacctaaagtaacagagcttataagagagacatttgagaaaaccctaatactacaaacattgggcctctataaacacaaaaagcccattaacttaatcaaaaagtcaggcccatctcacttcccttttttaaaagaaagtaaatatattctagttgccgaaaataaaaattgttaataatcagtggcccgtggacaaaaactagccgtttagagatacaacacaacggttatgtttgtttctttgtttcaaacttcaaacctcgtgaatcactcacaaaccctaatccccttttttattttctctctctctaacgctctctgaatctcaatttcaatttcactctttcgaaacttcttcaacaatggcaccgacaccatcttcttcaagatcaaatcaaactcaatacaccttaatcagaactccacaaacaaaacaacgtctcaatttccactcaaaaaccccaaacccagacggatctaaagatccatctccaccggagcatccagttgaagtaatcggccggatccgagattaccctgaccggaaagagaaatcaccttcgatcttacaagtcaacacagataatcaaacggtacgagtcagagctgatgttgggtacagagacttcacactcgacggtgtttctttctcggagcaagaaggtcttgaagagttctacaagaagtttatagaagagaggattaaaggagtgaaagttgggaataaatgcacgattatgatgtatggacctactggtgctggaaagagtcatactatgtttggttgtgggaaagagcctgggattgtgtatcgttctttgagagatatattgggagattctgatcaagatggtgttacttttgttcaagttactgttcttgaggtttataatgaggagatttatgatcttctttcgactaatagtagtaacaatttaggtattggttggcctaaaggagcaagcactaaggtaaagtttcttgattgataactttagtatacattgaattggctttaaaggtgtgtactttgttgttttgttacaggtgaggcttgaagtaatggggaaaaaggcgaaaaacgcaagttttatttctgggacagaggctgggaagatttctaaagaaattgtcaaagtggagaaacggagaattgtgaagagtacactttgtaacgaaagaagttctcggagtcactgcattgtaagaacgatcttcttgattgatgtgtatgcatagctttatgcagcttatctctgttttaacttactagtgtggttgtttctttttgtagatcatacttgatgtgccaactgttgggggaagattgatgcttgttgacatggctggttctgaaaatatagaccaagctgggcagactggatttgaagctaagatgcaagtaatgtttcctctctcaatttgtttgattctactaaagttattgtagttatggatatcaactgacttatatctctcattattcaacagactgctaagatcaaccagggaaatattgcactgaagcgagttgtggaatctatagcaaatggagattctcatgtaccctttagagacagcaagctgaccatgcttctccaggtgaaattcttgttccattgttttatcttctggaaaatgttttacgtgttgcttggttttcttgaagatatttagtgttgtttctattctctgaatgcaggactcttttgaagatgacaagtcaaagattctaatgatcctgtgtgcgagcccggatccaaaggaaatgcacaagactctctgtactctagagtatggggcaaaagcaaagtgcatagttcgtgggtctcatactccaaacaaagataagtatgggggtgatgagtctgcttctgctgtgattttgggatcaagaatagctgccatggatgagttcattatcaaactccagtctgagaagaagcaaaaagaaaaagaaaggaatgaggcacaaaagcagctgaagaagaaggaagaggaagttgctgctttaagatctcttttaacacagagggaagcttgtgctaccaatgaagaggagataaaagagaaagtaaacgagagaacccagcttttgaagtcggaactagataagaaacttgaagaatgccgaagaatggctgaggaatttgttgagatggagagaaggagaatggaggaaaggatagttcagcagcaagaggaactggagatgatgaggagacggttagaggaaatcgaggttgagttccgccgctcaaatggaggaagtgttgatgaaactagtgggtttgccaaaagactcaggagtctttactctgatgatgatcctggtatggtgaagtcaatggaccttgacatgggtgatccagaacctgtcaagcaagtgtggggagctgtttcacaccaatcaagcaacactattagtagcaacttcactaaccttttgcaaccgaagccttcagagaatatgcttacacagatgtatcctgaccgggtatgcttgagcactgtctttgaagaagaagaagttgaagaagaggaagaaaaagtgatagtcgaggataaaagcatctgcttgataacaacaccaatgcctagtttgaactctgaaggtttgggtaaagagaactgcttcaacggtgcagatgacaaggaatcagcctcgtctagaaggttgagaattcaaaacattttcaccctttgtggcaatcagagagagctgtctcaacacagtggacaggaggaggatcaagccaatattgcatcacctgataagaaagacaatcagttcttttctattacgaataaggccgaagcactagcagtagaagaagcaaaggaaaacaatatctcagtcgatcaaagggaaaacggtcagctagatatctatgttaaatgggaaacagctgctgataaccctcgaaagctcataacaacactgagagttacaaaggatgcaacactagctgacttgaggaagcttattgagatctaccttggatctgataatcaggcttttacctttctcaagctcggggtaataaacttgaaccaacaagcacaaaaagcttttcatttttatctgtttgttatgctctgatcctaaatgcagttatttcaatgtatgaaggaaccatgtggagctcaagtggcaaaggagaaagaatcaacagttcaagctacgagcctacctctctgcaacggacacgcatacctcgccactttgagaccaggaaagagctcacaacataaaagtcttcaacctgcaagcccacttccacttaatcccatagaaaacatgatggaagttacccccatctcaaaagtgacaccgaaccatcaagttgatgaattttcatcacccaatctcgtagctcatctcagctccactccattcatcactctcagaagacattagtcgctatgtcttgttttctctattcttcttttgtctgtccaaaggtagcttttgaaagatgtagcagcctttgtctatttctctgtgttgagaaaaaaaaaactcttatgtacgaccacttttgtagctatatatatgttctacgatgtttcagcagagtggtgtttatcagaacgtataactggtgtttcccaaaggatgcttagttctacttataacatatacataagtagagagaatgctgcagccacatagagctacttcttacctctctctgtcattgtaacatatggacaaattccaaaagccctattcaattccaaccccaatatctttatgatcatcatcataacgtgaacaccaaaaacaagggcaaaaatttcaaaggctcttaaaaataacaatatcccggaagcaaagattacctgcaactgcaagggaaagccaagccctattatagaaaagcaacttcattagttaagccctatctctcaatatgctcacatgcatgcattgaccaaatgtcttcttttatctacaggtactcagtcactttcttagttacacactagattaactcaattcttctgcaacctcattatctccaaagtaaaagaccactgttattgatgtttttatggataatatatgatgattcatctttattacattagctgaatacagaacaacaaccaattaactcaattattttgaaagatgtatgtagcctgtctatttctcggtgttgagaaaaaaaacgctatgtacgaccactttcagcagtcaaagtgagtgactagagccatcagcatggagtgtttttcaagttgtacaacaagatttgtcaacaaagtctaaaactttcttttattcgaccataatatgactgactaggcacgttggttttcgatatacagtttaaaaggttggagaagatgactagatgagataggttttcatattttacttccacatcgaagttttagagaacagaaagaggagaaaattgaagtacacatgagacaagttacactttaaagctttattaacagattcttttaaaaacagagactgagagattgggagaggcagattacattaactctctttctctctctcactttctcatcttgttcccaaggttaaaaaacaattcgaggacatgtctttcctattttcagaggagagagccatcagcaccgaatgttgtcttttcactctcatcaaacttctccttccctatcttcatttcctcttctttccagagccgatggtaaggagctcgaagtttctaatggcatcctcatgcccaggccttgctgcagctgcagattcatagctctgtggaacccgttgggttgtggcatgacgtgaaccacttgaaaatagtcggcttgagtggttctcgcttggttcagctgatgagccaggtctggtgcttgatatcacacctctctttgaggtacttccatttcgagactcgtgctgcaaatgaagccagcaaatcaaaacacacaaactttctcatgttctgattccctacttattctgagaattactttggatcattacaacaagagaaataacaacacaaactaaccacttccttggcagaagagggtatatcatcagaagatctgtgtctagagcgatcaccaagagcgccttggcttgaaacatttcgtctggtgaatgcctcaattgcacctgtaaatcttcctcgcaggtcctgtccgactaaacagaatagggaaagaagttctcagtttgagatcttccactattcaacaatttaattaaatctctggacacaaattcaaaatcttctaagggaaacaacatatgaatgttaatatctgaagggtcaagtgagatagtgcacgtttttcagcacccaaaattgtcaacactgtctcataaatttacaacttaaaataaactttttgatatatctctttgtattcgtccctccaatataagagacagagaacatcaatgtacctgtaggcttttcagctctttctgcaggtggtcctggagggtccaacgctggtcttggagttggctgttgtaaatgatagacacatagcaggataagattttggattattcaattgttctgagacttggttctccacacgttaaatcaataatagaactaacccttggtctcgaactagagccaatctgaggatacttcgagattgtccaatcaaacacataatcaagctgataacctgcatagtccattccattaaatgcgtataagaaagctagagatgattcttttaatcccactagactgcatagaccataaacaatctaataatagagagtgaatagagaacaaacaaagcaagaagtttcaaccttcacgaatgaaaagatccctaaaaagtcttctcagatatgaataatccggtttgtcctcaaatctcaatgaacgacagtaatggaagtacgatgtgaactctgatggatacgacttgcaaagagtctgcaaaaacgtaaaatcatgctatgtcagaactactggacatctgaaaacatcatctgcatacataaccttaacaatgatgtacctctacagaagtaagcatcttcttttcactaatcttgtcatatttctgcttcttcgtaccagcttttaaaccttgccacggaagactgatacaagagaaaacatgaactcgagtttaaggatttcgttttctttatgaagttataagttaatatacaaccaagaaacttttactaccttcctcgtagaaaatacatcaacacataaccaagtgactccagatcatctcttctactttgctctgtaagtatgcataaaaaaaatgagtcagcaaaggaagataagagttttcatcaaatgcttctgacaagaaatccacggatgtatgagatgaaagcagctcttaccaatcccaaggtgtgtgttcacacttgcataccgagcagttcctgtaagattcttgttttccctgcaaaattgcaaggaatactaataaagcaagctggaagaagagtgcacaaaggaaagtattgaacacgatctataagaaaacactggtgcagcataaaattcaagtttcatgaataagataggcacggaagatcaactaaacatatatctacaacaggttcctaaaacatggatgactgaaaatgtaggtaagagtttgcatatctcacctgtatggtatatgcttttgtgtctgaagatccttgtattttttagcaaggccataatcaatgatatacacctgaggttagaaattaattcagtaaaccagaaggcttcagtactactcctatgctaagaatcacacacagatttattctaaagacatcttcaaaacatacaccaactcatgctgaatcggtagattacctggtttgctctgcgcccaagacccatcaaaaagttgtctggtttaatatcgcggtgaagaaaaccccgcgaatgcatatactcaactctacatatctgcattgatacaacatactctcaacgaccaacctaacatcttaaagaaagggcatactcattactcagtacttaccaattgatctgcaagcattaaaacagattttaatgaaaatattcgcttgcagtaattgaataagtcctccaagcttggcccaagaagatcgataaccatgcaactgtattcaccctcaactccaaaccatttcagatggggaacacccgctatttaacagaaagaaaatatatcaaggtatcagaggcttggaactaaaacttcatataaactagcagagaaagacaaaccaaactcacttcctccttgaagaaacatatatattttcgattcatactgcagttgaggatgcctcgtcttcacaggttcctagtgtcaaaaaaagaaccattattagaccacaaagacagaaatggagcttgcataattaacaccatttctttccataacagagcagcaaccatcaggaataagaagagaacaagctgcaaattacacttctattcccaatcaaaactagtctcacttaaaacaagctgcaaataacattgattcattatccaaaattgaaaccttcctcagcacaaaatctataaaatttgaatgaaataacttaaacaaattcgtagtattaccagcttaactgcgacttcttctccagtttgaatattgatccctaaatcatacacacatagattacacttcaacaacaactaaacaaacccaatgcaagaactagtaaacactctcaagatgtgaatagattgatttgatacctaaataaagttcaccgaatgatccacttccaagcttcctacccaacttaaacttcccgccgataacgtgatccatcttttgattccgatccatctttttccgaattccgatgataatccgattcaccagtaaaacccgattctcatatacttaatacggttccaatcaaaaccctagtcgctaaatcagaaactgggtccaaagcaaacacagtgattgaaggaagctgatttagtggtgaaagttgaggactttcgcaagaaaagagaaagaaagttgttttcttttacttggagaaagaagaagaatctctggggggacaaagaattagaagaatcggatctgagtttgagggaagattttgcggagatttgcggaagaaaagagaaagagaaagaagaagaagggaataataaagaaatgaatatgtgaaaattgaatttaacctaaagaaagacaaaacttcaacgtaaatatttatcattcattgaatctttttattttatttttgtatactgttttttttttaattacttagaagaaaaaattagttgttttcgtgcacggtttaacatttaaattctctgttttctaacgaccaaaactctaattcgtaataaccataaacatcacttaatcaacaacaacacgaaacaagtttgcaaaactttataatatatttttattaaaaacagaatctaccaccaaaaaaaaaagttctacatttgtcatttttcaagctgaaattttcattttacgtttatatattttgatacattattggggatagagtataatctcattaagattatcactatatatcttgtgatagagttatgtcctatattttagggattagagtatatctcataagatgtctctcttgtataaatactatactttgtgaatcaataaaatcaagttagtgcaatacctaagtctacatacatcacccaatttacattgatttatttaagtttttttttactcatttactaatcgtaccaatatgttgatgaacatttttggatttaaactgtcaacaaatcgtgtactagcgcaatattatcatattatcactttgttctatcttatgatctctcgcttggacagattctggaagtgcatgtaaaggacctgattttataaaagttcaaacaatttaaaaaagaaagcatccatttacttgtggatctcccgaacgcttggtaacgtcgatacatggaacacttgttgatgagtcttgagaaatcaagctcatacttaataaccagtttacatgtcgttagtagatcttctcgatgaactcatgaacacagtgtgaaattcatgagtttcttctatatggtaatttagtaggatagctaatgttcttctatgctatattaagcattttgtttttactttcattttcaatatgaaaattaacatgtgtctctaaaggtaaacgtgttaggaccattcatcttgagtcaagtgatatttcacatgcatgggaaacaaaacttattgataattgtatacaatgactaaagttttataatgtttatgaaactttcggattgtatacaatgactaaagttttataatgtttatgaaactttcggtattgttaaagtattatgatggtcaatgaaactaggcaaaaataagtcaaagagaataagaaaaattatccataagtaagcaagcttataatagatgcgtatgattatatcaactatagtgtttataggcttccatcgttgacgatattacattatttatagtttagattttagaatacgtttgatgaaatggcttttggtttaagtggcctaagctttttgcttttatttgtccatttgtcacacccgttgttttcttgtcgtttggacatcccacggtaagaatttatgtcgggaacttttaacaaatcaaactaggcatgcaataacggttatgtcggattattcgggtttttggatagttcaaaaattgaaaattttgatgaatttgattaaaacacgaaaccgtgtaaaaccaacctaaaaatccaaggtgttttgttttttacattcaagaaaagcaaacttacacagacaaagttgttttttaacagtcatataaatctctaccagaagatcaaattggacagtttttaaaactccaaaccaacattccatcacacgagttcttgataacttgaaagacaaatcgaatcctcatgtcacctattcctcttctctttccggaggaaggccgcagggtaatagcattttctggaaatcaaaagacatctcaagttattccaaaacatcatcacatctacaaagtgtaaccaattttttgagcaaagaacaccccacaaatattcatatttttctatgcttttcgattaaccctcaagaagaccatatattcagatataagagatcgctatcacaagattattcaaccatgtaagagacctgtttcatgaaaaaactgaaagccaaggcgagctcacaactgtttgtgaaaggaactaagcttccattaatttgagaattgaggacaaatgaaaacatttgagtgagagaccacaccataacctaatgctctataatctaattgtaacctacacaactggaggctgctgaatggtcagtgaaatgtgaagtccatagtctaggaaatcaacatatcacgacaaatagagaaatacgccattgacaagacctaaactaaaaccatacaacaaatcaatgaatctgaaaaggaaaaggaatgagatataccacaagataaccacgaaatgatacattcctaatcgactacacatagaatcataatccaaaccttgaactgtagatttgtcactagataaaggatgaggcaaaaggaaagtacagaattttactgataagattcctattaacacagagaataggaagcaaacctacatgaaattctaacctatcacacatttcaaccatgcaagaggcgaataaaccgaaaccaaccgagttgagtaagaccatgacccaacgctctctaatataattgtatcctacagaactagaggctgctgaaatagtcagtcaaaactgaagtccatggtctaagaaatcaaaatatcacgacgaatagacaaatacgacatttaacagtaaactaaaaaccatacaacaaagcaataaatctggaaggcaacataagttacataaccatatgatacgcacctaatcaaataaacatagaatcataatccaaatcttgaactgtagatttgtcactagagaaagtaatatgcaaaagacatgaaaggaggcaaacctgcatgaaattgtagcgttctcgtccaatagactcgttctcagcaatagcaaagtatgaaagcatagggtagtgaccaatgtatgaagcataactatcacgctgaatgttcacagcccactcactgtaccatttaaaccaattccacaaattagtagccaataaaaacaatgcatataaaaatttgaacactaaaatcaaaagaaactcacaatctactcaaatcagcatgaccggttccaacatatttagcttgaagatgctcaagctgagaattgatgttaaacctatcacttgcctgcaaaagaaaaaaacccaaaccaaaagatgttaaatttaaagcaaattgttcccgatttcatctatatatgctttataagaaacaaatcgacctaatttcgtctaagccaattctcttcgacatagataaattaaacagacagagaatcaaaggtagaagaagctaattaggttatttcttcttccaatttaccaacaaaagctagggtttcggatcgagaacatacctgcatctttttcagagtttcgcagcaactagaagaagaagaagaagaagaagaagaagaagaagaagaagaagaagatctaaaccctatctttcttcaagtcctttatctgctaattgttttcggttaatatttaaatccgaaataaccgaccggttcgttcggtgtacccgaagtagtagatcataaaatgaaaacgtggtcgtttcacataataaagaagttaaggcaagaagcttggaatttggctaacaattgtggattctttaatcattatcaatctacagaatacaaacaaaagtggctgtagtttagtggttagaatcccacgttgtggccgtggggacctgggctcgaatcccagcagccacacttagtcttttttcttttttatactattttgacatttgaagaaggtctcttaagggcctacgaatactcatagaggtacatttgttctctacttcttttgtatgcactttttagtcttcagtcttcacacgcaattggttccaaaggcctacatatagtgtagactgtagacttttagcaccaaatctgaggtgccattaagccatctgtttcactcttgagtgtactcaattaaacacattcagtgagaacagtttttcagattggcgctttttctaatctaataaatagtaaatacttttgcttatagcattagagggtgaagatttcatcttgaggtttagtagtacaaccaagttttgattaaccaaaaaaaaaaaaatcaaataccaaagctcaccttctctccctgtgaaaataaataaacaagccaattccgaaaagaatatttactttttcacttttctatgttgaaaacaattaaacaaatccatctttctcctctgggagagccttcgcttccactggagagactgtactttgttgaaaaacccctgctaactccaacttttaacagtcgtttagagaaagcaaaaggctttcaacgaaatcaacaacacacatgttaatataacaagagtcttctggttcaggctgtgcaatgtgtcaaatgaaattcacccggatgagctcgacttactaccttctttctctggatcttcaatctgcgtcggtagtagattcaaaaagcttccttggtgggttgttgtcccaccagatgtttcgtcttctgttaatttagtttccacagtttggttagagagaatcaaacatggatcgtaatcatcttgattttacaaatagcatacaaacagatgatttaccaaagagagatttaatagacggcctttttggcttattgctcttcttcttcaactcagctgcacaataaaacaaattacaaatgcagcaaacatgcgatgataatcacaaggtaatctagtattgttgcttcttcctcagcaacggaaggggggttaagtgaattacctatccctggtatttggtcatcatttacgatttctacgttcttgtaagtataaccaacaaagttaatgtctttggatgagagcatctggagaagaaaaaaagaaagccagcgtcatgttatgaaattcacaagaatccttttggttcatgacataaattctattgacagaacaggttctaagttatatcatgttggtccaaaaagataagtgattcatctaacacacgtcaacatgcagaactggcagattaacaacataattctgttagtagcatcccaatcagctccaaattctaaattaccataagaaaatttgaacctaaaagagtgaatcacgtttttgtgaatatagtacaaagatagaaacgcctgtgacagaaactgagccaatttcatcattctgagctctttgttgcatgtaatattttaagctacgtctgtagtatcatcaaagaacaacatatctcaaggaacccacttatagataaattttgaagtatgatcactcttctattagataaaaaaaaaaagcttgatggtacataatgccaaaaagtcagtgcttatgctgtacctttctccatggacctgacttggctgactttggaacttgcttgtcagtctgttccagaaggaatcaaagaagagtatacattattttccttatcaggagcataaaaatcatctgtgataccaatatttcagtatatacatcatgccacatcatttggtggcatatattgcaccaatatttcactatagacatcattagctgatagtatcagtgtgttacctcttcaaatttctcaaaattttgggtgtccaactcatcattaacttggggaataaaggcagctttcatttgatacaattttccccattctgtgcctctaaaccaagggtgaccctgaaagaaaccagtcaaatcgtttttaagaattgcacacaatgatcttacataagggaactttgaatctcaaagttgaacaacgcatacaacaccttaatttcatctgctccttttgttccaagcctttgttcaacattgcataaaagcctacaaataagatccttggcttctggtgatagtctaacctcatctgggaatttcaagtaatttctccaatttactatctgcataagggggaagataatgaatcgagaagaggtaagtttccacattagaattaccaaagagatacaaaaagactaaaattaaatgtaagacttgaaatcgccagtctgccttcaatattaaaatgaaagattcaaaaaggaatggattaattaccttcctacaagttgtcattgggtcatctgaataaaagggcggaaaccccacaagcatttcatacataatggcgccaagagaccacctaaatctcaagattattcacccatattatttatttacaccaaagaaatcaaagaccacaaataggaataggttggcttcacctaccaatcacattccattccatatccttttttcaacagaacttctggggcaatatagtcaggagtgccaactgtggaataagcctgaaagtaatgaccttaacctagtaagtcatatctaacatagatgtctatatcaatggagagaatttgctttcaataacgaaatatactggatactgtggactactccacatctctggaagaaaagatgaggaataagtgaaacttacaagcatccttctatttctctgccagtttagtaattgctcttgttgggtgcgtcttgtcgccacagggcgaccatcactttgtaaagccccactaacgtttcttgcaactgtaaagtctttctcttgaagattactacagtctaatggtttacataatccaaaatctgacaatttcatgtggccgtctttgtcaagtagcagattatcaggcttgatatctctgtatcacattggagaaaaaaagacgtttagaacaaaataacaatgggagctagaactaaatcatatattctgcttcactgacctgtgaatgtagttgtgcttatgaatggactcaatagccaggacagtttccccaatataaaacctggcctcgtcttcagtgagggtgtctttcctcataagtaaagtcatcatatccccaccaggtaaatactccattatgagatacaagtactcttcatcttggaaagaacaatacagtttgacaatgcaattgctatcaacttctgcaagtaaatttctctctgcttttacatgttccacctgaaaatcagattccacattcacatcaaccaactaaacaaatgtcaaacgaaagccacttgaaggaatttaaatacctggcctctgcgaagcatctcagatttcttaagcttcttcattgcatagacattgcctgttcccttctccctacagatcctaacctgcaaagagaaagagaaaaattagcatgccatacttttttgaaaaattagctgtggtaaaaaaaatggcctaagaagacctttcaagaaggatgcatcacagagaacatttcaagatgatgcatgccaatgagaggctgagaaaacagagtaacagactatgatctataaaagagatgttacctctccgaatgcacccttcccaatcattgtcaatggctcaaagtcatcagctcccattttatgcctctgacggcgcatatattcagtttccttcatctccaaatcctttagcaagttattttgctcttcctcagagacttctgcagcagctaattttttctctagcattttgcgtctgtatgaaatgtaaataccaaacaaagagctaaggatatggacggaagttcacacgaaagtagcagaaagacacgaataaagttctttcccatcatgaaaacttgaaacatataaatatgtaatgaaaccataccgctcctttctttcctgcagactctgcatttgcattttgtaatggttttcaatatacagttttgcagcagcagccttctccttagttatatttgaaagtgcttcttcacctccagctgttttcggtccttcctttacattacttgtggcttccttctttttcgaagatttcaccttgtctttagattttaacttactcagccaagctttggcagtctccatttctctcccctttagcttacccctcagaccagatatttttagttacaagctttatgtacaagcgaccagacagttcaatacgcgctaagaacaagttccactccaactttcaaatgtcatgcatctagtgactgatactgcttctcacacctgcaacaaaatgacatatgttagctaacattgactagaaacttcaacagaagcatgtttgaagaaataagaatgattcaatagaaactaaggcaattcaactgctttgcaaagtcataaaaaagcagtgaagttggtattcacaaataacagaaaggagcttaaagttgacaactttgtatccaaatcaaagacatatctgaatctaaattacagaatcctccatagattacttacatgatcatttcagagtagaacacaaaacctaatagatctgaaatcagaggaaaaccccaaatgtacaccaaaattgggggaaatacgaaatcaaacaagaagccctatttgtgagtcagcgaaaatgcaacaaaccacaattgaaacaaaaaagctcgatctcaacgaagcttgaaatgaagaacatgaagaagaagcgtcagattaggaacacaacatggtgagacaaaaacgcagacacaaagacagagacccgtaatttatggtgagagaaaaataaaagaaagtgaaaagaagagggagaagacctcgattcttgggattcgattcctcaactcttgctcttggtttttttcttccttcaaaatttgaagatcgaaattctgggaattgaaagaaaaagttggaaactttataatccctctttcgatgtgtgtgtgaattgcaaaaagactaagcactaatcttcttcttcttcttccttctttctcagttgttttttgttttctctttctctctctcgagcaattttatatcttttttgtttgggagattgattactactgtgattaatattgttcttttagttactaaagtgattacccgtaaattaagggtttaattggttctaattaaaacaatggaatattaatttatttaggaaggaaagtgaataaaaaatataaaaaaaattaggttagagaaatggattgagcggctttattattccgcgtggaccccgccacgggaaatatgttcgatggcaatgtcaaaagccaaagaataaatgtcaaacttattgacattgtatctagtttttgtgtttttaaataaatgaattgatgagacaatatgtaaaagctgagttatttatttctcacaacatcttttaagtccaacctccatatatttttcctgtaaaatattttgtgattttttgggaggtttaatatgaacatgatactctgaattatgctgtttgtttggttgctaaaatttcatattaaagattcttatgcaaatctgtagagaaatcttttttttgttagagacattttgcatatgtaataggaagtaaataaacttgactatgtaggagtagatgttttacttaaaaaatacaaaaattaagaaattatcctaaattacagtaacttttttgtttatacattaaaagcataaaattaatacttaatttaaacagttcaacaaaatagtaagaaatattggagaataagaatggttaaaaactaaataaattaatatcatatttaatttaatggaaaaaatagagtagtaattttttacagccaactatgacacgaaccaatcaccgagtttagttagctttattcgttatgattcgatttaataactgagatttgagagagtaagaccattcttattaatggttttttaagacaagtcttatgttaaaagatgtgtcttataactaacaaaagtgtcttaaagtctcttacttaaataggagacttttgttaattataagacatgtctcttaacataaaaattgttttaagagaccatcaataaagatgatctaagagtttacttggagaagaaaaaaattgcggcatacattgaatggtaaacttgtttttttgttcttttggtcaaaagttttggcaaaatttaatatcatctaatcattgttattttgtttacggttcgtcattattagttgattatcgtttcattgttttgcttgggacacaacctacgatttcttccaacaacaacaaagtcctcgctccggagtcaaaatcaaactaagtaaacactacgcattctctttacaattatcatatcttctttaatatttttaaggttttccaaaaaagaacactttttttttagtctaatgtttcttattaaaaaccaagagttaatagtactgatacaatgaaaaacagagctattgtatctcaaaacaaagcatatatgttcttaaatctcatacgagaaacatatggagggtatagagttttagtccatctatatggttgtaatgtacatgcttaagtgtaatgtacatgtttcttggattaatgatgctcataagtgtggaagagcctgaatcattcggaatgaccatggtgatattatgttctatgcgagagagatgtttctacctgcctcaaaccgcattgccgcagaattgcatgggatcttttggtactacaaagtctgagtgatttacatcaggataatattgaaatttggtcagattgtaatggtgctctagaagccataaatgattatctcaattggccaatgtatttttcttacttatacatgattcatcgtttaatctcaaaatttgggaggatcgtctttaaactaccatctacaaaagtgaatgcaatcgcaagggatatagctttgagtgtcacgaaagaaggacaatacatatcatatttagctcgtggaggtccgagttggttatatgcacagactaaagcagaaaaacataattttcttgttgtaatcagcttatgtttctcgtatgagttttaagagaatctattctctgttttggtatgcaatatctttgttttctctctgtatatgtgtttttactcttgtttttttattaataaaacattagactgcaaaaaaaaattaatgaaaaaattagagaattttttttttttttttgcctgaaaaagatcaaaaatggcatgaatatgaaaaaaagtcatattcattgattgtgaatttttttgttagctaagtaattaaattaggaactatagaagttttgttttcgtaaacttacaaaaacaaatattaaatatgacaaaaattgatttcaagttctctctctttgtcatctattacctactataatctttcactaatcacaatgcacaactcaaaatttttggattttttaaaatagataatgcaaacaaaaaattcacccaaatcgatttgatattaattgaatgaatatcttgatcttcaaattgaattactctctagcttttttttattggttaaatgtgaaagtttatttttagatttttaccaaacacagagaaaaaaaaaaaaaacaataccgcaaatacgacaaaagagcataaaattaatgacattaacgaaatgagaacgctccgatggtaaaagtcacgacgaaaattttgatgttgccacgaggaaacttttgatgttgccacgagtgaacagcgatctgaaatcaactctcaaactttagaaaaaacggtgcttacactctaacaagactacttgcaatggaggtgttgaataattattcaactgtttaattaatagaaagggggtgttgaaaactgaaaaaaccaacgtggattttagggtgttgaatctgtataacatgttgaattattattttttgggctcatgtatgccacatgtcactattttattagatggtgtgtttcacacactcaaaacgaaaatagagggttttctattattatttttccgataaaaataataaattattgtgaagctgacactggttatattattatttgagattttagagatttttatctcaggcctatctatctacaatcaattattatgtagcaaatagttttaaaaaaaaatatttatatgaatatccataactattgaagctctataaaaagaaacttagttcatttcatttagacacatacaaaaaaatatcatttctatcataattttcttattatcctcaaaaaacttttgcttttatttttaatttgatttttataaaatagatatcaataattattattaatatgctatcacaaaaaaataaatatatatgtaaatataaattataaaataataattgtaggttagagtgttgaattttattaaaagaaattattgtagtgtttaaaaattatgttggaagaaagagaagatgatgtggaataaagagaagatgatgtggagtgttaaaaagtgaaaaagaaggatgttgaataaatttgccattgcaaatagccttagttaaaataaagttgatatatctaaaaaaagcaaaacacttttctaaaccaaacaatcttctattcaatcgcgttagttacactctaacttagttataataaacgaaaacaaaacagcatatgagttttaagagcatttatgctctgttttgggctgtaataactttattttccctttttatcagtatttttacacttgattttttcataatgaaatattagactgcaaaaaaaaaaattaaaataaatttttcttcttaattcgccagttaaagatcaaaaataacatgaatatggaaaacatcatattcattgattgtgaatttttttgttagctagttagttaaactaggaactatgaaagttttgttttcgtaaatttacaaaaacaaatattaattatgacaaaaattgatttcaaattctctctttgtcatctatcgtctgccattatctttcactaatcacaatgcacaactcaaattttttggagtgtttaaaatagataatgcaaacaaagaatctacccaaatcgatttgatattaattgaatgaatctcttgatcttcgaattgaattacactctaacttgtctttttttggttaaatgtgaaagtttatttttaaactttcaccgaacacagagaaacagaaaaccaaaaactataccgcaaatacaacaaaacagcataaaagttaatgacattaacgaagtgagcacgctccgatggtaaaagaaacgaggaaacttttgatgttgccacgagtgaaccgcgatctgatacgagctctcaaactttttttgttactcttgatcttcaaatggaattacactctaacttttcttttattggttaaatgtgaaagtttatttttagtttttcaccgaacacaaagaaacaaaaaaccaaaaactacgccgcaaatacgacaaaaaagcataaaaattaatgacattaacgaaatgagcacactcctatggtaaaagtcatgaggaaacttttgatgttgccacaactgaaccgcgatctgaaattagctctcaaactttggaaaacggtgcttacacctctaactaagttaaaataaaatgtatatatatgaacaaaaacaaaacaccgttctaaaccaaataatcttagattcaatctcggtggttacactctatcttagttataataaacgaaaactaaacaccatatgagttttaagagcatctatactttgttttgggtgcaatacctttgtttttcctttgcatctgaacttttacttttagttttttaataatgaaatattagagtgcaataaaaaattaataaaaatatgagataaatttttcttcttatttcgcctgaaaaataccataatgacattaatatggaaaacatcatattcattgattgtgaattattttgttagctagttcgttcaaatagggactaggacctatagaagttttgttttcttaaacttacaaaaacaattattaattgtgaaaaaaattgatctcaaactctctctttgtcacctattacttcccattatctttcactaatcacaatgcacaactcaaattttttggattttttaaaatagataatgcaaacaaaaaattcacccaaatcgatttgatattaattgaatgaatctcttgatcttcaaattgaattacactctaacttttcttttcttggttaaatgtgaaagtttatttttagactttcaacgaacacagagaaacagaaaataaaaaactatgccgcaaatatgacaaaagagcataaaattaatgacattaacgaaatgagcacactctgatggtaaaagtcatgatgaaatttttgatgttgctacgagggaaccgcgatctgaaaccagctctcaaactttggaaaaacggtgcttacactctaacttagttaaaacaaaatttctatatctaaacataaacaaaataccgatctaaaccaaataatcttagatttaatcgcggtggttacactataccctagttataaaaacaaaaactaaacaccatatgagttttaagagcatctacgttttgttttgggtgcaatagctttgttttccctttgcctctgtacttttactcttggttttttaataatgaaattttagactgcgatataaaatttactaaaaaatgagataaattttcttcttaattcgcctaaaaaagatcaaaaatgacatgaatatggaaaacatcatattcattgattgtgaatttttttgttacctacttagttaaattatggactagggactatagaagttttgttttcgtaaactttcaaaaacaaatattaattgtgacaaaaattgatttcaaagtctctcttcgtcgtctattacctctcataatctttcaataatcgcaatgcataactcaaattttttgaagtgtttaaaatagataatgcaaacaaaaaattcacccaaatcgatttgattttaattgaatgaatctcttgatctttaaattgaattacactctaacttctcttttttggataaatataaaaatttagttttagatttttcatcgaacacatagaaactgaaaaccaaaaactatgtcgcaaatacgacacgtgaaattttttgatgttgccacgagtgaaccgcgatatgaaaccagctctcaaattttgtaaaaaacagtgcttacactctaacttagttaaaataaaatttatatatctaaacaaaaacaaaacactgttctaaaccaaacaatcttagattcaatcgcggtgattacactctaacttagttttctaacttagttataatatatatatatattatatatatatatatatataaacgaaaactaaacactatattaaaccaaaccatcttagattcgatcaaaaccaaaattcaatatatactattttcatttagaaaaagacagaaaacctttatctaaaaattgaaggatttttttataccatcgcattaaaaggaaaaagatagcatccaaaatccaaaaataaataaaaaacatgattacctcaacgcttcacaagaccacacatccatgaaaatgtcacagattcataacctcaacctgagattcctcattcttaaaccccaaacctcccaaattctatcgaaccttcacaaagctcacaaaaatggaggtcgaaggcaaaggaggagaagctggaaccaccaccacaaccgcacctcggagattcgcacttccggtgaacgcggaaaacaaagcaacacctgtccgactattttcagtcgctaaacctcacatgagagatttccatgtctcatggtttcaattcttatcaaaagaatctatcgttctttacttatacgtgtcttctcttctctaccaaaatcatacaaacaacatcacttataagaatgtaagaaagatacaataattaaaaaaattaaaaacaacgttaataaataatgttgctactacaataatgaaatttgttggttgtatgatcattggtcgtaatttttgtgtatcgtgtggcttactcatcactccatatctctaaggctttcactagtcaaccacagcttcttctggacaatgaatacaacattgtctgaatcttgatctgaatctgagtctgtcttggtacctacttcttcccaatgcaatgcctttagatacttcttcacaaaatccaccactctttgtttatcccttatgattataaacccgctcgggcgcagtattcgatccatctccagtaacaaatccacttcactacatccttttttcttgatatccgatataatatcccaagcatggaggagatcatatgtccttggatatgtcgagaatgcttcacacctgtggtacattcaaaaacatgctaaaaatttcaaattcggtgtagaaataatgtgtcatttcgaaaatttaagtataaaaactgaccagctatgaaccgcgcccattaaacctctgtcatatatcagtttaagcgtgttaggtccgtcctcaggaacaacattcattacccagacatctttttctttcagagcagcagcaaaagagcccatgcttgctttcatgtccattatgttcctcactgtatctgattcgattcttggactcaagagatcccaataagtatctactctctgcctccaaagttcctgtatgaataagaaacatatgatgtgacttaatagcccatggtcttagtttgtcagttgcaataaacagagaagttatgggtttctatataccgtgtccttctcaaacatgcccgttgaatatccaaaatcagcaagtctgggaggaggagaggttaaccgagctggccatggagctaatccacttcccttggttttgtggtcatctaagacaaccccaaaaaagagttcagaggaaatatacgctgttattgaaaagcgagaagaagcttgaaaacttacggtcactgtaagaagtaatgcaagcttccatgtttacgccccacacagcatcagggtcattatcagaacggcaaagaggaggctgagttccaggttctctttctagataacaatcatttgtcaaaggtttctgccaaataacagtttgattcctttttgccgcgatcttccaacacatgcgctccacaagagcactcatttctctccagattctaagatcctcttcatcttgtgcatatgcctctggagatgaatatgcaaaataaccaccaggtctaagtactctgtctagctcgagaagaagaatcccgtctctttgtagccaatcgattctgcaacgtgaacagtgagaaagttcaaaagatctgcttgggtatgggagcctctttgtccctaaaacaccgagggaggcaggaatccctctctcaagagcaaattggatttggttctgatgcacatcatttggagccaaggacattgtgagaatatccgatgataaaagataacctccaaaactcgcaacaccacaaccaacatcgaaaaccgtccttagccttccaccgttgttcagcacgttgttaggatagttaagcatctgaaaaatttccaagaatacaattagcaaatgaaagaataatatacgttctcttgtacaaacaccaagtgtaacttccttacatttgccatcgatgcaatatacttatcagcaccataatgaaaatgtgtgcctccaccagggaaattaatcttatctcctttgacaaccatccagttttggtcagacttctcatgtgcaagatgagtatgaggtatgttcactttccacacttcatctctgctttttggccatttaatcggaacctaaaacatattggaagagaaaacagttatgtcatcgtaactaatcatatcgataaaactgtataacatatcgatagacaccttatatccattaggaggcggaatcaagcaattgaatcgtctctcaggaggaggacaatgacgttcataatgctccatcaaagacaaatccagcttcaatctcatttggtatataagattcctatctaagcaaggaataagctccgaatgtcgatcatcacacaccttcgtaaaaaacaaacacattaacatataccacttgaacataaccatcattgagaaaacactcaagaagactcacaggaaaacttctcggagtgaaaccatcatcaacaccaaatgagctagaagtgtcatcctgtttagtatcatcatcatccccacctaacccgagttttctcccgtattcgatagccgatgctctatgatcagaagagccgtagaacagatatacgaaaacaagaactaccgctgcaacgcaaaccaaagcaatcacccgcttcttttgccctccatctgatcttcctttcattgccttcttatttgagataaagccaaacggagacccaacgttccgagttaaaggatgcagactactaagtgaagacttcagctttaaaaattgatgatttctcactagttacagatatttgaatctgttctatatatatataaaaaaagacaatgcttagtatctgtaagaatagtaacaaaaagaacacacgcacatataccaatcttaaccacacacaaaaaaagagaaatgtggtctactactactcacttagagaaactaaagtattcaattatcaacactagcaaagaatctggatttttaggatataaaagcactcaattcacaaaacagttgattcctcactgttctgttagaatttggtgtgtttgttattaagtatttggtccgaatctttgcacgaggaatcaactacaatttcccagaataagaacagatctggtgtgagaatgaaacagaacaggatcgacccataaatacattatccactggtgtatcaatcaaacgataggatttaaaaatcataaaagaagcttataaacaacgaattcaaatctaccacagtaataatgatagacaaagcctcacagagcacaaccgattcgtatctcaaaattgaaactttaaacaaaacagcgaaacccagaaagatcaaaagaagggacttacacaacccaagtaaaggttctagatttggaagagacaatgacagatctcaaaggcaaaaaaccgcagtgtgttattcaaaagagagaaagaaggagatggggagagagactcggatctgggattggtttatcactcttctaaattaggaaagagaccaactttttttaatcttcgtgtgaaatgagaatgaaggcagcaaagcgacacactgcaagtgaaagagagagagagagagagagagaatcggtggaggtcgttatttgttcatcggtgtttatataaataaatatactttttctacttttatcatcaactctagtttttgtcggcgttcgttctgttttgtatatttgggataattcgtaagttgtacacctgtttcttttctttcatatttgccaataaaaaaaatcatagtgtaacaacacgttcagtggaatgctagtcctctggaaaaattgttaaagggtgaggtcttagattcgaaaaactccaaacatactaacaaaatgtataatgggtcagaagggcttataggatcgatgcgctgtaacgccaactgaattccacggaacaggttgttacatatagagtttgtaagattgaaggaaaaattaacattgatcatgtaacaaagataaaaagacaaactaaacttgtcgtgattctatatttcgacttctttgacttcaccacataacatacacacaataaaaaaatttgtagttatcttttaaagacaaagtaaaaaataggagatagtttcaatatcttccagccatagaggagatatgcttcaaacatgatatagcttaatgacctgatcaatgttggcgcgacaaacaggacatcccattttcttgttttcaatctctttcaagcaagaaatgcatccggcgacatgtccacacggcacacacactgcttcagatggtgcatccacacaaatcacacacagtccatcttctttattcgcagtttttggagaaggaagtgacatggcgacacgagtcaaagcatcatcacttagtgcaggaacattggttgttgttgttgttgcttgagatgttttcataaaccttggaggattcattggctgtataaatttccaattagtattaaaggttaaaatgagacaaagagacacatatatcacgaaagttaattgtatatatcttatggcatatacctgtggaactcctttacatgcctcagaaaaccaattcatctgtttcatgtcgcctttgatctcagctgctagcttaagacgtatttctggaaaaaaacaaaagaaactcatgtttttaattcacgagacataacaatttgtatggttactgaatcttaaaaaataataaagagttacttacgtctatcgacttgagcccaacgcctcgcctgagaaatgaatccgctttctcttctctgcctcatggactttggacctatccatgataataaagttcaatcaacaaggaacaaacagattctttataaaatgcatgaaaagtgtgaggaattacttctggagtcatcaataatcatcactgaatcatcacaccgaaatgattttggttcctctaagtttgctttccacaaaggtatcaccattcttggttgtgcatcctagtggtaaacatctcaaaacttagaaacaatgacactatccaacaagattcccaaaccagtgaactagataatgaaaaattcctcaagagactaaaggataatttttaagtacctgaatactatcatacagaaccaactccaactttaaaggctttgtagggtttcttgaaccagttggtacgacaactacccatctgcaaaacatgttccaaaaaagattcatattcatgtgtgcgctacaagaaagtaattaggtgctaaagattgaaaaaattggttaaatggtaaatactcacacttttcttgaaagaagctgaggagcaaataaattaagcaagctggagccagaatactcacgcatacaaccagagaacaagcagatatgactctacaagaatcaacagtctaaaagttataaaaagctcatgactcgtctaattgcagtcaatatgaaataagtgttacaagcatatacctcgattgcgcgtacgacattactgtaaccttcatctctagcaacctcgagagctgtcttaacatcatcatcaagaaccaatggatttgctacaaaaataacaacacatatatgcaaatataaatgaaaaaccataaaagagtttttactcatcaaattggtaaagaagattcaaaccaaaacttaccaccgtgagacagaagtaacttaaccgtgtgtacgagacctctttttgcagcatggtgcagaggagtcccaccattgcaacctaataaattttgaatgaattagctcaaaatatggtttgatgagaggcatatcaagaaattttatagctacaaagaaaatgaattgatgataatagtaccagaacgataagcattgacattggagcccaactcaagcagagtttttgctacatcatatagatcgtcgttcgtacaagctaagattaatggtgttctccctaatttatccaccccctgaatccaaaaccatagtgacaattcagaaaacaagaacaacaccaagaggataattactagagatttggttgaaaaacaaaacaaaaaggcttttaaaaagatgggagtagggaaagaagaaaaacctcgagtcctgctccttcatggtgaagtgatttgataccttcgacgttgttgttactcacttcttgaaacagcatctcatccttggactgtgattgttgttgccccatttttagaaggaatatcaaatgaattgaacttagataggagaagaagaaagtcaagatctattttatagaaaagttcttgccttaagttaagaaatagggaaaagtaaaggaatagattatgaaaaaacgcggcaatagccaggaattgattgtataattgcttcaaaaagacaaaaaaaaaactattgctttgaagactttttcaagaacaatgaagtgtcggagaaagttcagagttgactggactcggttaatagaaaacaaaaagtggagactttggagttgactcaagaaaatgccaaatatatcttcttaagatggacttgatggtaaactcaaacaagaatctaacaattagaacattaatgcaactcttgagatgattattataatctttatgtccaatttaaactttcataggaaaaaaacaaaaataaatctagttttgttttccacctaagaaaatcgtacgtggatcaaaaccttcatacgtttacatatatttgtgacataaactcaaaagaaaacaataaatctttgtatctattttggtcctacagtaatgacattccaatgatgccttgttcctcaatctactttgccaaactgctattatacacatgatgactagctttcatcaagaacttcttttgaatcctctgcttgatcagaattcggttgtgtaggagaagctggtggttgaggttgagttggtgtaggaactgaatcagaagctggtggttgaggttgagttggtgtaggaactgaatcagaagctggtggttgaggttgagttggtgttggaactgaatcagaagccgttggactcgatgatgaagcatgatgactatacctcttaagcaacctatcttttttgctattccaccattcttctgcttgatgctcatcaaatctccgtttgctacaaagaaactcaattcacaaaaatgatttacataaattttgatataaaagagaggagattactatgaagttaaaatacctgaatctaactcttctaaatatctttccgccattcttgtgcaatacataagtaacataaacacccggttcaaattgttcgataagttctttccctcctcctttagacgatgatgaagcttctgttgtccctgaaggttcttgagatctcatgttacctccattagatgattgtttttcctctatgttttgatcttgtgtgtttgtagaaggggttggatctcgttgacccattcccaaggatgttgtaggtaaacatgattcagatgcttcgctcgcatttagataggcttctgcttgagaattcatggattcaaaagcttcacatcttgatacttcaggaggtagtttctcttttaactctctcaactgtgataaataaagttttttaaagtctcattgcttgtttctcaaggaaaaaatctattaagcatgttttatatataagaagaagcttacatgttcagcgacagatttcatgacctctgttgctgccttatgctttgaagaatgttttacagctaagtcagaagcttctcttgctgttttctttagtctttggatctctgtaccttgattatcacatttctctttcaaatttttaatctgaaagtgttcattaatgtattagatccaattttatgtttaataaacctgagaatttcgagataatattacgaacctggctttgcaattttgtcatttctttgtttataacaccgttagatttcttcaaagtatcaatcatgcccctggaaaatccagaactgcgtggagggcttgatattcttgatgatcttgtacccgaaggaagtgtcgatgtcgaagatgaggcaacgggtttaaaggcattttgaatcgcgctaagagagcttgggaatgcaacatctctaagttgctggagagctggaacttgtgaagctctgacaatagaagattcagatcttgatgacctaacctcagaatacttgactggttctgttttgggggacagtagaatccttgaagaccttatatctctgtctggtcttcctgtcccatctagtgaccgtgtaggagttgtggaatttctattagcaacattagagttataaccagactctccagctttaagttttgtgtaacaagcatcacatactcgatgtggtttccctggagttggagctaatgctgctttcaaagctttcttggaactacacgcatggcaatgcactaaaccgcagttataacaattatgcctctttctcgtaaaaccaaatgcttgacgacaaccagaacaaacagattgatcagctcctgagacccacttatggatgcatatacttgatgtaaagttggaaccacatgatatactcttcacatgcctctcccttagagcttcaactaatgttggcgtttttcgatcatccttgtccccatgtcctagtcttccatttgaaccttttccccaagtaaagacttcacttctcgatgtcaggacagcaacatgatgatccccacatgatatttcttcaacgaattcaccaaccaatcgatcttgaaccaagcaaggcagtttaccatcagaattcgagctaccaagctgaccatgtgaagtccctcccatagtaaaaacatgtcctgaggttgtgagcgcaactgtgaatgtatgaccacacgcgatttggttaaagttgtagtcaattagtgaagatacacaagttggaagaagataagtctctttatttccatgtcctagcctgtttttatcaccatcgccccaagtaaacaactttctagatgaggtactagtaccggtctgattcataacttcaactatagctaccgtatgccacacgccacaagctactttcaaggttttaagaccactcaacattttcacttctttagggtatgaaacactctctctatctccatgtccaagaacaccaaacgctccatcaccaaaagtgaatagttttccattagcagtcgcaagcgcggaatgccacgtgccacacgcaacagacaagacttgaagtccttccacaggaccagagactcttttcggtatccaatgactaagatcacttccatgtcccaaaagtccaacattatggattccatctccccaagtaaacaaatctccggacgtagatacagcacaagtatgatattctccacaagcaacaaaatctatattggtaagagcaagaaactcaacaagttttggacgacaaacgtcgacttgaataccatgtccaagccttcctccagcttcttcttcccatgtaaagacttcaccttgtcttgtcacaagagcgatatgccttacaccgcaagctatctgatgaacatcaagtactacatttgattccaagggttttggaatcaatacatctatttttacagttgtggagtttacgaccccgtctggtgatatcccgtcgctccaaacttctccccagacataaacatctcctaaggattctatgtcatcaggaccagaagttccagttgaacaacttggtgtgcttgagacactaattcgaaaaccatcagtacttggtcttagcatgtttccacgttcatatcccacatctgagctaccaaactttgttggagagttctggattcctaaatcaatggatgttcttccacgtcgagtattgtttggtgcgaaatctatagatgcagtagaaggacgaccagtagagaaacaatcactgtcatgtatctgaaaacgagttacatgcatatagttgtatattagacgtaaggaaattatatatagtaaaatataggaaaataaagtcacgtatacacactcacctcagggatctcacttttggcttgcttgttacggttttgtctaattaaagacttaagtcctgcaaaccaaacctctgtttcagctttgtctttgcaaatctgtagaggataaacatgaatatatgtgacaaaagaatagaaaaatcaaagaaaattatatgttattgttttactaaccagatcaagagatctatctccgttgtgatatatgagagaaaatgacaagtaatccttttcgggacgtaaatatcttcgaaaaacagcctataaataaacaacaagagtttgtgaattccatgaaaaatatttctttttgagttatagaatcaattaagtaatctttggctacactcacagttctttgacctgggagaattcgtgaaactgtagctaacttcaaacctttttcttctccgtgtgataaccaaaacaatgttgtttcatcctgttgaagcgcgatagatagtaacaaatcaaaacggttttggacgcagagcctaaaaatgtaacgttgtcgatacacacacttatatatgcgaaagaaagtagaaataccggcgaaagcctgaatgagcgaaatttaggccttcctttgcggctatacttaagtaattgagttccttttttcaaagaaacgagtgcctacaagaagttaatgtaaatatttagaagaaagatgatggacatatgaagtttttgcttctaaattcaaacaagaaaatccctaaaacagattttaatccatcttcgttgttagctaatcacaaactttgtagtttgattatagtttttgtttgttcgtttgagtaaaagtaacttaaaatgaatgatgttttataatcaataacatacactcaaagattaatggctggttgtagcctaatggtgtagtttgtattagtgtcaacgtcatgtcataatttaggtttaaacagttaaactctaaagcgtgtgtgtgagttataaacgaagaagaaaacatcaattcaaaaacaacactgaaagttttggtaagcgattgagatttgattaagctacaaaaatgaaaaactattcctcgtggaaaaattgaaatccaaggattttctctaccgatttaatttaatccaaggtttactattggaaatccattcaaattaatagaggaatagaaagaaaaaaaattggagaaaacaaacttggtcgatgtcacggtcatgattgacatagctagagggatctgccattccatctgagaaaactcgaaagaagaaaggcggagagaaggataaagctcaacaagcatcaggtggtttgattcacctgtcttcatagatgcatccgtcttcaattccttctcctacttgatccactactatgctcattcaattctttttttcttttgggaattttaacacacaataatggtaatcaaaaattttaatttttgaaatcaattagaaagatttagggtgagtgtcaataatgatcctaaaaattaggagaatggtcaaaattataaaaaaggagaggaccatttctaagggaagatcgccattttaggagtgtttgaagctctcatgcatattcccttccacatttcactctcagcataattcatttaattaaaataaaataaatattgttagcatgttgtgcatccattttggtgtttgcgcatacaaattcaacatgaaaatgtctatttaaattagtacaagcacatactaattagagttcaccaatctagtttaaaacttttggcagatataacacgatcgggaatatatataaaaattaaaaatagataaaagtctgcaagatgtattagacctattttgggaggcaagtcatgtatcttgtagagctcaaactttgtctataaataacctgatctttacctaatttgacccaaatctagaaaaaaggtacctagattaacacccaaacattgttgccgcatgtacatattttcaatattcttaaaataaaccccgtgaaagaatgaagaatatactctagatctctaatacgatgagaaaattatatactagatgttgccgcaggcacatatattcaatattcttaaaataattatatattggaattgacttttaaaaattagttcataaaattactttatatttcttcatttgtttttttctacttatcttctaattaggtatatcaatattttgacaaaacatgtttgtagaagtagaactatcacaaatacattaggagtctagaggacacataaccacgactcctccaccgaaataagggagtcccgttaaagacaagttaaaggcagctaaaacaacatgtatatgatcatcacgttaatatttctttggaaagtttggtaaagccaagaagtagaagaacaaaaaaaaaagaaaaaaaaagaagaaaaggaatctcacctttgagaagttgttaagaggcatatatatgagatataaatgctatctcctacgcagccaactccaaaaacctttacgtttatgaccttttacattggcttcttttgatgccttatctgatttgcaaggatgtctatctctatattggttgacgtcgtcagaaatattttcagtttctatttcttcagatgcattgctccaatcgctgatttgttcgatttcttctccataagttccaacaccgcactgaacgatctcgtaggcgtcagaaggtgtgcagctaaattcgaacaatatctcactatctacttcaaaatatctatctctgtcgtggaagtcatagtgaaataaacaaagatgttccgattgtgttcccggggactgatcaggtaagctgaaacaatgataaacttcgttgatggagtcaccgtttttgcttatgagacgacacaataaactaataagcctttttctccccgtgattaacctggtaggggaaatcacaaagcaagctttaaatcttgaggatgcagaaaattgactatcactctccggacgaatagtcaagacatttcctttagcttggtgattgaacgtttcgggcacttctcttcctggtaaaattctcaaactgcgaaagaatgattgttggataagatctcttcgtgtttcttggttcagtttgaagcaattggtgaaatttaggtccacaaatgaatttaagcttgaaacgcaagcaacactctcgagtgattcgcagtcacatgcatttaaccacctgatcgaaagaggaagctgtggcagcgattttaggtttctacagccccctatatgaaggaaacttagctcatgaagatctttgatccaatctggaatcttctcaatacccgtacaccttaggtctagatacgttagactcagagggagatatgttaatgtcttaaagtttccactgccgcttatcatgagagttctaagccgagtgcaaagtattattgatgtaggaagttcttctaccagtgtgtcatctataacgagtcttgagatgtgtgtagaaatacctggaaattttttcagttggaagcaaccatgcatgttgaagaaatcaagagatgccaagttgatgagagttggaacaacttctagctttgtgcagttgtgtattaccaacgtctctagttttcgaagttccgaaaatgaggaaggaatctctaccaaactcttgcaataactcagctccaacctctcgagatttgtagcatttgaaagatctggaagttccttcaaatgagaggatcgtgtcaaatccattttcttgagatttgtaagtggctgagtattaatcacaggcaaagaaaaaaaactgagaacatgatgagaaagtaaacgtacgtattcaaaatttccaagtaaatattctaacctgtgttccttgccaaagcttctcaagctggctctccttcatatcaagttctacaagatattctggatgaaatgtagtaggaagagcattactcgggtatgcttcccaccgaagcaaccgtagatgaggtggaaactccaagtcctcaggtatgtccacttgatcatttttaacatatcttgtattgtagacacttaggaatcgaagattacgcattcttttgaaagctccctcacttatgataactttgttgattccagatgtatcaagcgatatgcctaaagcagctctagtatcctataatataccccaaatgaagaatatgttagtacaacaggaaaaaaagaaaaacctactttactaaagaattatttaactcgaactaaaataacttactgtatcattctcaagaacataacaaatctcatgcgcatctattaagatgtgacgtttccaaggctcttgtctttgaattgcttttctacccacttgttgtagtaatttgtgcattactattttcccactggtagatctatatacgagtgatttattggttaggatttttaacccttgcttgacatccaagttactgtctgcgagcatagcaatcacatgctcatctttgttgtagttgaaaaagaccgcaatgtggagaaatagagcttgttcttcttcctgcaagctatcatacccaactcttagcgctccctcgatatttcgatctagactagtttctagcctgtccaatagagcttcccactcatcttcccccttcccgcgtaaagatgaacccatgacacgaagacccaatggaaggttatcaaaaacatttgttactctctttgtaagctttttgaaaccatcaggtggagagctttttctaaaagcatatatacaaaagatctcaagagcttcttctatagatggaaaacctacatggtaagttttgttgataccatgttgctccaaaagccctttatcttctgtggtcacaatgatcctacttccaggaccaaaccaactagtctcattagccaaagcctctaattgctttagatcattcacatcatcaagaacgataagcactttttggtcgcatagcctttcttgtattgcacctaaatggtatatcctcataccattttggtttaaaatctttgaaagaagttgctcttgtaaacgcagcttaaaaccatactcgtcaagacctctattatcgcttccactaagattctccacaaaacaactaagctggaaactacttaaaagtaaactatataaagctctagcaatagtagtcttaccaatgcctgcaggaccacaaattccaactatcatagctccatccttataatctaaatctaacaagtacttcatttcctccaagtgtgcttcaagtccaaccatatcgtcaaaatctctagagattgtagaatttagtttgtttgaaatatctcttgaaatcttttcaatcatctttgattcattgtccctaacaagtgagaataaaaaatcacaatgtaaaattgataatacatatcagtttaagaaaaaagaataatcacaaaattaattaaaagaaaacaaacaaaccagttttggaagtgttctccagctatgtttcccacatggttcaaagcttgactccattttcgcctcttctctttcgtacttcgagaacacgtttcattgaaagacctcccgaattctcctgtttgtttccgcacatcagatggatctactccgtagaagaccgtcatcactatttgtcccatagcttccttgcacttgacaatctccaacaactcatccaaacaccagctcgaagaagcatagttcttcgatagcaagatgattgagattcttgattccttaatggctttaatgagagcaggtgcgatggtttgacttctctcgatctcctgatcatcgaacatcgtgatcccattgtagttaaactgtttacgtaaatggctcagaaatgttttacggacgtctgctccgtggaagctcgtaaacacgcggtatctccaggtgcgagacgaagacgaagaagaagaagccatgagataacgtgtcaagaaaagttcaagatcacatatacacaatgtttctgaacgctatgacatatacgaagaataaactggaaaacgcgtattcactattttgacttttgacttttgagaaaaagagagatgaagcttcttcgtattttcagtctcagcttttgatacgtaacggacaacattaaacaagtttatttctgggtgaatttggtgattaaaagacagtttgactaactacttattgaccataattttttcaaaatgtttgaatttcttaacaagtttattttttaaatttttaatgtttgaaattaattaaattaatattcatgacaaatatatttttgggctgacaagaaaacaacagttcagtcataatattttgttttttcccaagaaaaaataaaaaagaaatttcgtatcacgagaaaaaagttctatctagttttgaaaagagaataatttttatgttttcgaacccgtaatttctagaatctctacgttgcttacttaaaaggttaactactagaccaactcatagttggtttggttttcatgggacttgggacacaagattcatgattgaaaacaacttttaactgaacatttgcggttttgcagtatcagattaatagtcttttttcttcttttttttacacataattcattcattgattttgaatcgaatacaagagttagatacatccgtaatacattattaataaacacattcaaacatacatccacacaattataattaaatattttaataaacgataaaaaggtgaatttcgactatgctttagaaaccgaagtcttgctcgtcaaccgtttctttccttttcagattcaatcccaaattgatgagatcgtcgtttttggttatcatctcttcgatgaaactccataatcgtctaatgttattgatgttacttgatatcttctcttgcatcaattcgtagattctccgtagacatgttataccaaaattccagattcgttatactccaaataactctttgaaatcgagtatcaatggctttcacttactggaacctttgatctccggcatcatcagattaatattgtaatcaaagtatcagtagttatgtttgtcctcaaaattagtactttatatatcagctattttcttttattagtagagagaactagtaaaaagtttaactggtcggtgccattagtgtcaaatctaaataataacaggaaaaaaaaatcaattatagcttttggacgtcaatttttttttagtcggcgtagaaaaaatgcacttttcttggacatccaatttaaaaataaaaattgcatagacttacatattgttaggcggaaattaaacctctagcatagaaaaagaaaatccatgcttattcactacaaaaatatgcataaatcgtttgaaaaggtaaaagatccggtaacgggctaagaaagaaaactatttggtgctccttaagcacaattggccaaataaaagatttcaagcagagttcggcataatttcccttactctcagaccaagccgacacaatcgcaaaacatgtttttttttttgtaacttatgaggctattgtgtcctccgaagtaccagtttggtttcggtctaatgtaatagcggataaaccgcaaaacacaagattgttcgcatttcaaaccaacgttgaaagagcctttcaagcttatgtggaatcttgtaatgcaaggacgagacttacttgttgtactggaaatatctgaatttctgactattgtaagacagaatgaagcagataatgtccaagacatgtcttaaaacaaattggtgggtgcgtatgaggaatataatgctatggttaattataattttctggaatgtgtagagaaatgtatgattgattgattggttgttggttaaataaataattattagctcaacagtcccaatccaataattaggttcattagtctttatccaataaaattatgggccttcccttggtcggatctcacatggtcttagcttcaaggagcataacttacatctttacagaacttcaaaacaactcggattcatacatctttaaaagagattgtgaagaaatttagttaaagaaaaattcttaagatatataactttactttcagagtgtatgaaaataataaacttcctcatgaaaacgctttaagacctgaagatgtgcaaaaacaatatgcccttttttaagccagaatctgagtttttgccatccagagtaagctaagagaacccactttttgttccctactttttacccaaaagcaatagcgttttaatattttaatcgaagaatgaaaggctcgtagcaaaatataaagcatttcttgacaataatacacatttggccaaacctatttttcaaaaaaaaaaaaaaaagtaagtctctgaatggcttcgttgcggcaaaagaagaagcaaaatcctgcgaagagggcatggaaaaactttacaaacatggtcaagtcgaagttcagagacatggagatcgcttcatcggtcagagaatcaacggctcgtgtcttccggttcatttctcgccgtctcatcgttccttttagaacaaggtaccttcaaaacaatagctacacggacaaatactactatagccggaaccaaagttctcgacagtttctcaacttcatttctcgatctctcaccaaaccaaagcgtcgtcagtatggatacgatgatgaatactctcaaatctatcaataccaaagccaatcacgcggtgaggggacaagtgggagcaaagagaatgttgtgagacgaatagaagagcaaaaagaagaagaagaagaagaagaagaagggatgccggagattgctgattcgatggaagatgcttggaggagagtggtggctgcatcgcctcatctgcaggttaacgagagagccgacgagttcatctacaagtttagagaaagtatgaagatggagaaagagaggtcgtttcttgaattccaagaaaggctaaaacgaagtgcttgattgatcgatcactcatgagtgtgttccatgttcttcttctgatttctcttggttgaattttttaaagaacttggttttctcattctttcttctttgttacaaaattcgagaattttcagaagtgttaacaaactttttttctacattatatttttcttatgtaatgtgaatacatatggctcaccactctaaaaaattgtatgcatgggatagaaatcattcttgttttttttgtgaatgtataaacattcttcttcatagataatttcacttctttttttttgtcaaagataatttcacttcaatgtaagaaaaaaatcattttatttgcaattaaaaaaaaaaggtatattagaaaagtaatataaaaagaagcaagaaaaggaaaagtacagactaagttggacccagaagaacaaattctaatttaagcttccatcacaaataatgaatcatgatgatacatgccaactaattccactctcacatcatgtaattaaaaaggtactataaactcatatgatcatatagtttttcactttttctagacatagcttaagatatttgataaaagcctcactgcaacttcataataatggatgatataaagctggcagattaattcctagattacttagatagattcagttttgttctaggatgcacaaaaaaggttacaaaattatttgttttcttactgtttctggcaccaaaacagaaaatgccttagatgagtgaaccatggccatacatattcatatcaggatcatcttcatcttcataatctggttctgtagatggtctgcttctctttgcctctcttgctattattgattgtcctctccctttcttcggctttcccctgtaattttatcacattggtcaacaaaccaaaaccatgtatcagagacatacagggcaggtacgaacgaggtaaagtaagctaggtcgggaaactaactgtgtcgacaaaccacccttggatcgccctggccctaattcagctcgtccatctatatcatacagagataaagtgtgtaaaaactgatccaagatttgcaaaagtgaattcagtgtagttgtttgctgcagggcttaccttctcttccaacaccaagttcttcagcctgaatacatttcagggaagatcaacataccagtctaaaaacctttctctctaatgaaggcagagtaataaactaacaaatgacagtcacaagaaaagacacaggcatttcaaagaactccagtctctagctatttgacatcatagattcagctttcacttaagtttgaagctgctagagatattagccatgtagtaatcaaccatatctaaagaaactatattctcaaaccttttttctaaagaaggccgagtaataaactaacaaacgacagtcacaagacaagacatatagtcacagaactctagctctttcacaatcatagattcagctttcacacttgtttgaatctgttagagatatttgccatgtagtattcaaccatatctaaagacactgattctcaaaccaaactacctactagaaagggaaccatatgttctttcggcagttgattctattgcaaaccaacacaacaaaacaaaaaacgtctttgcatatgaaagaaggtgataaaaattgtctaaaacatacagctggtgatgtaactgaggacaatgagaagactctgtcttcaggctgaaacttccttgaccttttagcactgcagaaatgggttcataacttcatatcaaactcaatttctcgttccacacaacaaaatactaaaactgagaagttaccacattctctaaagtgtatgaagctgcaaatagaatccaaagtcaatgttttttcagaatcaagagaagaggagaatgagagacctagcagtactcttggaggaagacaaaaacccttcaaagcctttcaaagcatttccaatatgactcgattcttgaagatagcttgtctccaattcataaacctaagattacaaagaacccaagatttgaagtatgccccaaacaataatttctctatgaaatcgaatttcacaattgaatcgactctggaccattggtgccctaacctgtttctcgatgcttcgtaactcttggcgaagcttctctcgcttgttcagaagagaagtgagcatcgcaccaggatccgtcgaactcttttgccctaacgacattttctgagaaagaaatccacaaattgcgcagctttttcccttcccagaaatgggtggtcgctgaaattcgacgcggaggtaaccgttgcctgatttgagtcgattacgatggagacgatgattctggaattcgatttgggggttttcaccaatggtccggtttgatgtcaacaaaaataaaaatggtccggttctcttttctttttataacttttttttatgggtcagagattttattaactcaactagcaaattgaccaaatagtctacggccaaatgtggctacctgctttgctaaagaaagaatcagccaaagagttggcattgcatggaataaacacaagtaaagtgagaagcatggaaaaagaatattgaaaaatattctacctcttgtaagaatattgaaaaatatggtggtatttgcgatcccattgaatctaatgtttaatataaaatgtagtgatgtgcaacaaaataggtaaaataagaaatgctttgttaaaagtcattgatataaaaaagtttgatgtccatggaaaaaaaaataagtttccagtataacgcttgattggttcgatacttcaatttgaagctgttgaattattttacagtagaacgtgcataaggtccaaccaattactcagcaaactataataaacgagtgatgaacttagatttctggtagcctaaaatcactagcttctttataaagtttccactatgtcacatattctcggtgttttatgttaggaataggagcatctccgctgaaaccccgccgcaactttctcccaacaaaatagacatttagactttattaagagacgacgacttcaaagtctttaattataacttaatgacttaataactcgggtcattttttaatctttgtcttgaatttttctcctaattatttccgactaaagaaacactttcccttaatttatatataggtgacctgaccaccactccttccgatcatcatgactcgacgtggctcgagacaaaacttttaatataaatggacgaactttttgtctcaatctcgtcaacctttagcaaaacctcttgcattactgatcttcttcttccacttggtaagtctttctctgccccctcttcatgcaatggttgacttttttgtttgtggtcgtggaagttagtaacttaaatctgtgtttccaaactatttgtgtgattagtttaggtttgcgatggacagttctgaagcagagctagatagaattgaggcacaaaggtcaacagatgcgtctcatgatcaacagaacagaacatacttacccatgaacatacacggttcacaagacttctctcaaagcggaggagatggcgtcacgccacttacaggagacaccgaatctgtgccagagttccttactaaccttagattgtcggatctttacgctatccgtggtgaagatgtccggatgattccagaggtttttagtaaaataagtgatgggaacaaagaatgtctggagaagttgagaagccgtggaatttcagtggcacgtatcaagagcaatacaggagattcaattcttcatcttgctgttacatggggtcatctagaactagtgaaggagattgtctgtgaatgcccgcgtcttctcttggagcaaaactcaagcggtcagacaccgctacatgtggcggctcatagcggtcataccactattgttgaggcttttgtcgcattggtaacattttcttcagctagactgtgtaatgaagagagtgagagaatgaacccatatgttctcaaggacaaagatggaaatactgctctgtactacgcgattgaagggcgctatttcgagatggctgtatgtctggtgaacgcaaaccaggatgctccttttcttggaaataagtatggagtatcttccttgtttgtggcaataaatactggagatgtatctcttgtgaaagcaattttgaaaatcataggcaacaaggaccttaaagggaagaagtctaacttggagtcaaagttacaagggcagaaatctcttgcacatgttgctttggtgacccagagtataggtttgtttttcgctttaaccagtagcagctgcatttattctattcaaatatgtaaaaccagtttgagacgggaatttcctcctcaaggcggtaaaaatatttgtatgtatactaattgttgttcccaattgtttgagcaggtgtccttgatgttattcttgatgaatatccaagtcttatggacgagcgagatataaatggttggacttgtctttcactcgcagcacatatagggtattatgaaggagtatgcaacctcttagaacgatcaacaaagggtgtttatgtctgcgaccaagatggttcttttccaattcatacagctgcagagaaaggtcatgaaaatattgttgaagagtttataaaacgatgtccaggttcaaaacacttacttaacaaacttggtcagaacgttctccacattgcagcaaaaaatgggaaattttggatttcgaacatgttgataattaataaagatacggaacatctgggtgttgggcaagatgtggacgggaatacacctttgcatcttgccgtcatgaactggcactttaaatccattacttggcttgctaggagtagcaagatactgaaagtgcggaacaaaaacggcttaagagctagggatattgccgagagagaggtgaaaccccactacatctttcaggaggtatgtataatttcgtttcatacaacaaaatttgatatcacataaatgatttatagctcgacccccattttttgagttacagaggtggacactggcgctcttattatacgctattcactcaaggggtttcgaatctgtacactcattaacaaaaccgtcagtgccactagaccctaaaaataacagagattacgtcaacactcttctcctggtagctgctcttgtagccacaatgacgtttgctgcaggttttacaataccaggtgggtttaacagctctgctccacacttgggcagggcaactttggccactaatccaactctcttcatttttctggtacttgacatcttggccatgcaaagttccgttgcaacaataggtattcttatttgggcgcagttaggtgatccagtgctcattcgctcatccttacatgtggctttgcccttactgctttttgctttactctgcatgcccttggcattcctttttggcgtggtcactgcagttgggcatgtgaaatggcttgtagtcatcatttgcattatatctgttttattcttttcttgggcgatctttgtccttggccctcacgtcatgctacaacggtcatacgtttctcccaagtacgctggtgactttctcgtgacttttatgcagtataaagacataattgggctttttgtgtctttgataaagtttcttttttgtggttgttattaagagtttgtagcctattcaaaggcattcttcgtatgaaaaaatcatcaaaagtttattgatgaaaggagatttttgttctctttcaaaataaaaataaaaagctagatatgatggtctctctgagaagcggtatcttggtagctttaactgatagctcaactcactcaatccgtagtcatcgaacaccgacttcacaagcttgtcgtgcgttatttccgtatctatttgcacaactctacaccatttatcgacggtgttaaatacaaattctttacccaatcgtatcgagagaaggatgaaagaagaatgaggaagacggtgatgaattggaaattccgatgatgtgaaaaactcatgtgaagaagacgagttgaaaaaaaaaacgtttcgtatttcctttgatgatgatgacatggactgttgcatccgacatcatttttttaattgatgaagtgacaagtaagccaccaaacaaacatgaaaatttgcctaaataaatcagccaaataaagttatatgttagtcgcaacatgaatactattacagtaattaaaaacgaaaaaacggcaagttacttcagccgtttagcaaacaaaataaaacacacacacatgattcgattgctaaccaacacaagaaacaaaacaaacacatctttgcctataagataatgtgtataaaccatacaactagtgatgtgacggaggacaatgagaagactatttcattatgctgaaccgtccttgacgtcttagcagttagcactgtaaaatgggttcatatcatagtaaacgaatcactctacacaacaattacatgctaaaaactaagaagctaagttaccaaattctctatagaaatagcaatcacttacaataaccaatgctacataacaacttttgagtccataactgataaattgatagaaactgtttgaatttgcaaacccaaaaccgtttcttaggatggagaaatgggtttgtatttttctatttccgatcaaggaaaaatatatcaggcaacaactgcggaagatagggcattttgggatgaaggaggaaaccatagttaacaagcggaaacaatttcaaaggttgatttcaaagatcataaagtcaaagtcaaatccccatagagagactcggttacggaagtgttggtatccgaatatccgatagtcatagcctcagaacttatgttagaatcaataggtttaaccatgcagtgtgcactttggaaatcaagccaagaaaagctatccacgcaaacaatttgcgttagagcgaaatcggataaagagaaagaaaatataggatttaaaaatcttatagcgagtaagacttatttgaaacatcgtcaaatttacttcttttggtgtatatttctcattatatggcgtatatatctgtttatgtaagaaattgtttccaaaaattactgtatactgactttgtaatcttgttttgatatcaatgaatttataaggaaaaaaataaaataaaaatataaagtatgatgtacatgtaaaaaaagttgtttcaagcgtaattgttttttggctagagaatgaatatacagcaacagtaaactaataaacttgcgatgaactaaaatttctggtattcctacaatcaatgaatcactaatttatctataagttttagctatatccgcttaaaccccgcctcaacttgctctctggtctgggtatagttgggctacaacagtgaaaccgtaattaggaaagaaatgataaaaacccaatccagaagcttactgcaagataaagagaaagatcatgaagaggtaggagtgattcatataacaaacagggtcacgttgtcactttctcccagaaaaatacaaatttagactaactatataaggagacgacttcagagtcttctaatgggttagtataactcgggtcatcttttaatctctggctttaaagacatggtaagattccatatatatgaaaactctgtgtgtggtggattgcttttttcatttaaggcaaagataggttttaaggcagaagacaagaacgacctttggcttatttataggagaccaccactttcacttgagtcgagacagtaacgacatttagaatttgcattactcatcttgtcactttctcccaggaaaaaaaaatacaaatttagaccaactatattaggagacgacttcaaagtcttctaatgagttagtaactggggtcatcttttaatcgccggctttcaagacatgtacaatttcatatgaaaactctgtgtgtggtggattgcatccaagacagttttaagacagaagataagaacggcctttgcttatttataggagaccaccactcctctcgataaccatgactcgagacattaacgacttttaaaactaagggacgaaccttaagcaaaagctcttgcattactcaaattcttctgccacttggtaagtctttttctctgccccttctgcatgcaatggttgacttttttgtttgtggacgtggtagtaactagtaaacttaaatctgtgttttcacttttcaaaccatttgtgtgattattttaggtttgcgatggacagttctggagcagatctagatagaattgaggcacaaaggtcaatgttagtttctcatgatcaacggaaaggtacatgagtcatagggtggccacaaattttgaatattcattacatgtgctttattaacgagtatagtgaccctatataaattattattgacacctatgcaaaaccaaccaatctacataaaaaagataaggaaaaactattctacttgattcttgttataaactaggatataacactaggatataactagcaatataccacataacaattatattgttttataaaaatttaataaaattagtcttattcaacatgtcttttattaacaaaataattaataaaaatataacccatatgaattaccggttaataatattttaactttttattaatatcgattcaaacctgtttcaccatataacatgtctcacaatataacttgtcctatattattttaaattgtttatatgtttaaatatatttataatattttaaactttttaattgaatttggatttattaattataatattataacttaaaaaatttactatatcaggtaaacttaaacatttcaactataaaaaaaaccgtatagaaactttgtaaatttggatatttactaagttaaatttcatgttcattaagattcgaattcattttttatcttattttttttatggctctgaacgattgtctaaatattttagctgatgttggatgttgaactcaatttattttctattaattgagtaatatatgttcgttttaaacaattggaatcacaagaatacagacaaattaaactttttatgtcttatatgatgattcaaaataattaaaaaataaatcttaatgataggagaatcattcttttaaattttatgatttttttattttataattgatgttaaaatcttttaattgtaaagttgtttggttataacttataagtaatgacattctttgtaaatactaactgaaaacaaagttactctctaaaatgtaattcaaaaatattaatatagatagttaagaactaataaatgtcactatccaagatttatataatttagtaaaaaatctacataatttttttttaacaaaacgcgcaagtgtttatgttcttttctcttatgagtcttcaacttgacaaatctcgattagttaaaatttagattaattttgaattgactattagataaagatatttatgatttcattaacttattatattctgatatttacaaatttatattttagatttttcataagttaattgatttcatagttagaactcacaaattttgtctcatgaaatgtaagacgagtggttaattcgattgatgaaataaaacagtagaaatattttggcaaaaagaaaacaatcgtaagtgatacaaaatagttagaagtgataaaaattagcgataagagagctgtaaaactttcgatatatctacataagatactaactactatactagtaaataactattttgaccctggtaacaaattgttttaccagatttctctcacagcggaggagttggcaccacgtcacctacgggcgacaccgaacctgtgccaaagttccgtactaaccttaaattgtcggatcttttcgctctccctggtgaagatgtcgagatgactccggagatttttggtggaatgagtaatggggaaaaagaatgtctggagaagttgagaagcaatggaacgccaatggaacgtgtcaagagcaatacaggagattcaattcttcatattgctgctaaatggggtcatctggaactagtgaaggagattatctttgaatgtccatgccttctattcgagcaaaactcaagccgtcagacaccgctacatgtggctactcatggcggtcataccaaagttgttgaggctcttgttgcatcggtaacatctgctttagctagtctgagtactgaagagagtgagggactgaatccacatgttcttaaggacgaagatggaaatactgctctgtactacgccattgaaggacgctatttggagatggctacctgtctggtgaacgcggacaaggatgctccttttcttggaaataacaagggaatatcttccttgtacgaagccgtagacgctggaaataaatttgaagaccttgtgaaagcaattttgaaaaccacagacgacaacgtggaccgtgaagtgaggaagtttaacttagattcgaaattacaagggaacaaacatcttgcacatgttgctttgaaggccaaaagtataggtttgttttttgttttctttaataatcagtaacagctacgtttaatctgttaaaattatgtaaaaccagcttgggacgagaatctcctccccaagatggctaattgttgttcccaattgtttgagtaggtgtccttgatgttattcttgatgaatatccaagtcttatggacgagcaagatgaagatggtaggacttgtctttcatacggagcatccattgggtattataaaggactatgcaacatcttaaaccgatcaacaaagggtgtttatgtctgcgaccaagatggttcttttccaattcattcggctgcaaaaaacgaacattacgaaattattaaagagtttataaaacgttgtccagcttcaaaataccttcttaacagacttggtcagaacattctccacgtggcggcaaaaaatgaggcctctcttactgcatatatgttgatgcatgataaagatacgaaacatctgggtgttgggcaagatgtggacgggaatacacctttgcaccttgccgtcatgaactgggactttgactccattacttgtcttgctagccgtaaccacgagatactgaaattacgaaacaaaagcggcttaagagctagggatattgccgagtcagaggtgaaacccaactacatctttcatgaggtatttctgattccgtttcatacaacacatttgatccctcataaatgatttatagcttgacctccatatttttggaattacagaggtggacactggcgctcttattatacgctattcactcaagtggtttcgaatctgttaagtcattaacaatacagtcagtgccactagaccctaagaaaaacagacattacgtcaacgctcttctcgtggtagcggctcttgtagccacagtgacgtttgctgcaggctttacaataccaggtggttatatcagcgatagcaaaaaaccaaacttgggcagggcaactttggccactaacccaactctcttcatttttctgctttttgacatcttggcaatgcaaagttctgttgcaacaatatgtactcttatttgggcgcagttgggtgatctagcactcatcctcaaatccttacatgtggccttgcccttactacttttttcattactatgcatgcccgtagcattcctttttggcgtgatcactgcaattgcccatgtgaaatggcttttagtcaccattagcattatatctggtggattcttccttttcgcaatctttatccttggccctcacgtcatgctacagcgctcacaccttccgcccagttctggtatatttctcaagacttttatgctgactatagacatatctgagttgtttgtgattttgatcaaagcttgttttggttgtgtggcgtgttccgaataaatcatcaaaagtttatagatcaaaggatatttttcttctcttttttttttctttcaaaaagctacgagatatgctggtctctagctctgagaagcggcatcttgatcatacaactcattcgaagtcctatcagaattatctgtagttgtaataaagcgtgaaaagtatatcattcgaagagattttcctctaaaataatcgagtgatattttattattcggtttagtggataccagtttactaatctctcgaatttatgaaccacattcaaaggagatgagtttaacaaaaaaaaaaggtaaattgttttttattctcgtcgtgcgttccacatgagtcgttttcaagagcaatatagacgatacttcacaagaattattatttttgttggggtataaaaatttgaagatacgtttggcaacgacaatacgacgttagattgttccaagaggtgcaaaaacttagggaccctctttattcgttcactgtaaccactgaccacaacatgactaggtagactcttctttttgtcaatgttgatgtttatacgattttgatgagactggctctatcaagatatgaatctctgatcatatctccactaatctttcatcttgttattccctcatttacttttgatttccttctctctctctcttttttatgtatacaaatttttctttatttcgcttcactaaaccccaccatgtaattgtgtgagttttggcgaagtggcgcaacaccgtagagcacaccaacactaacccaatccattttatgaccgtaaattttgttgttgattagtgtatttttttcttgtttagttattctgagaagtaaattttttttttacaattagtttttaaacatagtaaaataaatttatgacagattataatattattttaaaaatcaataatatctaacaaattaaataaacaaatcacaaattactatattttaaataaatattgataattttaattatattattttgtttattggttaactcgcaggatatgcgagttaattcatttgagattgtaatccgccatatactaactcgataaccctgactttttagaaatctaaaagtataaccctataataaaatagattatgtccaactcgcggattctaaacctgaattgacatggcggaaccattcataaaaccataccaattcttgcgttttggaaagttggtttccttttcatttctttgaatttgatcctagattgtgtagttctcaagctcatgctcttgctcgtcaaaaacgtatcaacgatttgcttttcctttagacgttcttgcatcggattggtttactcaactccactcgatgaaaaagttactatcttaaaaagaacaaatgcaaattcaataaaattccccaatatctacgcatgaaaatatgattctgtcttttttttgtttgtctatctttcaatactttaaaaagtgtatttctagaggcgatttgtcatttcccgaataggaatttgagtaaaaaaaaacactctgttttttatttccactaatatcaaatcggcgaatatagttcccaccattcttatctccttgtcgtcactcggaattttttaaataataggatcgctttaataatataatctctataatttatagttccttttccaatattggcgtctccgttgaagctttccacaaatctcaaatttgtttggagactctcaaatgtatccttctctcgacgatgatttcgtctctgatttgttttgcttcgatcaaaggttcgtcctttcgcactcttctcttccttcaccttcctctgttttctctatctctttcgattcagttgttttatcgaatttgatcccttttttcaattgcaaaatcatatctttaatgttcaattcgatttctgtgaaaagtgttgttgtttttttcgcatttcagggggaaaggttgtgtcttttgatgataatttgacgaaccctaatgtatctgaaagctgttaaattgaataggagaagaagtagctttatggatgttgttgtttatatttactcctattgatggatgtgaatctttttggtcatgatgactcttgtagcaatggagcagaacttgatgattacacacagtttggtgtaaatttgcagactgatcaagaggatacctttccagattttgtgtcatatggtgtgaatttgcagcaggagccagatgaagtctttagtattggagcttctcaattggatttgtcctcgtataatggagttttgtcgctagagccagaacaggtggggcaacaagattgtgaagttgtgcaggaagaagaagtagagatcaattctggttcatctggtggagctgttaaggaagaacaggaacatttagatgacgattgctccagaaagcggtgagttttgaaaaaatataaactttttgtgatttggtggtagttggttgtgtttttaattgaatctgtgatggttgttgatagggcaaggactggatcgtgtagcagaggaggaggaactaaagcgtgtcgtgaaaggttgaggagggagaagctaaatgagaggtatgtttagagcttagtctatgtttttgttttgtgaagtgagttgtctcaaggggaaaaaaattgttgttgttctgttaggtttatggatttgagctcggttttggagcctgggaggactcctaagactgataaaccggctatactcgatgatgcaatccgtatattgaatcaacttagagatgaagctcttaagcttgaagaaactaaccagaagcttttagaggagatcaagagtctcaaggttggttgttcattcactttcacctaaaccaagaatcttgttcaatgggatgtgaacagatttctaagtttgtatgtttctttataggcggagaagaacgagctgagggaggaaaagctggtgttgaaggcggataaagagaagacagaacaacagttaaagtctatgacggctccatcttcagggttcatacctcatattccagctgcatttaaccacaacaaaatggctgtttatccaagttacggttacatgccaatgtggcattatatgcctcaatccgttcgtgacacatctcgtgatcaagaactcaggcctcctgctgcttaaactctcaattgtttttttttggtacccatagggaactcatagagatttctgaatcacttggtttaggattcttccgtttggcaagtgtaaaagctttactcttgatcttgggttgtatttttcttataaaataaatataactccagaaacttgtgattcttctctgatctatgagttcgaaaagttcagttatcaaaaactttagctcagaccaaaaatgttgctctcgttgagagttgaactcaagacctcccgcttactaaacgggtgctctaaccaactgagctacgagagcttcttgctgttgtattcttcgctatatgaataattatttttaccattcactgagtagcaacaaattagccaattaggaccaaagtgacaatgaatttacaaaggttgagctgatggctattccgtaggttaataaatcagtcgcgttgtgaaataagttggaacaataacattgaagtggtgtctctaagaaacaataatccataaatatttctacaaaaaagtgtcataaaagcttcttgaagtaagcaaaatgatttgcagagattttgcctttcaatggcctcatcagatagactctttaaacccatcctggattccaaaatgaaaataaaatacagaccgaataaaaccgatgaaagatatggcttcttcagtttgcttttgcctttggagcctttttcctgagttgcctaccgtgtttccttgagtttttcattccaatgaagaagagcagtcctccaagaagagccaagctctgaaaagttaacacagaatagaaaaagatctcaggtctatgtcaacagttgtttaaactttcattaaacaaccaatatgacattagctaacctgtgtaaattttgaaaatagttggccgaattcctttctgtcaacatcgtagttgtagaaatcatacagaattggggtggcaacggcttgatgcagaagctgaaaccagatttcatagagttaaacagggttgttttcgtcattctgataagcgacaatatattcgaaggaacagttggtgcataccaagagataagctcccaatgagctgccaaagacaaacaatagtcccccaatacccttcaaggctatagcagcagcaacaagaatcttcatctgcaaaccaaagcaaagtgaataaaacaggaaaacaaaaaaaaaaacgatttggttactgtgtttggacaaagaatggacatgaagaagcacatacatcgactggtggcaattgctggccagtgtgagttgtcacatggtttacaaaggcattgaattttggtttcaaagatttagctgatcggccaccatcttcaccaaaatcattgaacctgaacaatgaagtcattaaaaatattggaactttcaatcagtgagggaaagaacaaaagtgaggtaaactgtctctgtagagactcaaatagcaatgcttttcaactaaaccaagcagacagtcaaggggaacaaagaaagttttcttcaatcaacgtataaagatactacatttgtaacgtcagaagaattgtgtaacttaaaacaagaaattagaagagaaactccttatacaggcattcaatatatgagttcattggttgagtcaaattgattcacaacaaccataacaaagcacctagtaagattttcttggtttcaagactttagaatcatgtgcttaaataaccaaccaccaactaccaactaccaacgagaccaactcaacaagaaacttcgcaacttcaggacaacccacttaatgagtaataaaagaaagaacttaaaaaaaacaaagtgctaaaattagagaatgatgtaataacagaagaaaacatagcaatgttcgacagttattgaccaatcagaaacaaaatctaaccagagatatcttatctatcaaattcaaccccagcaaagcaagcaagatccatacttttccttcactgtccaacattctatttctctttctcctccaagaactcactcactcagctataatcgagctaaaacctaaatccatgattcataatttgtgcacttctctaagacaacagagacaaagagcccccagattttgaattttctcagatataaagaaaaagcagatcctacttacagatctaaaccgagtaaagaagaggaaattgcttactcttgccatgcggagagaagaaatacggaaacaaacagagctctaccaaggaaagaagctaactccattgaagctctctctttgccttttttttttttttcttctccgaatcaaacgcagataccagaaagagagagagaagcgtcagatttgggtctttaaatcaacagacaggaggagaaagaaaacgaagaggctgattttgaaatatttagaaatttttggggtcaaaaaggtgagatttttatttcgtcgacctactcgcgcgagtacaatgatgttggtttttgtactcgctacttcgttgggaagtaaacgccacgtaggatgctttacacgttgcctggccaatgacgttcgtccgagtcatttcaagtatttaagccggcaaccaataaaacgcgactcattattactaacattttaaatcaaaactaacctcaaatcaaataccaaactattttatcaccctttggtatttatttagaaaatcaatataaatttgatattttaaataaataaaattagttttattttaggataaaactgaaaaaatttatatatgaaatcgtgtatatgaatctgggcaacttttaaatagttgagattttgtttgggaatttttctatttagattcattctgttttatgataatggtaatataaagaggttaaattttaaaaagcaacaattttacttaaatttatttcatataatataatttaatacaattttgcataaagttttaaaaagaatttatactgtgaaaaaggggtcacaactaaaattatcattttttggtgagtttttcttgtcgtcttgtatgctaatgctggtttaattattacatgtctgggagtgtgtaaattatcttttaggaacataaaagaccaagattgatagatgcgttttcgaacgaaaaacagtttgtgttttaataccggtttaacatggcgtaatttcagcaatcacaaattcacaacaccgtttctccttctccgataactactacaacccggttatctctagttcatctaattagctctaaaaccgattaaaccggttccatattttaaacaaccaagcctaagaacaagcccaacaacaacactgaacaagccaacattgaacatgtttattatttctgtgatcacagttctagagtttaacattgtctctttctcccaaaacatgtgtttttcaaataaaccaaagattcactctctgaaagacgctttcttagagcttaggtgttgcaaacactctagtctctaaaccaagaatcccacaaagctccggatacaaactcttccttatcgacgcataaacctcaccgctccatttcttcgccgccaatttctcaccaaggcgcacactagccacaacaacaccttcctcactatcatacgcggccgagtcaacaatccccaaacccaccgcttcttctcctctaatcttcttcccactcaacaacagctctctcctcgccgcactcgtcccgatcttagccctaaccaacgccgagaaataatccggcatcgaaagcccgatgtcaacttcactcatatacagaaccccacgatctttcctcatgaacacgtaatcatggctcaaagccaaaatcaatcccgcggcggcggcgtggccgttcaaggcggcgatcgtcggcatagggagatcgagaagcgctgctaccaccggtttgaatgattcaaccatttggtgaagccggtttgcggctccggttttggatccggcggtttgagcccatgcaagatcgaatccgttggagaagaatttgccgttggcggtggtgatgaggatggatccacgggtggattgagatttggcttgttcgagaagggagagaatggtggcaattgtgtcggggtggaatctgtgttcgccgtctccggttagggttaggaggaagagatcgccgcgtttctctaacgtacacatggtggtgatcggaggaagaagaagatttctggatgataatgaaaacttgaaatgtgtgagaaatcgtgttgttgttgaattgtgcaaatatagagagaaatataccttatcctgattggtctatgtttccattttggttcaatctgttgtaaaggcccatgggccggcgtgtacgagatctctttttttggtcaaacataatttcatttggatttaataccaaatataatttagaccttgaatggtactaatatctaacatgtttttagtttttgatttttctgaaaaaaaaatttaatttttcaatcaagattatgaaaataaatattttctctacaaaaagagcatctagtttttttaaaagggttttcgcaaatttctagagaaaattcaaaatctctttaaaaagttttatcctcactaatgtcaatgagaaatgatataaaccatcttttcctttctcataggattcttcttctttccttttttctttaaagaaatctataattttagttacacatgttttttttaatacaatttatctttataatcgtttttttatatattttattatcggatgactcagtaagtctcggtaaaaacataccgaaatgctaccgaatatactactttcgatctaaatagaattgtaccgtcacactatctgatcttcatagtcgtttcctcgtccgccttggatgtccactcacatctcgttggaattaacgacagaagaagaaaaagcatagctcaagtgtaacaagaaaatatgtgtttattgtttggtttttccatcttcgttactgacttattgtattggttttacattcaaaaaaaaaaaaaaaaatggttatttttgtgtaacacttcctctctctatatacaatgttgtcttttggattaattccccacaccatataaggtttctcgtgggttgtctaattcggttgagtttggttgatcagactgcacccgtttctcattctatcttatggcgatatatacgattatggtcatatgacgtaatttggatattataaatagatgcatgatgtgacatatattgctgatgctagtacgattatcaagtatgaattacaaatattctagctaatataacttatcaatagttgtattgatatggttattaatattgttaaaatttcaactaaatgaaaaataaaaagacgtaggttagattaattatgttttattggtgagaaacaaatacgtgcttagtgaaatggacgttgacttttgtcggcaatattcatatttcaaccatttttctcccaacaagacaatgagagtttctagaggttgtgagtggccaagttatttgccgttaaatcaaccatccgacaaagctccggatacaaactcttcctaatggttgcatacacctcaccattccatttcttagcggccaaactttctccaaggctcactgtagcctccaccacaccttccgcactatcatgcgccgctgagtccacgatcccgagagccaccgcttcttctcctttgagcttcttcccgctcagtaacagctcccttctcgcgatacctgacccaaccttagccacgaccaacgccgagaagtagtccggcaccggtagcccgatgtccacctcgctcatatatagaaccccacggtctttcctcatgaaaacgtagtcgtggctcagcgcaaacatcagccccgaggctgccgcgtggccgttcaaggcggcgatcgtcggcattggaagatcgaggagggcggctaacaccggtttaaaggatttgaccatttggtgcatccgttttatagcaccgtgtccagcggattgagcccacgcgaggtcaaagccattggagaagaactttccgtgaccggtagtgatgaggacggatccttttgtggattgagactttgcttgttcaagaagcgagagaacagaggcgatcgtgtcggggtggaatctgtgctcgtcttcgccggttagggttaggagaaagagatcgccgcgcttctctaacgtacacatggtgcgtacgttaaggacttactgatttaggatggtacaagaataaggaaagagttagtagaaaactgtgatatagaagtgagtgttgagtaattaatagaagggaacccaactgtatatttattagacgtgctttgccaccgaagtctttaaattgggtaatcttcccaaccattttggtgtcaatgttattaaatgcagacgagacaaatgtgtatgaatgaatgtgtgactttcttgctgaaaatgataattgtaactgtttgtccttggacgtaattaccattttgttctttcgcagctattggctaaatcaattttggtttccttgtctccacttgattaatattaacaacctttttttagtgcttacacacttacaactgttcgtatgattttttagatatcttgtcatggcttttgaatctatgaactttatttttgaagcatgattgattgagatctctgctttagcattactcatggacacattccataagagaccgacatgagtagttaaattagttcactaactctttaagttgtgcaaacaacattagttaggttaatattagtccgccaactctttaatttattaaatacacaagctacatagaaaagaacagtgtctttagatccatacttgaccagccggtctaaccgataaaactgttaactagacatataacaatcattattttacaagatcctataattcaaatacatattcaaatatttatttaatatgcaaagatttttattttataccgaataaatactaagatttatcttgtttattgacttttatttttaaaaaattttataccgtatttatgtccgatcagagccgtccatgaacgcaataggaccaaatttatgcttgcggcctcaattactacaaataaaatattgacctaatttttttataactttcagtaaaaacgttgattatttgattcttagatacctatggtcgtcaaaagtttgagtccatctaccttcatttaccttgttattttttcattttcactcattaaaataggtctaaattttgttctttgcttgcaatctattaaatactagagacggctctgtgttcgattaatgacaccacgatgggacttataatacaaatcagtatactcatatattacaagatcatgttaactttcttactatttatattttggttagcaacatgcaatatgcgggtttgaataaggccataagggtgatgacacactgacaacactaacacaaaccattggattacatttttttgttcgtgtagaagttaatcaggcggctagttgacttgacttggcctgaaaaatgcaaaaacctcacatatttaagcacatcgtgacatggtccgatttttgctttcttttgttttgtggcttagattgtaaagctctgtccgcactagactcaacttacatattcatattcatattcacctctggtccatatatattataaaagtccaatagaacatgttcacgagaatctgtataggtaaacctcatccaccatttaacatttcatgaacatgtttgacttccattaacaagatcgatgtctttgtaatttaatattaaaaagaactttaacataaaaacaagcatggaaaattcaaaaagaattggtcaaagagtattgccaaaacaaaaatgtaaagaaacgggaaaagggaagataaagcagctaattttctttctccaactctgaccaatgaccatatccaagcgtgtatgtaatgtacctagtcaacatgttacaagtcgtggccctcctcaccttattatatatgtcatctacataaacatcagacatcacacaccaacatcattattatgttctttgatacaaaagtactcaattatcctacaattcacaaatctatctccatggcgtccacgatgcaaagaacaagcagctccgcggccagtaacgagaggcaacttagccagctacagagacgagctccgtctttaatgatcaaaccaacgtcttttagtaactggaacgtggcgatccctctcctttcaccgctcgctccttctctaacatcatccttcgaccaatcacatgttcctccgccgcagaacaagactgagataccagtggaagaagaggtgaagaagacaccagttttcaagaaatggcaacatcccgcgtcgccgttctgctacgagccaacaacgtttgtcccaccgttcatccaggtttagaacggttcatcaaaattttgtagatttgatgactcagctaccagccccgtgtgaattttgttcctgtgatattacacgcggttaactatttttcacgtttttgtatcagttttatcctctaagagataatattattcactaacaaagtattaattcaagttctaaatgggtaaaaaaaaatgcataaaacacatgaaacaaaattatgggaaaaacatggagaaaatagttgcatgaattctttaaataaattgtcaaattaacccatcatacatctagggttggacttttctttaaagttcatttcttcaaagtgttcacttttaacaaataaaaaaactaacttcatggattcaatatgggccgaactaaagcccagtaagcccaattcaatttaattctattttcttcttcttcttctagggacttgtagtacagtaagaactttcgtacgtttctcgcaaacaaaacacgaaaacttacgcttctggaattgaatccaaatcgagaatttcctttacaatgctctaaattcgtctgttatgttgaatccttcgtaagagagtagaatcgaagacgaatcaaatgaactttcgaaggtttgatctattgatctcttcctctgcattcgaatcctgtttttatgtagattcatcaatgtttaacaaatgatattgattctgctctcgatcgaatttgatctagatctcttcacaatctccagattcactctttctgaaatcttagttttttgaatcaccgacattcgaattcctgattctgagtcattgacctaattctagagttctaattacagttttccagattttgaattgagtgtatccaactagaattggagaaaattggatctgattaagaaccaatggttttgatttctgtagggagaatcgtgcttcgagaacgtctctctttgatggccttgatggacttgaagaaggtcgcttgagagcttcttcttcgtatgctcatgacgaacgtgataatgatgaagctttggaaaatcttcaggacagagtttcgtttctcaagagagtatgtttctttcatctatataactaaagaatcaaaatatcaacacaagcataaacattaggattaagaattgtgattctttattgtgaaatggatggtgctactgatccttattgtttgagaaagaacagtcccttaagcactgctaagtcgagaccctaaatgtatctttcgagcatcgaacgatgatctaatgctttcgaaaagtctagatataaagaaattgaacttagtttttagttcctagatatgtattgaaattgtagattaagaacattctctccagcattgctatcactagaccctgtataagtctttcggactcaacgacaaggatcgagctatgatgtaatgccttagaaaagtctagttatgaaaacaatgccttttttgttttcactcttgtcaaatctagtttgcaataacgcttgcctgagatgtaagttggtaataatatcttatcaggtgactggagacatacatgaagaagttgagaatcataaccgcttgcttgacaaagtggtaagctgaaagtttgatttcatctgtttcagtttgtagatctctatcacatgcttttcttctaagctatttgttgttgtatctctaggggaacaaaatggactccgcgagggggataatgtcgggaacgatcaaccgcttcaagttggtatgtaaataagatttcgtaccttttatatatgcatcaccccttttgtttttcgctatcaaaacttatatctgaataaaactcgattttaacacgacaggtctttgagaagaagtctaatcgaaaaagttgcaaactcatagcttattttgtgctcctgttcttgatcatgtattaccttattaggtaaaatacacttcttcttatagttatcaaaacacttgacttttcttagggactggttcaagtccttgttctttgactcgaacactgacaatctttcggattttgcaggctattaaactacatcaaagggtaaatttggatacaagaagaaagtagagtgttaaatgaatagtttcgtttgggacttccatttttggatttctcctgatgaatgaatgattcagacatagtaaacaagtcaagggaccctattgaaaccctattgaaaccctattgaaacaagacaaagaaagagattgtgaagagactagtgaaccaaccgaaagaaaaaatgtttgatagagacttgtttgtcacaagcaaaatcatctcatgtcatttcatgtaatgtagcaaaagcttctttatcatttgtcaactatttgatcttgggttcatgttagcagttttgtctacaaaaagcttaattgattgattgataagcttaattattagctttctgtgaaaaaaagtttagcactttgtaataaaaacaagataacttggcgtcttgtttccaaaaatttccaattttcagaattttaaggcgcaaataccgtcctgtatattgacattttgctaaagatccaaatacgtaacaacatgagaaatatcatttttgaacgactcgcaacaattccacaagttgacaggacactactatgcagaagagtttgattttttttccactttaggtaacaagttgacaataatcgacaagttcatttttggtttggtaatagacaacaagttgacatgtacatttccaaatggttcggtttctaggtcaaatcatcttaacaattatgtaaactatagtcttaaatgttgaatttacgagtgaataacaggttgctatgctaaatagtaaatttcttgaaactactgtttagataaatagtcaaataaccatgagttttaatatagctactagaggataacatttgagttctggcacaatatatagaaaaaaagtaaaaaaaaaaaaatgttaccttattaaatcgggagtagtttttcaatttcttctgatcttttagtatatgctaaaataccatgttagtaaatatgaatgtgatttttgtaaaataaatatattataacacaacaacagatgttatgctacatatattaaacagggtgctagattataaacaaaagtgttttggattcacatgaaaaatatgtgtaattatttgaagaagttagatatatagatcattcaaaaaatagtaagctacatggttatctaatatactgttggtagtgaatccatcaacctaatcgtgacatatatacaatgtacaatcgaaatcgtttctaagaaagccgacgaaatactcagcctttagaaagactagtatacgacatgtcctaccaccctaattactaagagaaaaagattcatgatgctgcgggaaatgacttgctttcttcaattaactcttcattcgagctttggttgctctagctcacaaattatcgtcgtagttaattgaatatttacaaggagctgactaaaaaattaaatgtacatgcacatacattggagcacgcccaccatggctatgctaagcatgctctcttagcagaagtgacacctctcagaagctattgggccataacagagttatgacacgggtcatatccgtcaaaagcacattgcttctagaatgcgaggtatgattgctaaaaacacgatcgacaaggaactcaagaacatcaacttgcatattgaacctacatacatgccgtatataggcatgtgcgaggagtattaaggatataggactggttaacttcggttatcactggtttggttgaatgtggtttactaaccacaataatcttatgtatataagtttaatctcgattactttgttagttaagttggttgtaacaacactttaagctgaataagaaaagttgttatcttcttcttcgtctctcttctccgatcttgaatctccgatgtatcggattttatcatggtatcagagcacaatatattgattccgcgtttgttgtgttcatcgggagagagtttcattttcgatttcttcttttgattctttcgttcgcttatgccattcgttatttttccgattcaccggagtatttttcattctgtttcttttacttccttcaattgacctttagcgtgagcgaatctcgttttctatacatcaaattcgtctcgctttctttgtaatttttcattcttactctgagaatgggatcttatgtacctccacctgcgaatccggtgactcgtcctccgatcaacaatggtgatcaaattcgatatccagtagatcaatatgagaatccgtactatcttcatagtgcagatcacgctggattgattcttgtgtcagatcgacttacgacagcttcagattttcattcatggcgtcgatcgatcttgatggctttgaatgtcagaaacaaattgggatttataaacggtacgattactaaaccacctgaggatcatagagattttggtgcttggtctaggtgtaatgatattgttagtacttggttgatgaactctgttgataagaagataggtcagagtttactttacatagctactgttcaaggaatttggaacaatctgttatcaagattcaagcaagatgatgcaccaaggatctttgatatagaacagaagttaagtaaaatagagcagggatctatggatatttcaacatactatacagctttgttaactctgtgggaagaacacagaaattatgttgagctcccagtttgtacatgtggtcgttgtgagtgtgatgctgcagttaaatgggaacatttacaacagagaagtagagtgactaagtttcttaaggaattgaatgaaggatttgatcaaacaagacgtcatattttgatgcttaaacctatacctactattaaagaagcgttcaatatggtaactcaagatgagagacaaaggaatgtcaagccacttactcgtgttgatagtgttgcttttcaaaacacttctatgataaatgaagatgaaaatgcttatgttgcagcatataacacagttagacctaatcagaagccgatatgtactcactgtgggaaagtgggacatacaattcaaaaatgttataaagtccatggttatccaccgggtatgaagacaggcaatacaggatatacttacaagcctaaccctcagctacatgtgcaacctaggatgccaatgatgcctcaaccaaggatgcagtttccagctcagccttatactaattcgatgcagaaagcgaatgttgtggctcaagtttatgcagagactggtgcatatccttctgaaggttattcacaggcacctatgatgaatccatatggtagttatccaatgccacatataacacatggtggaaacaacctgagtcttcaagattttactcctcaacaaatcgagcagatgatttcacagtttcaggctcaagtgcaagttccagagcctgcagcttcttcaagtaatcctagtccattggctacagtttctgaacatggttttatggcacttacttccacatcgggtactataatccctttcccttctactagtcttaagtatgagaataatgatctcaaatttcaaaatcatacattatcagctttacagaaattcttaccatcagatgcttggattatagatagtggagcctctagtcatgtatgttcagacttagcgatgtttagggaattaaaatctgtctctggtgtcactgttacattaccaaatggtactagggtttctattacgcatataggaactgtgcatattactcaaaaactcatattacataatgttttacatgttcctgattttaaattcaatttgatgagtgttagttctttggttaaaactatatcgtgttctgctcatttctatgttgattgttgtttgattcaagaactttctcagggcttgatgattgggaggggtagactttatcacaatctatacattcttgaaacagaaaatacttccccctctacatcaacacctgcagcttgtttgttcactggatctgttctaaatgatggacatctgtggcatcaacgtttaggccatccatcttcagtagttttacagaaacttgttagtatcattccttctttgaagtcttttaattcagagtcatcaccttgttgcatttgtccattagcaaaacagaaaagattagcttacatatctcataataatctagcttctaatccatttgatcttgttcacttggatatatggggtccttttagtattgagtctatagaaggttttagatattttcttactgttgttgatgattgtacaaggaccacttgggtttacatgttaagaaataaaaaggatgtttcatctgtttttcctgaattcataaagcttgtctcaacacaatttaatgcaaaaataaaagcaattagatctgataatgcacctgaacttggatttactgaaattgtgaaagaacatggcatgcttcatcatttctcatgtgcatacactcctcaacaaaattcagttgtagaaagaaagcatcagcatattcttaatgtggctagagctttactttttcagtcaaacattcctatgcaatattggagtgattgtgtcactactgctgttttcttgataaatagattaccatcaccattgctgaataataaatctccttatgaacttatattgaacaagcaacctgattactctttgttgaagaattttggatgtctttgttttgtttcaactaatgctcatgaaagaactaaatttactcctcgtgctagagcttgtgtgtttctaggatacccatcgggttacaaagggtataaggtacttgatttggaatctcattctgtcactgtgtcaagaaatgtggtttttaaagagcatgtttttccttttaagactagtgaattgttgaataaggctgtagacatgtttccaaattcgattctacctttaccggctccattgcattttgttgaaactatgccattgattgatgaggattcattgatacctactacgacagattctaggactgctgataatcatgcatcatcatcatcatctgcattacctagtatcatacctccatctagtaatacagaaacacaggatatagattctaatgctgtacccattactaggtctaaacgtactactagggctccttcttatctgtctgagtatcattgttccctcgttccttccatttctacattaccccctacagattcatccattcctatacatccattaccagaaatttttacagcttcatcacctaaaaagactacaccttatcccatctctacggttgtgtcctatgataaatacacgcctctttgtcaatcttatatctttgcttataatacagaaacagaacctaaaacattttcacaggctatgaagtcagagaaatggattagggttgcagttgaagagcttcaggctatggaacttaataagacatggtctgttgaatcattaccgcctgataaaaatgttgtaggttgtaaatgggtgtttactattaagtataaccctgatggtacagtggagagatataaggcccggttagttgctcaagggtttacacagcaggagggaattgattttcttgatacattctcacctgttgcgaagttgacaagtgcgaaaatgatgttaggccttgctgctattacgggttggacactgacgcagatggacgtctcggatgcattcttacatggagatttggatgaagaaatcttcatgagtttacctcaaggttacactcctcctgcaggtacaatcttgcctcctaatccagtctgtagattgttgaagtctatatatgggttaaaacaagcttctagacaatggtacaaacgtttgtcttcagtcttgttgggagcaaatttcatataatctcctgctgataacactttgtttgtgaaagtggtttctggaggttttgttgcggctttagtatatattgatgatattatgatagccagcaacaatgatgcagaagtggagaatttgaaggctttactgagatcagaatttaagataaaagatcttggacccgcaagattctttctgggtttggaaatcaagatcatccaaaggtatctcagtttgtcaacgcaagtatgctctcaatttgttagaagatgcaggcttacttggttgtaaaccaagttctatccctatggatccaacgttacatttggtaagggatatgggaactcctctgccaaatcctactgcatataggaaattaattggccgcttgttgtatctaaccattacaagaccagacatcacttatgcagtacatcagctaagtcagtttatctcggctccttctgacattcacttacaggctgctcataaggttcttcgatacataaaagctaatcctggtcaaggactgatgtattctgcagattatgagatttgtttgaatggtttttctgatgctgattgggctgcgtgtaaagatactagaagatctatttcaggtttctgcatatatctgggaacatctcttatatcctggaagtcaaagaagcaagctgtagctagcagaagcagtacagaatctgagtatcggagtatggctcaggctacttgtgagatcatatggctgcaacaattactgaaggacttgcatattccgttaacatgtcctgctaagcttttctgcgacaacaaatcagcacttcacagctctttgaatcctgtgttccacgagcgtacgaagcacatagaaatagattgtcatactgttcgggatcagatcaaggcaggcaatctgaaagctctacacgttcctactgaaaaccaacatgctgatatacttaccaaagctcttcatcctggtccgtttcaccatcttctcagacaaatgtcattgtcaagtctctttcttcctaacaagccagttcgaagctagagacttgagggggggatattaaggatataggaccggttaacttcggttatcactggtttggttgaatgtggtttactaaccacaataatcttatgtctataagtttaatctcgattactttgttagttaagttggttgtaacaacactttaagctgaataagaaaagttgttatcttcttcttcgtctctcttctccaatcttgaatctccgatgtatcggacgttatcaaggaatacatttgcacgagatccatgttcaaacaaacatgaaatttagcgtattaaaggaccaaatgtttttcttaaaaaaacatttctatgtaattaggatccatatttcaaatttgaacaaagaccattgtgtctttttgctatttttgagtcggtcctgcctacattgattcaaaatctcttttatgttcgtatacttcgtcaaaatctctgcatagtcacattcgtctgctgaagagtaccaactcccaaatattttcttgtatgctcttccattaacatcttttctaagctaatgaaaactagatatttgccttaggtccaaaactaaatctatcttctttcctcatagttttctcaatttccggcaactcacattatctcaattctaactagagtgtcaaagagtttttgagatgaaatacctctaaaagccagttagacaaagataagttactaaacttgtagattcagccttgtaactactagcttagaaaaaccttatggatttagaacatggttcaagaattttccatatggtttcaattgtggtttacgggatgattagttgagattgtagcggtaaattgtggcttaaaatattgatgttatatatatattgtttttaacataggttatgagttaaaataataataataactaaagctacagattattgactcttaaaaaaacgaaatagaggaatacattatatagatggtctaagtttgactcgttttaaccgttagctacttaattattaggtgaaaattcaaaatattcaagtgtacaaagtacttgttttagattagaaattttttttttttttttttgtaaattagattggatactttggattaactattctttttttggattctatattcaaacgtatcaatatcagtcatatcttattatagaaatagggtaaaagagttgtcgagagtggagacgtcggggcaagggaaaatgacgtgctccccaccaccccaatgctcacgcgcactatgccccacttaaccctaatttccaatgctaatctatcaattacatttcatttatttcttcatttatttaaagataactacacttattgtatgtataaactgcaaaacatatgatactaatatttactactctagtgaaagaagaaaatgatctggctagttccccatgccacaacattccaacacaatacatttatctcttttggtcttggggttttacaaattgtatcagagtaaacaagaatatgttttctaaaatagttttccccataaaccgatctttcctaaaatattacaccatgtgaaacccaagacttgtctaggcaacctcagtaatatgagtgtataattaaagttctggcagaaaattataagatgaattcattaaatacgttatggagcttaggactttggcataatcggtattcaatcccactgttatttaaaatagactcatataaaaattgtccagtatattttatatattaataaaaagagagtacacacatagtattgcgttcttggattctatataaaccctatataaataatactaacttgtgaaaaattaattattgcccactttctctctctctctctctctgattgattcttgaaaagaaaatcaaagtctcaatagctttgttttgattctagttccattccacaattgcatctaattctcctaccgtagccttttcttctttatttgtcatcaacaactcctaaaattcatatgaaattagagaaatcgaaacgaaaagataatatttttcaagaaagagctacatatacaccttttgaccttgtaaagttggaaccctagaggcctttcaagcaaatcatcagggtaacaatttcttgatctttctttttagcgaatttccagtttttggtcaatcatggcaaacccttggtggacgaaccagagtggtttagcgggcatggtggaccattcggtctcctcaggccatcaccaaaaccatcaccaccaaagtcttcttaccaaaggagatcttggaatagccatgaatcagagccaagacaacgaccaagacgaagaagatgatcctagagaaggagccgttgaggtggtcaaccgtagaccaagaggtagaccaccaggatccaaaaacaaacccaaagctccaatctttgtgacaagagacagccccaacgcactccgtagccatgtcttggagatctccgacggcagtgacgtcgccgacacaatcgctcacttctcaagacgcaggcaacgcggcgtttgcgttctcagcgggacaggctcagtcgctaacgtcaccctccgccaagccgccgcaccaggaggtgtggtctctctccaaggcaggtttgaaatcttatctttaaccggtgctttcctccctggaccttccccacccgggtcaaccggtttaacggtttacttagccggggtccagggtcaggtcgttggaggtagcgttgtaggcccactcttagccatagggtcggtcatggtgattgctgctactttctctaacgctacttatgagagattgcccatggaagaagaggaagacggtggcggctcaagacagattcacggaggcggtgactcaccgcccagaatcggtagtaacctgcctgatctatcagggatggccgggccaggctacaatatgccgccgcatctgattccaaatggggctggtcagctagggcacgaaccatatacatgggtccacgcaagaccaccttactgactcagtgagccatttctatatataatggtctatataaataaatatatagatgaatataagcaagcaatttgaggtagtctattacaaagcttttgctctggttggaaaaataaataagtatcaaagctttgtttgttcttaatggaaatatagagcttgggaaggtagaaagagacgacattaagggactttcagattttcagtattactactccacgaaattattgaaataaataaacattgtactgtaaattagaatgtttgtctttttgtttttgtgtagtagtatttaactacaatatttgtatgtgtttgcctttgtgatctttagatactttacattttggttggctcaaaaaccatgggtttattatatatatttaatgctggttcaacgatgaaggaacgttgagagcatatattgcctatttgtgcgtttcgatattatatttctaattcatgatcatttttatttaaggtttttaccataggtccatagtggtggttctttaatcttcgcgtcatgatgctattggaattttttaatatgactatgtaaacaaaagaatgagagattgttgactagctaaaagcatatacgtactctctatgtgtattaattgatgttatttaatggtacatgacacgaaagaagctttaaaacaaaattatgactgaacaaaaaaaacggttgatgttgttggcgagaacgacttaaggaagtttacaaacctatactatgaagttttaagtcgttgtaagtcttaactaaaaaatactattaccaaacgatcatttattgatgttaatgcacttttgtaatttttagtgttttttttttccaaatagaacttgatatattccctctaatttgatatataagatttatgagttaagagcatgcatattcagaaaaatatattttaaaaatatcattaaatatttggtttacaaaaattaggcaaaatcatagaagatagtttctaaatgacaattcacaaggaaaaatcaagaaataaatcataattcaatacctttttttttacctcatttgttttggattattggttgcatatatggttcctaaggaaaaaaggatattattttaaatttgggatgattttgttaataggacaacatggaggaaccaactatttcaaggttagaaatttacttaaactctcaccaaaaaacacgccaaattggaagtacttatcttagataagttatctatctacatagtttgcaaacaaattggtctacattcaggtaaaaaaatttcattttttttgttatgttcttttctctttctttttttctttttttctttttcagtcttgaatctagatttatatgttgagtaaacgaaatataaatcaaaaatttttttttaccatgtcttgcttattgtacaagagacaaaatgaatatgttcgactaaaagacaaaaaaaaaagattataaaaacaaataactcatgtgatgtttaattcaaacagttacggaaaaaatatatatacattcttgtaacttaagtttagagtatggatggtacgtttgaacatcccctggtcaacataattacccaataattctgaaaacctcgaatccgacatgtgatccgacccagatagaagaaactgcaatttcatctattatgatttttgtttttctcgttcagaaaccttattcatactctatttgaccagaaaaatacccaaaaacatttctgaaggactatactaatttttaaattattttttattcctcgtcttcaaatctttttctatttctaaactaagtctcgtagtcaaatattgtataatagagaatattcgaaacacatcaccatcactacatcaaaactttcacatatatattagctaattgtgatctattcttcgcaatgtattgttatatttttcgttgtcttttaccttaccaaaaactaatactgccgccttatgccactagacaatttgttaaactggattttcagccaaatagtgacaatctaacaattttgattattaaactaatgaaaatgtatagttcctttgtagataccaatatgtatcacgtcaaatcgagtgggggatcctagaaatggcgcaacatgaaggaccatcttcacatgaattcacgtgtcaattgtcaaagccaatgggacgtatataattattctattagtataatataattataatatcgtgtaattaataacatctatgtggtcacatcattgcaaagcttaaagacaaccttagttacttaatcggaccaatttactccattaactataattattatgcgtcacacaaactagattatggtaatatggtggcatcatatttctaactttccaagcctagctactttcaaactaaaatctataatgttttacgactaaaacaaacacaaataaatgtgtttatacaaggttttgatattgttaacttatgctttattcataccaatacaaactcattgttgcttctctacatatatatgcaacagccacaagcattttctgaacccagcctcaagataaatgagacctttttaatcatttcattgtgcgatagaataagttccgttattttctttctattaccgaccaatctttggatttcagaagagcttttagccttttacaatttcataagtaatttatgcaacaaattacttaatatgaagttttccttaagtgaaaataataattaaattttttgattttgagtctaacaaaaaaaataaaaattggtttcaattattatcttattgtgtaataatatataggtgttgtatatgactaaatagtgctgaattgctgatgcatgatgaattcgtttggagttaatgaagattgagtagtgctgattaagttgctaactagtagatccaccgtcaaaataaaaccttcattttttcttaagtattgataaatttatctttatgaaatcactaattattctgacaaatccaatgcactttgggagcttgaaaagccgcaatctcgttctcagtcactaactgtaatgtagcataggcttccactaaacctaattaacgaaatttggaccaccaaataaacaaacgaaattaatactaaccatttgtagtaaaattacacctacaaatctacaacatcctgttttcttataattgttgttttaaaatctgtacgtcacaatatatttaaatattataatttctaatatacctgtcattaatacaattttcttttctgcggatgaacttttttataatatttttttcttcacaatacaaataatcatttagtcataaatcattttgaaattactagtaaatgtttgttccctatcatctacttgccacacaattgatagatattaatcattttcgtatagctttatatatgttttttttattattattgtacattatgttgagtttaaatagtgatacaacgatactaatattaagtattagtattactatatatgttttgatcatatttttaaactaaaaattgattaaatatgcaataaataaaaaatgttaacacctaataattcctccaaattaaaaaaggattctttaatttagcttcttaatgttaaagacggactcatccaaaaatcctcttcttctttatttttgatgagacttcctaccaacaaaagaatcatttgttaccgaaaatatcagttaacttacaattggttggaatcttaaaatgtatacttaataagctgattcgtgtgattgaactaaacaaaagatttccatcaagtattacatcattgcccacttcgtgattgcattagtaatatatttacttgtttcaaacataaagtaactttaaaagaatattggtatatatggaaaaatccaaataaagccataaaggtctatagttaatcctagtcacatcctattctgtatattttctttaacttttattaattaaacataaggaaaacttaagttttgtctttaattaaaggcctttaattggataataatcttctaaccccacctacttgcttgaaacaaaaacacataaaaaatcagtttctagaaacttagaaaagtaagtgtcatttacgtttatcattagcaaatcaaccggatgaacgtatattaaatattgaaaaaacatacaatcagattattaatttgagtcccactattcaaaaactaaaataaaaatacaatcattcattggtgtaaataaattatttttggttgtgatttttcttataaaaaattacaagtaaatgagtaccaatagcctcattaaaaaagtatttataaaaaaaaaatcataaaccaaggaaaatcttgttcctttttatatcaattttctgtatacatatttaaattgccctgtttagtagtattccatcagatataaaactttcatttattcgctatgtcacaactattacagtagtttttctggctgaatttagacacttttaaactgagaactgaaaaatttatagagattagatagtcaaaatatattttttaaaaaagcttacaataaacaaaaggaaagattgttgttaaatttccaaggaaagaaatatgggaaaggcgcaaaaaaagactgaaacaagaaaaagacaaaagaggaaactgaagctttgaccgatacaacatctcccacgtgtacatgcttttcctcccgtaaataccgggcaaccctctcttcaaaattattttatttttacataaaaactgcaacatttagtagtataaattaaaatgaaatacataaaatgtggttccacatcttcttctttttttgttcatgatatcttattcacataataaactttttctttttgtctcatcgtatgttatcttctaaacttagttgaaaaagcttaattatgtaattttagggcatcttcatcaatgagaaactcacaaaatttctcaaacaaaaaaaatattaatattatattataatttgattatttgattaaaaaagtatttttgttaaaaaattgaaccaatagtgagatgagaattatcatgatgaattgtatagagtatctcggagtttctcaagtgagaaactttgtacactctctctccttcattttttttatttttaattttttaattgtgagaaactcttatgagatactcccaatggagatggtcagtttacctacaaaacttagttgaaaaaaacttgttatataagtggtattttattgtcaatgtgtaaattactattccatttctactttttttgtttcttccgttccgttgaactgtacactattctttatattacgtattatggatttatggtactagactactaggctatcggctatgaccaaattcacattcatatataactccggtatcccactgttgtttatgattctataaatatcaccaaagttcaaaatccaaagttttgggactagctagaaccgattgggtggtcagttagtcaggtttgtagaaacaagatgaaatatattggaattagtattttgtgcccaacgtattcatctattttagcccataatcaaacccccagattgcttatttgggttggttttaaagtttagtgatatttttgtttactgcataaatgattttgagaatacgtttagtgatatcaaaatctgattttgagcagatgtttatggagagtcagattttgatatcactaaatgcgtttgacaagctatgcaacacgttcagggccgggtagagtttcatgtagaatcgacgaatttctgatatagggtttccagattcttcaaaatcattgtaaaggaccaaagttatatgaaggaacatcgcctattaatcgaaaatttgctcctcgcaacggagttagtcaaggactatcataaagattcagtctcagaacgctgcgctatcaaaattgacatctccaaggcttttgattcagttcaatggaccttcctcaagaatgtcctcttaactcttgattttcctcaagtttttgttcattggatcatgctttgcgttaccacagcatctttctcggttcaggttaacggggaactagctggatactttaatagttcacgggggctgcgtcagggttgttctctatctccttatctcttcgtcattgtcatggatgttctatccaagaagcttgacagagctgcaggcttaaggaagtttggataccatccaaagtgtaaaaatcttggtttaacacatctttcttttgctgatgatatcatggtgctcacagatgggaaacttcgatcccttgagggtattgtggaggtctttgacagttttgcaaaacaatcatgtctcaagattagcatggagaaaacaacaatttatcttgcaggaatttctgatactgtgcgccaagagtttgaggaacaatttcattttgaagtaggatgtctcccggtgcggtatctcgggttacctctagtcaccaagagactcacatctcaggactacaacccgcttcttgagcagataaaacgacgaataggaacatggacagcccggttcttgtcctacgcgggtcgtctaaatttgatcagttcggttttatggagtatatgtaatttttggctctctgctttcaggcttccacgtgagtgtattcgggaaatcgacaagctttgttctgctttcctttggtcaggaccagagttaagtactaagaaggctaagattgcttgggatacaatatgtagaccaaaacaagagggaggattgggtctgcggtcaatcaaagaggcaaatgatgtatgttgtctgaaacttatttggcgaatggtctcgcatggtgattagctatgggtgaagtggattaagacccacctcctaaagcacaacactttctggtcccttagatcagcacaacaaggctcttggatgtggaaaaagttgttgaaataccgaaacattgcaaaagatttctctaaggttgatattagaaatggcgaaaggtcttcattttggtatgatgattggtcaaccatgggcagattgattgacgtcgtgggcgaacgtggccaaattgatatggggattagtaagcataagacgcttgcagaggcatgggacggaaggagctcacgtacgcatcgagcagcaattctaaataacattgaacaagaactttattggtgaaacaaaacagagtgatggcagaggacatttttctttggaaagggagaaaggatatttatcggccacgtttctcaacacgagatacttggaaccatactcgcacaccttcgcctgtagtcacttggcacaagagcgtctggtttgcaggagggacccccaagttctctttctgcgtctggttggcggctcacaatcgtttagcaacaggagatcgcatgcttagctggaacagggactctccacaggatgcgctctttgtaatcacacgctggaaactagaaatcacctttttttctcttgtgtttacgcttcagaaatttggcaggctctgacaaggaacatctatggagcaaagtatactactcactggaatgacttgattgcagccacttcgggtcattggcaagatcgaacaaagcggttcatagctcactatgtcttccaagcaacgattcatactatctggaggaaacgtaacaatcggcggcatggcgaacaaccaaatccaccggtgcgtttaatccgatggatagacaagcaagtaagagatcgactttcttcactgaacacaagcggagaaagaagacatgagacgggacttcaaatttggtttgcaacaagaaatttatactagtttctttgatctaaaatgtatttagcctttttcaaactcacgttgcacttgttgtacaaaagacatttttcttttgaatctaatttaacattacattaaaaaaaaaaaaacattaagtttttttctttcgagatgaaagtgtttgaagatgcaaaatacaatcaaattagtagactattaaagtaaatttgattctaagaagtacatcagtaaatagggaatatgtatttgtaattcatatcaattttacattttgttgttgtgattttactttattgttctttattaaattttatgaagaggaaatatttatatgttgttttggtgaatatataacttgtttaccaaaacttaatttggagccattctaaactgacaaataaaacgagttaaattgaaaacaattgatcgtaatgtcatgccacttatataattttagcatatagaaaaaaaatattaacaagtttagaatagttaacccaaaacactatctttatcagcacgcaaggtctttagcttctcagtttccaattcaatctttaacttctccaccatctctagaagctcttcttctctgctcttctcttccttgtccccactcaatgcttcgattataatcgacactcttgctctttgatgctctaaacttttcttcaacactttcagtttctctaacaccaaatctttatcaaacccaacaacctcaccttcttggttcttagcttcctcgttcgacaaacctaaaccgagttcataccccgttattgtgacgttatcgtcttcctttttgtcttttgattgatcttcttcacgtggactggactcagaagagtctgattcagtagctgggaacactggactaagttggagatcgtcttcacggaaattccacccactgattcttctattcttcactatctcttcgtcttcttcttcttcttcttcatcatcatctccaacactcttgatcaaaatctgactctccataaacatctgctctgcgtttgacaagctatgcaacacgttcttgaccacaaagtcgagtcctttacagttcttgaaaaaaggatgcttcaacaacttctctgccgatggtcttttagtaggatcttgctctagacacaaaccaaccatttctctaaaagcttttgagaacttcttgttaccctttttgctgcttccgctcgtattgatctcgtaatcagaaaaatgaaaccttttggtgatcttcatgagcagactcttcaacggcggtaagtgagataacggaggtcttccatgtgctaactccaacgctgttatcccgaaagaccaaatgtctgctttgaaaccataccctgtgtgggaatgaaccacttccggagccatccaatacggtgttcccgctatatcagttaaccttaaagaagaagatgttgttccagaggaagatgtcacgggttcatagatggatgcagatactccgaaatcagcgagcttcacggatccatcagaatctaccagaatgttacctgccttgatgtcacggtgcaaatgaccctgatcgtgaagatacgagattgcattcagagtttccttgaggaagacggaaatgcagttttctggtaacccacttggaaaagacgaagagacgatcgaatgaagagagccacaagacatgaatggcataaccacccagagacatcgatcaacggtgaatgaacaataagcattgagaatattcggatgagaaagcagagacatcgtcttggtttcacggcgaagactgtcaaagtcagcccgcgactgatcaagatcgatggctttgatagcaactaccattgagttcatcggaatgcatatggccttgtagaccgaagcactaacaccaacgcctatcttgcagatgatctcgtaggcttcagcatcaagagggaactcgagcttgttccgagccataaatagaaagaagatgagtacactcttgcttattgaattgttatgtttttagtggaattgtggtcttttagaggctaatagtaccatgaggctattcatatagggatgaaaaaagaaagagttggtttagcatgtgaacttgaaaaaaaagagagcctttaatgtaaaagcaaaacccttatctcttacttaaaaatatgttgatgaaacaataagatgaagcatgtgaaagagctaactaactaaccttagttaatgagattttacctttggtctttccagggacccaaagggcaaacactatcatttcaacttcaaaccggtaaaggtacaaaaattaaatggagctatgaaaatttattttcatcatttcacagaaatttaaagttctagatttagatatctagactcgttttacaacttttttttcatggcatttctgaagaacttgcatttgcctttgaccacatgagaaggaaacaaagactagagaaaagacgtcagccttcttgacatttggtaaaatgaatgatcaagtattcaaacatcaatatgctaagataaaatcacaatggaacagaacttgttttataagtcttcagggatgtccttgaaacatatactataaagtgggcaaaagacttatgaaacctacttaaacatcagcacttcactgtttactttgtctcacacgtaaagcaaatgcaagtaaatcaatgcagtcaaaactctaagcaacacagccaatcccacagcattaaggtctacttcataagaaacttgtacctgtcagtatgtgtttcttattccatgaactgaagctataccaataatcagtgtgcaccatatcagttggacactttgtcaattcaacacatacacgctttagcctgaacttttctttgatctgaaatatactcacgaactctctgagttttacttcgcatgggctcaatcatattttctgtcttgtgaattatctcttttgacagatgaccctccagaaaactgaacaatgctcctaatgtcatctttcttagatctgtatcaagttcattgttcatatcttcttcaacatgacagcttaaaccctgctctcctgaatcagtaacctcatcattttcaaagctcttcaacggcttctgatccgctttcttgttcttccctttgttctttctggctcgatttagaaccatgtccaattccaaataagaatctccaacaatatcaatcttcttgcttcttgtagccctagtaatcctcttctcctttaaagtctctaccttctctacattaaccactcccaaacaagcttttcctacactttcttcaatcttcttgctcctcgtagccttactgctcactctcttcttcaatcccctccctaaattttcctccaccattgcacaatcctccatttcaaccttaattaagtttacagatgaactctgaatactttcaacattcctaaagcttccatttttctccaccagatcctcttgtaatccatcagtaatccctaatttctccgaatcctcgattttcctaactttcctaaccctagaactcggcttgttctcaaatttcacatccaaacccttttcttcctcagtgatatcccccaaattgatactttctaaaaccctaattcgcttcctcgcattagcctgacgcctattgttcctcgtaagcttcttctcctgaaaatcatcaatcacaaaattcaccaaaatagatgtatactcacctagtttgataacatcgccatctccgagatttaccgacgtctctggatcaagagcattcgaattcaataaagtaccgttggaagatccaagatcttgtattacccaattcccagaatccgattcgatccgaagatgcttagtggagattccagcgtctttaattgcgatttcattaccacgaacgattcgaccaacacgaatcgtagatccaggcttgtaatctagagcatcgccttctcttggacccttgacgaatactaatctcaacgatggcgtaaccattgttaccgtttctctcccaaatgcgaattttgaaattttgatttgtctgacgctccaattattaatgggccttaaatgggcttttatcgtttcgacgataaaacaatttcaaggctaaaagctactattggctaaacaactggcattattgattacccaaacttccagcaacacacgtgaatctctcagcaaacttatctctcccttatccactttttttccaacctttttcccctcacgctcctttaccctcgcgtgtatctcacctcatcatttggatatccactgttaaaattcccttttatattcgaaatcaaccaaatttaaccttactcctataaattaattaggctcttatctacaattgttgcaaatcaacaaaacgtgcttctaatgctaacacaataattgatttttgagtatattcctctacgtagtgaacacgacgcgctaagatctgacgcgtgggatataacttgtcggtcaacgaaagcgccacgtcatcgccactatgcttgtccttatcatttcctttcacccgccaacgtcgtttcaagcacagcaaataatatcagaacacatttttttctttttatgatttaatcaattaaatcaccaaactcaattaaataaaaagaaaaaaattattattatcccttcttcttcttcttcgtcttcgtctttgattctcctgattcatgtcgcttaaatttttagcgatcttcgaatcccattttccttcgggaatctgacattttttctcgggaaatttttttatccaaatcggagtaaagtatcgaatctagagaatccgctatggatgagacctattttgatctattgaatttctttaagaatccctcttttacagagacatttgtcgacatcttactatgcgcagttccgatttggctcgccgttatgatcgggttattaatcggatggtcttggcgtccaagatggaccggtttgatctatttagggtttcgttctaagcttcggtttttatggaccgcaccgcctgggtttggtgctcgtcggctttggcttgctttcaccgctctctctgctttctccgtttgccgaaccatctggtcaaggaatgacaccagagctaataaatcggcgaccggttcagcttcgtcgcagacgcctgttgaggataatgatgaatcaggattggcctcaaggttagtgtaatgcttaattattggaagatgtagaagttttagttctctgttttaaaacgtaacgtttacttttaatttagctagataaggtatatagtgtttgcattatcttttagtttcgcaatagcattggcaaaagaatggttttttttttttttgcattagttgatttatggattggttatatttgcagaggtagcgataacgggacggtgacagaggatattgtgacagagaatgatttagagcatctgcttcagctgcttgaagttggaaatgcagctttggaatggcaatctatgatggataagactactccaaatatgagctaccaggcttggcgtcatgagcctgaggtaatctaagttttatactcttgctttgtatccgtttccttatgctacgcctgaatgatgtagctcaaggaacaagctaagtcattgagtagtaggcggaatagtcgaaaaaatgaattctttagagtaatttgaatgacatctgaatcagaccactgcttttaggtttattggtaatgacgagggagatatgtttctaaggatagctatagacgatcaatttttaggtgtctagtagtatacattgtgtttctttgtttagctttggttctttttgggcacgatgtgatgcgttgttgcatttacccctttgtgtggcatttttgtgacattttacttgaaactgtgttcttgctataatgaaatggggaattcttaaatactagatgatagaaacatttgatcaaattgtgtttgtagcctgataggtcgtattgtttatcagacaggtcctgttatttatcgcagccggactgtgtttgaggatgcaactccagatattgttagggatttcttctgggatgatgagtttcgacctaaatgggatttcatgcttgccaacttcaaaacgttggaggaggacactcagacaggaacaatgattgttcagtggagaaaaaaggtttctggacttttgatactttggtcatcttaataaacaattcccacattaaaaactgttgtcattactaatttcttttgcttgcagtttccttttttctgtagtgaccgagagtatatcattggccggagaatatgggagtctgggaagaagtattattgtgtcacaaaggtaatgtcatgctacaagaacttgtttttgccttccacagaacaagtgtgtagcattccacatgtctggagaattctaaatgtttacgccagaattctgtaggggacaaaacaccaaagtttaggtttgacaattctgaatgtctggagataattcatgggaccattgtctcttagtttctagttctattaagtttcattgcatcattactttatcagtgaaaaaaattgatcaaatagtatccaacatctgtttatcctaaacatcctattaagtttttatgctgaaacaaagctcaaagctcagagctaaggcgcttatcttctttgatattgcatggagtatgcttctacttctctaggagatgcgttttatggaaatatcaaagaagataagcgccttagttctgaagataagcgccttattcacaaaatgcataaggttgtattctttgttaggtttatccagctctaaacaaagctcaaagctcagaaccatacttaacacctgttcaatattgtagggagttccttatccagctctaccaaagcgtgataagccaaggcgtgttgagctttatttctcaagttgggttatcagagcgggtaagccttttgatatacaagtctttttttctttaagacgggcatagattttgattttaaagcaaattcaaaacaaatgcagttgaatcccgaaaaggagatggacagcaaacggcttgtgaagtttcccttgtccactacgaagacatgggcatcccaaaagacgtagcaaagttaggtgtccgtcatggcatgtggggagctgtcaagaagctaaactctggtttacgagcgtaccaatccgccagaaaatcagactcatctctatctcggatcgcccaaatggcaagaatcactacaaaactgaacatggattctgcagaatcatcttcaagagatgaagacagaagcagagcaatggaatatgcgagacaacgggaccatttgagaatggactggaaatgggttgttgtaggaggtgtcgcattggcttgtggccttcactctgggatcattggcaaggctttactggctggagctggccagagactggctcgtaggtgagaaaccttgtcgtattcttattatatcttcccttgacagaaaagagaaacatatgcatataattaagggaaatgtattatttttgcaactcctctgagaagggcatgtggttttggtggtgaaccatgtagagtagtagctttaaactatggagtcataagttatttgagttctatcttgtaccacaggatagtgagatatgtattttataaactatatgaatctacatagcttctaaaagcttaaattctttgcatgtgatgcacttcgtatctctcattgattgctcaaccaagaacaagatgtcaaaacttatctactgcatcaattcactgcagtgtgcacacaagccgttctttattaccacttatggttgtacatcaagttcctcattctgcagttctacaaaggttgtttctggtgttgtagaggatgcagaattatcgccaaaatctgtgtctgattcatctgaaccaaattcaacatctgtttcagatagtgaaccgttggcctgaatcccaccttcttcatcatcttctccctcgtcttcgtatgtatctaaatacacgtcatcttcctctccctgcaacagccaaaagagaacaaggaatatgaaagacatcaaacacaacattcatgatagtgacaattcaaggaaataaagagagacgtataaggcaaaaacatcatacatctgtttcttctgtttcctcgtcagaagaataagccatgtcaagcttgtcgtataatgtttcatctcccttgtcttttacaagttccacttgttcctgaaagaatgaattcagggactcgggttagcaaacattgcagaacaagaaaatgcgttctttgtttgattagtgaatgctacagatagatggaaccatacaatttcagctctcagctgctctgatctcgtctgtatcgcctcaatgtgtttaataagagcctgttgaatgcaaagtatccaaataagaaagcaaaatcagtgttagccggtgaggtttaaacttgattagacgcaggtgttggtcataacaagtagaaatcaatggtaagtttgcagattttgagatcaacacacgttgttgcatatatttttatcacgaacctcgcgtttttgaagctcaagagaacgagccaaagctttcctctttgtcaagaggtttttaggcctcagtgtggtaggacgtttataatcttttcctctatacacgattacggcatagcctttggaaattttgtcaacagaaaccaggatacctccactctcggcttcaagggccattgccactttctgtgcaccctctaaagttttagcctttacaagaatcttgatcagctcccgatatttccagtgcaagtgcatgttctctacagtcccatcaaacacccctcttcgacctggagcaatcaattcaagtttctcagacaagtcaatatcccagagaacacaggtcaaacatacttaactacatcagcccacatattgataataaaatggtttaccaagaagtaagaaagctttcatcttcaatccgagcttttggaacataaatctctcttcttctgttatgccctcaaggtctgttctctgctctgctggcttcagagattcctccaccttagctaaagcccgttcagctttcagcagctttttctcagcctagaaaagtttattgaaaagtactaatccgtttaattccaggagcaatctcttaactcaatatgtgaaatataatttgacaggtaggaagtatagggtcaagtcaggaactcacgaaagcaagtttcctttccaacttcctgacaagttttgcagatctcactttctcaacctcttgtttcatttcctccacatgatcatcgttatccagattttttccccatttaccagttgcatcaagagtttctccaagagtaccggcagaaacaaggttttgattagctttagtacttggtaaaaccagagctgatggacgtgcctgttcctctttgtcttgcaaagtccttgcaagttgttgattagcctttatacttgggacaaccagagccgatgatgctcttagacgtgcttgttcctcttcgtcttgcaaagtccttacaagcatctccttctccatcaatgcttcacctacttctagtgacaaaaaactctttcctctgtagaaaaccaaaaaatctttgttcctcgaaagcagcatacctcccgtcaatctctgcagtcacttaccaagatcatgacatcaaacattcagcatcaaatatagacaccttatcatttattctaatgatatctacatttatataaaaacaattaaatgttactcggctgtgaaaccttattaccttgatgtcttcagccattctctcactggtcgtcagttgtacaccacgtttaagggcaaccttggcaatcaaactcttttgccataacttaaccatggctgttgccaacccttgcagctgtctacttcgacctgtacatcaaaagaaaatctcgctattcaaaaaccttattgggctctacaaaaagtcgtaaaggaaatccaatacctaaagcaaagtggggaggaagaactgtagcaattcttcttaaagaggttgcctcctttgttcccagagttgatctcactccataaggaagtgccctaaaaggaggttcgtaaccaggaacaatccctggaagcaaatcagcatcaacaggtaacggataacctccctgccagtccgtgtaccgaggaccaagaccctctaacagttcatttatttcatcttcatattctacttcttgtggagatgtcctgtctttatttcccacaacagttggctccttctctagctgaggaagattcactagttgaacactttgatccactgtacttgtaggtaaagaagatggcaatctctctgctcttctgtatacttgcttgttcatgttccctgatccatccctgttgctgccacctttgtaattgtacaaggcgatggaagtccctgacctccaaatcaccaaaccaccagtttttctctgtcacagtgaagatataattagtattacacttgacacactagaaacaaagaactttcaattctttgacttatatcatttcaaagctccaaagattaagcctttgtaaataaaaacactgattgggggatcataagaagtaaaacctctaatatctcatgcatccttctcatgttgagtgcacttgatccttcaatcttaagtctcacaatctctgaccccttccacttctcctggattgcatcaaccacagcctgagtaacacctgcacccgtaactctcatcttactctttgttcgaaacatcacattcctcaaccgattcaattcaaattccgaaagagtcatctccgccagcgagtatctactctccttcttagctgtccactctccatttaccaactccttcttctccatagaactcaccttttcccaaggaaacttaacttcatcattccctccatatacaccaaatggtgattcctccgagaatccacctcttctttcttccacatagaacctttcctccaccgaactcttctcaattcttctctcttgttcaacttccttatcctgaaactgatcttcatccacaaatccatacttttttaacttctctacaatcttctccattgtactactactcccactaccaccaccaacatcaccacttcgactactgttctcaccacttataacccctaaatccgaaaatctctcgtcttttcgacgattcaacactacctttgaaggtctaaactgattctgcttctgtgttctattccaattctcattcctactgctactactactgctactaccttcacacgataatcgtttaacatttttcataaaagagaaaccgaatctataggacctgagtgaaattgatgaacttgtaccatggaacttgcagaaagaacttcccagagaatcgacaaacttcgccgaagtagtcgtcgtcgtcgtcattgggcaaaaatggtgacttgaattaatcgccatttccgacagaaaatactctcaattgggtactctcaacaaaaaaatttgacctttgattccttcagctacgcaaacgaagctcctgactctgttatccatggcgggggaaagaataagatgttcgagatgattagagggttgtttggatacgtggtttatcgtaactaggaccaccacaaagagcgtattatagagaaacataacttattatcgctaaaatgcacttatagtgcgcatcttgtcagaaataaaacgatttcaataacacacgccttgtgacgggatccaaattttgtcagtcaaaagcagttacttatgcagagaagggaagagagagtagaaaatagatatcttttgcgtgagcctctctttgcccgtacgattcttcgggctctatgagatatcgaattttcttctcaaggttagatttttcgctttctactaaaattttgcaaaaattctcattttgttttgttgttgaagatttcgttacaagttccttttttttttacttctcggtgtaaaattagaacttgcagggacctcgataattaactgatgtctaattttatcgtggaacggttgagaattttggtgattaagggtttcgattttgattttgggtttatcatgtttttgaaaaagtagagggaaaaaaattaagacttttgatttttacgatgttgggtttcactgtaaatgaggttctaatggcggagtaataacataagtgtgtgtttcatttactggtttagtgatttttcaaatggtcgtttgtctaatcaaaaagatatttcttttaagtttttggagatcagacagttacatatgtttatgttgctagttcttgtctgagacagttacatatgtttatgtagctagttcttgtctgaatcgtggatcaatgcccatatctctggaagcttaatgtgattttctttgagaagtgcaacatatatcttcttgtatcttgttgagatcacttcaggttgtgtgattttctcagaaattattgacctctagtcttgttactgcagtttcagtaccttttttgtttgtttgatgtaaaattagcagtttcagttttgagtactttgctcttaattttgtctcttggttgattccttttctctgatgtagaattgagtgggctgatcagtaactaagttcttcttatgcaggtaccatataaggttcaatgctatataacttcaatctatttagccgtcaaaacattttatatctgcttcgttgctttaaacgttatgttttctctatgacctatgacctgcgtttatactgctttataatctttattaaggcttgatggttatcatttctggttgcggattttatgattcatccttcaacttagaatctcctgtgtttttttcaggtaacagataaacacgaatgttttcagaagtagaaatggctcgagacgtggctatatgtgccaaacacttgaatggccaatcgccgcaccaaccgattctatgcagactactccaagatctaatacacgagaaagcgtgcagggaacacggattctatctcggcatcaccgctctaaaaagcatcggtaacaacaagaacaacaacatcgacaacgaaaacaatcatcaagcaaaaatcctcacattcccggtgtccttcacatgccgcacattcttgcctgcaagaggagatatcttgcaagggactgtaaaaaaagtgttgtggaacggagcttttatcaggtcaggaccactcagatacgcatacctctcactcttgaaaatgccacattatcattatgtccactcaccattgtcggaggacgagaaaccgcattttcagaaagacgacctctcaaagattgctgttggagttgttgtgcggtttcaggtgttggctgtgcggtttaaagagagaccacacaagagaagaaacgactattatgttcttgcaactttggaaggcaatggttcatttggtcccatctctcttacagggtcagatgagccatacatgtaacccaaacaaggcaccaaaagttaaaagtctttagatacttttttgcttttaggttaacctcagattcgttggggttgtttcgtgttaaactggatcgacaagaaatatttgtaaacaaagttgacagaaccaattacattctattaatttcaattggtcaataccgacagagttacatattgatataatactaatacatacaaaagcatataagaaaattagttgctgagctatcttcaaactgcatcaatggtgtggtaactcattgaaaaggatcatctttcatctaaacctctgtgaatcagaccacagatttggatttttcatcaccatcgagacatcttccatcttcgaattcatcaaaagacgagtctcagcaggctctggatactcttgagtgctctagtaatcgccatcgatcaaaccctcgaaatctatgagttgatcaaaatctaggaattgatcaagatctatctcttgatcttccaagtttcctgtaggtttgtcgttactctcaaaaatcgccaagatctgatcatcgaatacaaccatctccgtttcttctttgagacgatcatcatcaggaacgccaaaagttgcagaacttaactgaagatttagggtttcgtgtgaaacaagattcttaatcttgatgtcgttgttaatcttgacgtcctcttgatgatctcttcgataattattcacagattccaattccttcagatctctcaacatcgtagacatcgactcaatcgcttttctcaactcctccgaatcctccgatttagcaagactctcgtcttccaccataactctaaccctagattctctttacgaacaagaccctgatccttgaggaaagcggaaacaacagaatcaacagaggaatggccgaaggagtagaaggagacgtgagagttggaagaacaaggagtcgtcaagatcgcaacctgtgaatcggaggagagaagacataatagctccgcggctttactgtaaagaccggtacgacgtttggagaaacaaacggctcgtgactctttcttctgaatcttctcaatcgaaattcttctctttagtcctcccattctgctttctttgatttcacagagattttgagggacactacctctctctctttatagatagtgtatgtaacaagaaacctagaaacaattgtatatataaaaatgtcggtggttttataggagggatctaggcccgtatcaggcccattgcaagaggaaattcaaaattttgtcttcttttggcccaaatcaatttaataaaatctgaattaggggttttgttttttgatttcatgatataaacgacaaaaaccaaaagtacatatataaccagaactcaagagtcttttataataaaggcaaaccgaaaaaacagaaccggttatcaagtctctctcttccttttctatccaaataacatccacttgtaataatcttatcgacaaacaatcgacctataactacccacgtgtcatcacgatacgattattatcctctctgatccaacggacccaaaacatctatctctctttctcgaccttttgtctcctcgatctaaagatggcggattcggacaacgattcaggaggacacaaagacggtggaaatgcttcgacacgtgagcaagataggtttctaccgatcgctaacgttagcaggatcatgaagaaagcacttcctgcgaacgcaaaaatctctaaggatgctaaagaaacggttcaagagtgtgtatcggaattcataagtttcatcaccggtgaggcttctgacaagtgtcagagagagaagaggaagacaatcaacggtgacgatcttctttgggcgatgactacgctagggtttgaggactacgtggagcctctcaaggtttatctgcaaaagtatagggaggtggaaggagagaagactactacggcagggagacaaggcgataaggaaggtggaggaggaggcggtggagctggaagtggaagtggaggagctccgatgtacggtggtggcatggtgactacgatgggacatcaattttcccatcatttttcttaattgtaaaatgataaaagcaaattttcatttttattaattaatgatatatatatatatatgtttaacttttagtataatgtttacagaattttttttttaaaactaggttcaacccactaacgtaacaaaataaatattaaatttatgattcgtaaggttagggtgttacttttttcaaaaaaaaagaataaaagaaggttagggtgtttattcgtgaaagatgaaagtaacaaaagtaaactaggatatcgaagtttatggttgaattaggaggaaaaatcaaatgagagagacatacattttttttagagtaaaatgtttcctaaaaaattgtagtgggaatataattatagcatcaagctaaaaagagtcattgaaaaactttttctactttgatgcagggaacatgagatgtaatcaagggcatatctaaaacgtaacctttgatctttgatctttgatcttttttttttttttttttttttttgaaattcaggaggttctgggccgaagcccgtaattcctccaggcccgaaaccacagcatgtaatattagtttttcttttaaagtgttgtgatgcgaaaatttcatatttgagtccaggtttttaagagcttgggttttccattagtccatgttatgccacaaatattcaaagattttttcttacaagcaatactcaaatatcaaaactaagtttctatcaaaaaactaaacaaaacatcagccaggtaaaatcaggaaaaaataaagaattatcaacaaataccatgactacaataaccaaactgctttccattattgtttttgtcaagcaaattgtattcaacattgaatttcaaaacagagaagatcatacggtgtagaattaaaaacaagattgaaacgatacattataaataacgacaaaggcttgaaaatttatcagataggaagttccgacgaacctaaatgaaagtctccatgacagactccatattgaagactaatttcaaaagattaaagagaaactcatgataataatagctcgtacagctagtgcttcttccatcgaagtagagctttcaagaaatcactccaaaaaggagttgtataggaaggatctctccaaaacattccaaagcaatacaataggagaagcttttaccctttttgggtcgtgaaggaccatgctttgtgctctgttctcacaacattgagaactttgtagtagagcgaagctggaaaagagttgtggcgttgtggatgcatgtggtactcttatgccaaacctcgtaaacacacgcatgacatgcttgaagcagtgcaatggagatgtcattgcttgtagaagttgttgatgacaggcggatggtgctggaatcattcaataggtagggttgtaggcaacaactttaccataattttgtttcagatttgagctgaaaatgaataatttaagtgcaagtggtgaattcctagattctccctcaatgccacattaaagcaagtttgttcaacatgacatctcaaaaaaaatcctatcaatagtagggttgaggttaaaaataaagagttataaactgcgaaagcatgtttaggaattctcaccttatgccataccaaaaccaactaaagaactaatggtttagatattctgatgttatgccaagcatttagggaggagaataattcggaatcatttcatcaattatccaaactatcattcattgtaggagtaactagaattcttcagttcattaatgggaaattaataataatttttaatttattgtgtcaaataactaactttctgtaaaatattaaaaaagaaggaaaaatgagagattttccaaacacttcaaaaatcacttttgatttaataaaaaattttctgtctcttaaaataaaagctctatgttctctataaaaaagctttctccgccgctgcctaagattacttgtttcagtggcttttttcagcatcggaagcgaggtttctttactttctttctttagttttgatttctttttgttttggtatgatctgaatcatattttcttccaatggtttaagatctaaattctcatatctagatcaataaagtctaaatcctttcatctacgggatttgctgcttgttttttactccttcatctacagctttagttctggtcgttccaaccatgccagaggtagatctattcgattcttcaacgccttagatgcatacttctcaccattgaagatctcgatctccttcctttctttatgagatttttttcctttgggtcttcgggtgttggtttgtctcaccgccgtttacggtaagaagaatattgattttattttctttgaatggatctctaatctcagatctatattttgttttaatttggatttagaatttgtattagatttttgagttcttaagtgataagtttgggaagttttggatcagttttaatatgttttttttattctggaatttttcctttttgtatatgtatttgtctctagaaaatccgttttctcgccggcttaacttctgaactggttatttttcttacccggcatatgtattttaccccttatgatattttttataaatgaaatcttaatttttactgaaaaaaaagaaacagagagattttccaaaaaggaaagaaaatttttatgcttctagtggtgaagggcacattagcatgaagaggatggactgaatttgaaagacccatgaatatgcacatgctcttgttccctacgcctctcatgggtcctgaatttaataacgtattcccacgtaactaggaaagaaaaaagaaacttaaaaccatgaatatttgttttgtagttttaaaattggttttgtaatgaagattttagttcgtttcaaaatctttttggaaaccattttagtcaaaaaatataccaacagttttcttagttttcttaagaaattgttatgtgaaatgtttttagatacatcaaaaatagttacaaatttcaaatataatctgtaaagccaataaatgagaaaataaagaggaaaagaataataaagtaggaaaagtggagataaattatttaacgtaaatttacctatcataaattatatatagtattagcattttaaattttaaatagcaaaaatacgaactctatagatttactatcacaattacatattaaaaaatgatttctactaattaagagatgaaaacaaaaacacagactaatttcaaaaaaaaaaaaaaagacatatttaaagttatttttttcgtaaacaattatattttcctatatacttccaatattttaaattaaaaacacatgatcataacaataccaaaaaaaaaaaatcaatgcatattgtcctcttttttttttgttcatgatctgttcttgaacttctccattgctcttggagctgaaaaaaaaacacgagcattattggaaaaacagaaaagagccacttatagaaacgaacagaaaagaaaacttaccaagtccaattgcttcggatcctttcattatgcgcaaacgtttgcatgactcgacaaacatcctgaaatcgggatttgggttggtgactaaatttagaaatctattgaaagtgaaagaatatgtgccagctacaaatgaggtaacatattgatgagttagtatttatatataaacatcttctctgtctctgagttctgtcccatgccaaccaaaagatggctgtgcgtgtttataacacatggatattgattatcattttgtgtatttttttgataagtaatatcaataataatgctttagagaatattgttttttttgtttagagaataattttggtcataataatgaaagcaagaagaatgaggaaactcacggccaggggacatcaccaacgagcatccagtcaccatctttgtcctcgtagcttggaacatactcagaactgttcaacagatccatcactttactctcgttcatgaaatctatcatcccttgtgctccataactcccttaattaatcaaaatcccaaaacttatcatattaattagtcgtatatggaaaaaactgtatcgttaaaaagaaaaaattgtaagtaaacacaaaaataataatgataattcgacttatatgtctgaaaatgcatacccatggtaaaggagctgaacattttggccaaggcatcagagagatccttgtagctggtgtacatcttgaggtcaaccttccgaagataaggagctccatccatggaaaccttcacaaaggcgacggttcctccaccactactcattgcctcctctgcttcgccgctcttctgattagccataacatttttccggtagttcctcaccggtggccaacccaccacttgtgctctgcatagaatataacaacacacacacacattcaataacgttattacttatgcatccttacatctttcatatatatgtattttaagaacttttatatcaactattagtctttttatctcaaaaaaaaaaaaaaaaagtcttcccttttaaggaaggtcttcttcttaaggaattgtgtaaatagaacttacttagcaggaggcttagaagggtctttaaggaaggtcttctccttgggagctccattagtgttgagatccacatgtccttgtttgttagattgaagattaagtttgagatcaacggtctcggagaagcctctcttgttcccaacacccgacttggccggactttcaacggtttcagtgcctccggggaggccaagacaaagctccgtctccttaaggttcatatctcttcttgctgtctatatatgtcttaaatcagaatatgttttctctctctctcgataactcttgttgggggtgaagtttgataagaggggaacaagaatgaggtaaggagatagagtcgataatataagggacgaagaaagagactatagtactatactatagtggtagaaaaaaaacggtttaaacccgtgattagtcgtctgacttttctaattctttaactattaaaatacaaaggtctattgtgtatctgctgtagtgcatggaatccctacattttcttgcaatgtgggttctcaacacgtggccttctgctaaacgttggtaggttgttttagtaaatctcactctttcatgtcaataacctgaaaagtataggtgatgagtgatgaccgttgattgttgaatgatattgttacatctcttaggttttgaaaatacgaacatacgtttgcccaaaatatgttaagtaaataaaaatgaaaatatattaagattccgagtaaataaaaatgatattataaaaacatgagtacctctttcaacatgtctaagtaatgtctttattgatcacttctatgattaatgtacttttttaattgcctaccaatttgttagacgttgcctccattggtcaactcttcacgtatcacatcacatgtatacagaaattgggcggtaaaaattccgtgaatcgtatttggtcaacattattatatgatttaatcatataattatatttcttaaaactttcgaagtcagcatcggtgaaaatagttatgaccaactaagtttgatcctaattaagacgtacaacaaataatcaatgataacaatcttagtatatattttacttcaatttggaccatcttctctcaacattgtcctgaaattccgggaaatgatggggcaattttaggaaaatgggcttgttcagttgtccattaaatcattattaaagagcataatcaaattaaaataagcttgtcttccgaaccttccaatcatgtggttcaagtataaccacacatgaacgtataatttgttcgacggaaagtgcggctttgtgactatatttattagcatgctcaattacattttctttgtttagacgtattataatcaaatttcttatcattgattttagttaatcattggatatcaaaaataataagaatataatgagccgttcaaaacttaaataagctaaaagtgcacatggattttacttgcgatctctatataaactataccacccattgttttgtggttatgggataatatcctttggaaatctttggaaataaaatgactattattttagatacaataaaatattccaatgatacataatccttttaattaataacaccataatgaatactttacttaaaaagttaaaatatccagcaaaagttgatattcaaatctgatgaaaatattaaaagttacaatctaactgagtattagtaaatcaagatcatgtaaatttaatattatcgacatatacagtcatttatatttatttttattagtattcaaataattattataaaactatttggttgataatatatcgttaaatttgatcatattacaaataaacatttcttttatgtcaataacattacttactgagtgttaatagctcaattgttaaagactataagacaaaacctagaaatcaccagttgtaatgacatttggaaagaaaccatataaaatgctctagtttgagaggacgtatgttcctaggcctaaactttttagtaataaaaataaaataaaaagcaacatcacttatgcggaagcctatcatatataaacaacattaattagcacaaaccattagtaaaacagatgcactacattcatgatggactattttagcattagcttccgagttccgagagcccaacgaataattctacttgcactacattggagatttctggtaaacttgtttctacttatctacgtaatttgccgtttctactttctaggagcatagaaaaattaaataaatgttttgcccaagaagtagtctaattattttcagattggtggtgcactgtcgaacaaagacacattgcttgttcctttttttggttttcttgatagcaagaacaatctaataacccaaacaatactaatttttgaaatccttgaaagatcggattttattaacatttaatgcatagaatatgactgaaaaacacgaacagtagatatttattgatgggtaactcgatctccgacctatatccacaagaaaacacatcttccctagtcaaagtactattcaattgaatccggtgaagatagtgagacaagtcacatccaattggggaagcaataaacataccaaaccctcaaaggctatgtttttgccttgtcaacatccctcactcccccaataacccattgtttctatgactcccaccattcaaattctcattcatttttatctttttaattattgttctcttttagattttcaataacgtttctaaaccaatataatacatattcataaaatgaaaataccttttcctatctcgcagcatctttcatactcatcatcttattcgttgtccatcttcccaaccacaaattcttctctgcataaacacctttcattagatgcaacaacatatgcacttgtccctcgaattaattttctcatcaaatccttttgttttcttcttaactggttaattaatgcgtacgatcaattatcttcatgcacatatgattagggttttgaatcttatctatttcaagttctacaacatgaagcgtaaatatggtgaacttctatagtttgtggatactattgatttttggtagatgtaaagagtggatattgtttgactacgtggatctatttttcattatgcattatagatggtaggctcccgcagttccgcttgacttttagccataaactcatttactcgttctagtggtagtggagaggcatatcgtatttaattgatatcgtattatacaaatttaaaaatgtttaccttattgttttacctacggatgtctacgtaaatgtaatccctacaatttttttatgtgacccacctatgtttttagttccaaaaaaggtaaaggtgtggaatttggacagtcgaagtatagtatatccaaaagttttgtcaacgatactatccaaaactcgaattatttgtttcttttttcatatcatcttttttttatggcaaataattcgagttttggatctaaatgtgagaaaagttttgtgataattcaatcataatttttacacgagaaaagttttcaaggcacattgttttatacttatctaaattatgtgacccaacgatactactagacaagacgagacaggtccaaacaaagtagtgactgattggtagaaggagatttatgagatggtccgggttataatgttaagccattttcaagaagttatacgtgttggttcttatgatatgtaaatctattgtggtctctcctgtgaccacaacagattgcatttgaccacgtgattttctatttagcaatcaattcacgattggtatacacaacccttatatatattccaaacaaaataattaattcttacatctatcaaaactatatttaaaacgaaagtcagactaatttcaacattataaccatcatggttaatctaaacgaaagttaagagtaatttcaacattacaaccatcatatggttcatacttttttttttttttgaacaacatatggttcatactttaaatgaccatattgttgacgaagtgaagttgattctaggtctggactaacaaacaaactgatatgttcatagatggagaacgtatacgacccaaatttatttattacttgtaataacatattaatagtgtaagatatgtgaacaccttgatagtctagtgcttgagtgaatttgatttgaaactttttatgtaatttttctggcacgtggtatctttttcttttaacatctttggatcaacattgtccgatatatggtctatttttactacgcgaggtaacgagatttagtagaatcgaattctgatagaaacggtggaatcagatggacttaactacttgattaaagacacatccctcacacgtgacaaaccaaaaaaaatgttggacatttggatagtcatgccaatggaatgtactgtacttgttcatagttgtaaataacaccaaaaatcaactgaactaaggaaagagactttaaacatcttcccaagaaacgaaaactcgaacacatattcacaaaatgttctgttaccaaaattacttctcatctgagaaaaaataatctaacataaagaataattaattatgaacatacaagaatatgacaactgaataaatatatgattccgatttagctacgcattcgtaaactaaaattttgattacgattctttataccttagcagagatcaattatttgtttcaaaggttttgttttttaaaacaatagctgattatcgacgtaactacaacttttgaatttgtttttatcaatatatactctgtcacgttatgtagttgtactcaagcagttggttatttgttgtttagcaaatgattcagtttgaatcatctgttacaataatatacatagaacatcaacaatagtactgttcttgtaagtgaagcaaagtcccgatttaggaccactttttaagtttcttggatctaaatgtgtgaatagcgacatcgcattaatgtattacatgaaagtttatggttttgatctgatattaagatatatatttatatgattcaataattccttacaaagtcaaattttatttttatatcccagtggttaaatttatattacttgatgataagtgtaaagttggagtataaaggataataatgcagatcaacttataaacaaggtcctacatacatgcatagatcacaaaccatagacataaataagagaatctggcactgatagtacgatacataatgttggtggaaccagagacatagtactaggaccatggtaggagctgaccatagataggcatcttcctctgcttaaaaatgtttcaacgtattatataaattcttaagataaagtttcatatgtttgaccaaaaaaaagaaagataaagtttcatatatctttttgtgaccgtgaagaaaaaaacataaataaagaagtcatccgagaagaaaaaaaatcatatagacctttttttcactaagcctaaatttgtaagtagttataggatttagtttgacgaccgacggaaagcatgggagaaaaagagatgcacaagcatcctcttaatttttgtatgaaattaaaagtaaaaataaataaatataaatatatatatatatatatattatattcccttttaaaattcagtttttactatacaattatactgtaaaataaatcttggaattttcctaaaagtgacgaatacttgtgattttaatagctcaaaatggtaattttgtaccgatgtagaatatgatatataattttgataattatcaatcacaaaaatgttattaaaaacgttattaaaatgtttactctcagtttttcggtatagtttttatgtaccactctttcttacaattttacattacttcataaaagtttaccattccagtttacaactaaaaaaattatacagatttgtattattagtcagacccaatattggattataagataggaggagtactttgatagtttgattagacataaaaataccctctaaagaaaaatattggactcgtgatcaagtttgtagcctaatgctcctatagtcacattgcttcccatgggtgaccggcgatggatgtagtagtgtggatgcttatgattttttttataagaacataatcgacacaaaatatgtatttgaaatacagacacattagaagaagaaaataaaattaaaaagaaacccctttgcacaaaagagaagaaaagaaaaagattaacccctaaggcagatccaacaaatgttgagtttgagtatatgtatcggcttaaagatttacgtcgataattctaagctgtccaaaattcatatggccctttataaaattattatggcgcggcccatcgcgaaactcatatctaagtaagataggaattcaagggcaattcaaaaaattatggaaggtctttttgtttttgtttacgtctatttttttattgtttttaaacacaaccacaaaaagtgagagagaaaactgtggcaagaaggatcaaagcatgcaaaacactagtggagtatactcccaacgatccagtgcaatatgataatctgtgatgaagatcgaaccattaatgtctagctttgatatatagagggtgtagtgatattttttttgaaaaatgtggcgagggtgaagaataagaccaagatgagacctcatgtttatatttatcgaatgtataaatatatttttggacttagtaatcatttaagtagctacacaatgacattaataatacaaaaaactattatatatgttttattttcgattcttttaaacacaaatatcctttatttatgtttatagtatcatttatgtttatagtatcatttatatttatagtatcatttatgtttatatttatagtatcatttatgtttatgtttatagtatcatatatttatgtttatactataaatgatatttatagtatcatttatgttaattaaaattttgttttaataagaatagaaaatttgatagaatacaaagttggtatgaatgtagtacaatttaaatacaatgtgtcatttctctgacttgttttatattatatataaataattgcagtgataaagcaattataaaagtatttccctagtctccctaagaactaagaagacatgtttgttccacatcaagatccgaagtaggtaattgatcaaacgttggtttccaacgagagtagactacaaccacatgagtagaatgattaggtatagaaactttaagccataccagctttgcccgagataaatgaggatgaggcttaatttccttagatgaacccacatcatttttttgtgaacgtcgtcaaaattaaattgtctcttaattaacttgcccttgagacacatccctagatggagaaagacataaccatggcaaggaaactcttataatttagtttccacctctaatctagcttgagatagactcatctatcgtttgaacaaatttcagcaactattgcttctaagctaacacctaataataaatagtgttgctttggtacaatggtaaaggagagaaaattctccgtcacctgggttcgagtataattgaccatcagggttcgaattctaacatagttttttcgggtgccaatattactctttggacttaaaaagaaaaaaagaattagaccatgactattgactacccaaatatatatggatacttaagttgttaccctagccaaaaatattataagtatgcgcaaatctaggatgaaaacgatgttcatgagacttctcatgctgaggataaactaggcacgctgcatgcatgttttcggcattagttctcgtgtaaaaaatattattaggatgatttatgtagttttggttgaatcctcttggtgaaaattcttttgacctaacgaagtattttattcgtcatacctatgcaatattcgcagtagataacaaccatttgatattcttcataagttaatccaccttatccttcaacgttttcatttttgtgtgaatcattatcctaactatgtgtcatctatcgtaatattgagtgattgttgatatatgatgctaaattctcggccagacgctcaacgttatcatcttgttcaccaaatcgctactggtattatctaaattcttatcatgaatttttcttcaggagtgaaacctctttgaacctattgtttggacatgctaaaatgcagtctttgagttattcttagggttcacataatgagttaacactttcttggtagaatttatagatcatgtatgttccacataagggttgtctttgataaggtgagagatctggcgaagaatatttcgcccataagagttggcggtgatgcggtataaactcaacctgaaccgagtatataaaaagtggtttaaagatggcacacgtgcatttcttaagttatggtatgtgtagataaatgatttgaattgtgacttaaatctttgtggctcagctttttgtcctttctacgatttgattttggaccataccttttcaatacgttccaaattttgtcaggaattcatcacacgagtgtaaattgtacctacattgtaacatctcacatgcaaagttttttttaatgcaagttaaatgcacacgcttatacatctgtttttctacatatatgtagttgtatacctttaaatgaataatcatttcgaataataatttcaaattacttgaatttttattatttaccgaaagatggtgaatagttaaacatgtatatcatatactttgattaaaactgaaaagtgtgattagtgcaaaataatgttttaaaagtttccgttttcgctaaaagaaaaaccttaatattttattagttctccttaaaggtaaaaatccacagaatttattcgaaatttttctaaccatttttgatgaaaatagtcttctaaaatttaccttaaacttaaagcataacctttaaatttaactattttgtttaatttatatattttaagaacctttttgcaaccattcttttagtttagaccccaaaaaaggagaaaacaaaggaaaaaattcaattagtcaattcttatctataaacagtacagaagacaagaacaaagagaaagataagagagaacacgtaagaggaatgagaaccaagtgagtgcatttcacatcaaagttgagagtgagcattggcatgttcattgtttgctcaacgaccctaaaagtgtctactggtggattgtgtccccattcctatgaattttgcacgctctaaagtattaacataacatgtgattgccaaaaaagaaaaaaaaaacaggcaaaattttctgtttttttttttaaaattgcagtgaagagtttgataggttttagtaattaacatgccacacgaaactctcaaagcttaggtatggattcttgtatcgttgacaatcgatatgcatatgagaacaaactacacaccatatttgataaatatgtaagaaaatgaatattcatcaacatgcgttgaacatggtttagcgtgaaaataacagttaacatggacacatggtgacataagtataaatgatattatcatgattcacctacctgcaggagatccatctattgggatcagaaaatccgttatactattatatagcatgtaaactctacaattatgttatcatctcccacacaatgagagggatttccaaaacagatttaacaaatgttacttcttataagcatacgtcttgttttatattgaacacgcaagcctctagcgactagcatctctgtatttcatgatcaagtttatacatatacttttttatttgttatactctttatgttttttttaataaaaaaaattgttttggatgaatatgaaaagaataagaaactagaaataactttttgattaataatagttcaataatatgagtactaattattaatttaaaacacaaatgttgtatggaaaaacaaaaacaacaactaaaatgacaaaaaattgttcaaccatcttataaactttaaacgtagggagcattactttatacttgttgtaaaaacgataatgcttattggtaaaataacccatatacattttgatttgtcaatatgttcatatatgatctagtttttgttctcgttgtcgctagatagacaataaaatttcttagtggacagtgattgtggaatgaatatacgcccaacacaaatataaacatcaaattaaggtgcatgcggtatgggaattgcaagttaaatgaacatagttatgcgtaatttcgagaagggattaattgtattaccttgctcgaaataccacatgggccgtgtccccaaaagcccatttaaaatggtttttttttttttttaaatcatctctttagatatttttttcaactctttttcaacaaaatatatagtttcatatagatatttgtatttataataaatgttaaaatgaaattttacacaataattaaaataaaataaatagaaaaaatgttatttgagacagcatatcacatggccttaccatacttcctgcatccattattccattaagaacactcttcaccctcatccacatgcatctccctccccaatttatttactattgatcataattgtacaaacctatacttacaatttatatatgtgtctacgagaaaataaataatattttacagtgttttgtctattattttgttctatagtttcttgcaaacaaaacattacttttcacgcaaaaactgtcgaaatatttataaaaggaaattgttaattcttcgatacaaattgaccattaatatttgatcatctattctagacatctactctaccatataccaaacctttacacaaaaatgaaatattttcatgaaaactaccccacaactggggtgatcgaaaaagcttgatctatatgatcaacatgtccaacactagtttcattttttctactatgatatccgatgatccaatctgaactatacaaaatgtatctagatattttcttgaatcaatccgaataacgaatagttgcaaaacataaacctagcgtgatcgtgtggtagaaggacgaaggtcgagaagttctcttactcttatgattttctctttactcatttgaccgtaagagaaagaaacggctaggatctcgcgtacgcaactggcggagacaaatcaggaccgttgaaaataagaaagaagccgcgtccaaaatctttgtgtcccacctttgtccccttgcctctaacttgcctcctcatgctccccgacaacgtcataattcatatctctctctctctctcgttaaccctaatttcaaagcatctttccttatataaatctctctctctccctcaccattacacaacacacacaagcattttcaaggatatcaaatcacaatcccaagaagagcaataacaagagaagaagaagtagttcaagaattaaggaagagagcttctccgttaaagtatagtgagagaatatggaagtcaccaatgggcttaaccttaaggacacagagcttcgtttgggattacccggagcacaagaagaacaacaactagaactttcttgcgtcagaagcaacaacaagcgcaagaacaacgactcaacagaagaatctgctcctcctcctgcaaagtaagttgagatctgaaagttatagttttaatatccaaacttcttgatatcaatcggtgtactaataatgaatcttgatttgtaaacttcagaacacaaatcgttggatggcctccagtgagatctaaccgtaagaacaacaacaacaaaaacgtgagttatgtgaaagtgagtatggacggagctccatatctccgtaagatagatctcaagatgtacaaaaactatccagagcttctcaaagcactagagaacatgttcaagttcacagtaggtgaatattccgagagagaaggctacaaaggatctggatttgtacctacttatgaagacaaagatggagattggatgttggtcggtgatgttccatgggacatgttctcttcatcttgtcaaaaactcagaatcatgaaaggatccgaagctcctactgccttatgatccattgtctcaaaacaccttttggtcgaggcaaaaacaaattctactttgtttagataaaaaaaagtttggtgtaaagaaagaaaaagcaatagggttacaaatacgttatatagatgtaaactagctttggttaattctgtaaaagatgagttttgattatacgaagtttatatgtatgctcaagatatttgatactaacataaccaataaagtttagtatttgatactaacataagtttgggacatagtgaaagatataaaattttggattaagaaatgggcaatgtaatggatatcactatcgaaagttttcaacttttttttgttttgtttaatattagatggcgagaatctttagtcactacccaataacttgctccaccaatttgggatttgacttgagctcttctcatcgtcatcttcgtcgccttcttttccgatctactttcatcactccttcactcactcagtctccgtaagctcttcttcttcttctctcagtctctgtttttcaatccgaaaattcattactttgatggtgttaccacgaattgagaatcattgatggtattgctttgatgggtatcgtttatatgacagtttttaatccgaaagtttattactttgattggttttttgtttgttctgttttaacgaatttgaagccaatcatatctactaagaacttgattggtttagagttatggatgatgaatctgattaatggaattgttttgcaatcattagtgatttatgagatacttgtttcagttacaagaattggattcgaagatttgtagctatggattcttctggaactgattcggctaaagaattgcatgttggtttggacccaactacagaggaagagtatgccacacagtcaaagttacttcaagagttcattaatattcccagcattgataaagcttggatttttaattctgattctggtaatcacttttgcatattcaagttgggactttgtaaattaagatttttgagtcttttgttgttgaaaatcatcttcccaaatgaaatgatgttttcactttgatgctcttactacaggttctcaggcaatgtttgccttgagtcaagcaaaccttttggctaataaaaagaagaagtttatgttgtcgggtcatatttcgaacgaaagtaaccaatctgtaaactttcactgggcgccatttcccatcgagatgactggtgcatcggcttttgtcccatctccatcgggattgaagctccttgtaattcgaaatcctgaaaatgaatctcctacaaagtttgagatatggaattcttctcagctagagaaggagttccatattccacagaaagttcatggctctgtatacgttgatggatggtatggcactttgtttttggctgatttttaaagacaagttcttgtagaagtataaaaatgagtaaggcttatgtatgataggtttgaagggatctcttgggattcagatgagactcatgttgcgtatgtcgccgaggagccatctcgtcccaagcctacatttgatcatcttggttattacaagaaagaaaattctttggacaagggtattggaagctggaaaggtgaaggggattgggaagaggaatggggagaagcatacgccggaaaaaggcagcctgcactgtttgttatcaatgttgacaggtttccatcaatctctccataagaaaagaacaactacccagtactttttatgatggttgtttctctttttctgttaacagtggagaggtcgagccaatcaaaggaattcctagatcaataagtgttggacaggttgtttggagtccaaacagtaatggatcagctcaatatttggtttttgccggttggttaggagataaaagaaagtttggtattaagtactgctacaacagaccatgtgccatatacgcaattaagttcacatcggatgaaccaaagtaagttggcaacttctataactactaaaagacagcttaataattcctaatttccgaaaaaatatcttataaagtttgtgtttacttgtgtttcagagatgatgacgcaaatgaattccctattcataatttgactaagagcataagcagcgggttttgtcctcggttcaggtttacttcttatgaattttttccttaacttagaaaagttatgtagagtatttgttgtccttgttactctgtttctaactgagcgttcttgcacaactttgttaaacatttcccttatatatagtggtgttgatttgcaatgttcattttaattatgacctgtttaaaacttactgtagtcaccatacattgtttccttccctcacagcaaagatggcaaatttcttgtgtttgtatccgcaaagaccgctgttgattctggggcgcattgggcaaccgagtcacttcataggattgactggccaagtgatgggaaacttcctgagtcaacaaatatcgttgatgtggtgagattatgcggacctttttctctctttatattccaatgtataaatctttcaacacaaacaaattttttttcctagaggaataagatatagcaatcaaattgatatatctgttatatgttatttgataatattcaaatatgtcttataatgcagattcaagttgtgaattgtcctaaggacggttgtttccctgggctctatgttaccggccttctgagtgatccatggctgtcagatggacatagccttatgttgtctacctactggcgcagttgtcgagttatactcagcgtaaatttgctaaggtggctgatgaattaatatggaaagtttcagaatttcctcctgctgctgtactgactgatgaatatatcttgacaatattacagcggtgaagtgtcacgtgccagccctagtgattcagattattcatggaacgctcttgcgctagatggtgatagtattgttgctggtaaaatctcttgagcaagttcctaatctcagttattatctgttacaataccatcttaaatacctaccagacttgaaacaacattgcattttctttctctgagtagtgtctagcagcccggtgagtgttcctgaaattaagtatggaaagaaaggtctcgattcagctgggaagccttcatggctctggtcgaatatccaaagcccgatcagatactctgagaaggtaaaagcatatattgctagaccgttttgattcaaatgatgttaggctttttccttatctatctttgttttaattgtggcaggttatggcagggctttcatctcttcagtttaaaattctaaaagtaccaattagtgatgtttctgaaggtcttgccgaaggtaatttacacttaattttgattttgacaataagtattctttcctagacttcggctctgaatactctgttattgttcatggcaggagccaaaaatcctattgaagcaatatatgtatcgtcatccaagtctaaggagaatgggaaatgtgatcccttaattgctgttcttcatggaggtcctcattctgtttcaccatgcagcttctccaggactatggcctatctctcctcaattggatatagtcagctgattataaattacaggtttacttatgagcatgtatacagctctgaattccactagttcatcaaccttcaggagatcctaacttggtttttggtaattcatttgaattgaaggggttcattaggatatggggaagatgctttgcagtctctacctggcaaagttggatcgcaggtattttatacatgcgcatgtaatgtcatttttcttctttcggacttacattctgcttaattgataagcttctctgacgcaggacgtgaaagattgtctcttggctgtagatcatgccattgaaatgggaattgcagacccgtctagaataaccgtgctaggtggttctcatggtgggtttctgaccactcacttgattggccaggtactactgcaaatacctctcaagtatcagtcactggattagagatcatcatccttataccgtaatattcctataggccccggataaatttgtggcagcagctgcaaggaatcccgtatgcaacatggcatcaatggttgggattacagatatacctgattggtgtttctttgaagcctatggggaccagagtcactatacagaagccccctcagccgaagatctctctcggtttcatcaaatgtctcctatatcacacatctcaaaggtaaaaccacaacttccattctccagtactctttcaagacatttaatgattcctcttgtgtatttacatctgcaggtgaaaacacctactttgtttcttttgggaactaaggatctccgtgttcccatatcaaacggatttcaagtaagatccctttttcgccgttcatttgaaagaatttgcaacttgttcaagtttgcagactctcaaaactcattggtaatggtgtctaatccggaattattgttttctatatagtacgtgagggcgttgaaggagaaaggagttgaggttaaagttcttgtatttcccaatgacaatcatcccttagataggtaagacaccaaagcctgccattttttgttgttcatagttaaatgatctctttgagaatggttttaattttaaaacatttgtttgcttcttgtgattgttaatgcagaccacagacggattatgaaagctttctcaacattgctgtctggttcaacaagtactgcaagctgtgaacacttgattttttttccgtatactgagtttgttttcttacaaaattggagttcgaagaaatgaacgtttaaagaataatcatttggttcaccaatcttagtgcaatgaaagactgccactttctggcatttcagttcgtgtcataaacgttttgaaattaaagttcataggttcttttctgcaatcaaacgcatgagtgaaaaaataaatgagctggtaaaaattaaggctggattgttttacatacaaataagagtaggtgcaagagtttgcagatgtaattgtaagttattttgcttggattccaccaacgtgtcctaacaacttaaaagaaaaaaattcaagataagcaaaatgtttaaagtttataaaaacactataaacatattattgtagttaagaaatctaatatgtaatgcttcttcttgtcaacaaaatgaaatggtttcatctttgaaaattttattaagaaatgggacgacattgaaaaacaaaatgtgttccaaattgtggagttttcagattgatccttataaatattgtcatgtttttcaatgaatctaaaagatttttttttttgttcgcgggtttccaactcgaatgaactctaaaacgattatatgtgtattttttttaatatgttttacaggtatattttaaatattaatatatatgtttgattaattagtaatcgatttgatcaatatgagagtggaaatatattttgttcgtttttcaatcaacaacatgaattatgttggtttaaattcgacggtttaaacgttccaaaacaaaaatattttattaatttatttaaaacattataactgacacataacagttttgaagtttgatatcaaacgaacaaaattacgcgggaaaaccgatcaagctcttagatatattgacaattgtagctagtaaaatgtcatgttttaaaaaattgatatcaaacgaaaaaatttacaccgtaaaaccaatcaaattcttaaatatattggcaattaagaaaaaacatgtttttaaatttgatatcaaatgaataaatttacacgggaaaaccaatcaagcttttagatatattgacaaatttagctagtaaaaagtcatgtttgaagtttgatattatatgtagcattctatgcaaaaaaatccaaccaagattcaaattaatatcttgactattttacgccggacaaaaattcctatgtcactttggtatcaaaagtaagaagagaggtgatgctcaagctcaagtgacataaagtgaatccactaatcttgataatcttacaaaactaaaatcatcttgagatatgtacacaatttaaaataataaagaagcaacttctagatgacgtcaattgtgccatgagagcacaatctcctcaagctctacaattagctccgaccaatgagactccacctcctcctcctcctcttcaccttccaccacaaccttcacatccgccacaaccaacccttccgcaaactccaccacctcaaccaccaccgcagttcttccttttcccaatcccaccaccttagtctcttccttcttctccactctaaaccctaacttttcccctatcatccccgccttctccaccactctttccgccgacactctcgccgtaaacctcttctctttcctcttcctcctctcaaacaaccccgaaagatccaatcccgatgacaacgagatcaaatcaaacgcagtaatcgcattgctcgacttcgcttctttctcaagaaaccgatccaactcaaacacactagactgaaactccgaaatctctagagatttttgaaaccaaaccgttcccatcacagcttctatactcatcctcgtctccggattcggatcaagcaacttatatataatagatcgagccggtttcgagatccagctcggaaaccggtaatctcttttatgaatcttcctatacatagcaacaatgttggcatcatcgaaaggaacgtaaccagcaagaagaacaaagagaaacacaccacacgaccacgcatcagctttagcaccgtcgtaacctctctgagcaattacttccggtgctgtataagccggtgtgccacatgccgtgtgaagcaatccgttattacttcgatgctccggtaaagccgatagaccaaagtcggagaccttgaggtttccttgcttatcaaggaggagattctgtggcttcacgtcgcgatgagcgattccgtcgcggtggcagaaactgagcgcggaggcgagttgttggaaataacgacgcgccgccgattcgttaaggcggccgaatcggatgagtttggtgaagagttctcctccggcggcgtattcgacgacgaggtagatcttggatttagtggccatgacttcgtggattttgaggacgtttgggtggttgtggaggcggcgcatcgcttcgatctctcggattattctcggctccataccggaatctatggttttttgcttgtcgatgattttgatagctacgagttcgccggtggagatggaacgagctacatggactttagcgaagcttccgcttcctagtcgacgaccgagttcgtattttccgagaagaactgtccctgtgattttttccggtgattttggatatggagattccattgtttgtggtggttgttgcggcggagatggtaccggagatttttttaaagagggcttcagggacggttagattatggtgtggtgactgtttttttctttatataaggaaaggaaaaaatcactttaatttgtttttccgaaattgcccttacgttgccttcgaataaaaaagtcgtatttcatggactttaataatttttgggaaaaaagaaaacaacgttgagattttatttaaatatcacgtttgacgataaaaaagaactataattgtgtattttggatttgcatctgaaattgatttttgatgtgaatgtgtctataaatctgtcaaacggtagacacttaacttaagaagttaaaacaagctattaattaaagttaatacttactaattaatagctttaagagtttcataaagttaatattaataataagtaacaatgatgatgattttttttttttttttgaaagggtttcaacgatgatgagtttcttttttctttcagtgataacgttaattaataactttatgagttttgacagatgtttatataaggtataatgggtgaaaatggtagtattaacttattgcatatatatgaaaaatttaggtaaatattatttaagaaaattaagatttctataaactcatatagtatgtgaattgttcttgttttgttgaataatgaatgtgcatgaggatcgtgaaaactttacactactgtaatcaaatttctagaacattgccaaactattacctttgtctacaagaacaacttcacgtattcaatatgggtgatggttgcatctggagaaaaaattaaataaaaaactctttaacatttgtttttgtatttatgagaaacaaaagaatatgaaacttttgccctattttatacatattctaaaaccgggattaatttttaaagatttgtatgtttttatatacatatcggaaatcgaattcgtgtgttttatggtgtttacgtttcggtttatttggatttaactactagcacaactccaccaaattacaaaaaaaaaaaaaaaagcctccaccgaattataaaatgtttttgtttgtttaaattattgttttatgtatattaaaattatatacatttagccgttgccgacagagaacgtatgtatacgtataacatatttttttccgctaatccacacgtgaagaaaatttgcataaactgttcacttctataatttgataagatataaattgttatccttccattatcatcatttgaaaatatggtgtacgtagtaaaattaattactcagggaattcaaaatactcacaattgattaatctttttttacaaatctttcatcgaatttcgacgactaactagatgtgggggaataaagctggtttaaacgtttggaagactttcaaatttgccggattcctcaaaaaatgaatttgcaaaaagtttgattccaaatggaaaaacatgattctcatagctagtcatttgtattgtacccagctgtatttcttcccatctttatcacacttgtaattttggtattcattattaaacatttgcttaaataccaaaaaaaaagacaaagtatattgtgcattatcacatactttaactttataattcaagctgtatttttcaagcatacatcgtagaataacttataaggagaaaaatatctcgttgttataatcatgctttataaaaaaatataaaacggtcctcatcagtgggaccaaactcctcaagatattctctctagtacatgcacttcgcatagtcaagattttcaccctgaaaggttaaaaacacgtccatagatatcaattttgtcttaatcactcaaatgataaataaaataacttttgtacaaagggggtttaagtcatttcaattccgaaggtcaagcaaaaaagaaactgatcatttttggtgaaggctctcccgctccttcctcgtgagcagcctcaggctcacaccaactcaccaacatgagagaaactgtttccagaaaacaacatctaccactaccctcaagattgtttggagcttgtcgtgaagcagatcaacggctatcactacgccatgtcatcgaatgttataatggattcacaatactcaatgtaacgggaaattaaagtaggcaacgaagaaggcatgcaaattgacgttttaattattcttttttggagtgacttttttaggatcttttaatttactcccactaagacttggcatattcgtcctaactacaccgcactaatataagcccttatttaaagaactatttaagcatggaaaaagttttctcatataatttatatggaatccttttgatttatagtcaaaaatatctcagaaattgtattatattgatagtggaaatagtattttctttgattttatataaatatactttatgcgagaattgaaggtgagttggtcaaattcattttgtgatattacaacttttagttggatgcagatgattgaatataggtatatagtataagagatactgagatagtagtgacaactgacaacctataaggagttatgtagaaactttaatatatgaaatgtgacataagaaataagaaaaggtctattacaagcgttataggggaaaatattgtgtaaagggctgcgagcatgttatccttgtcctcgagcctaaaagcatgcatcgtcgaagaaggtttttaagtcgaagcaagttttgtagtgcaaatagataacatttatcgatacatgtccaaaataaaagtatagctatataacacaactttaagaatgatttcttcttttattaaaaatatttgtttaataaaataatatttaaaaactaaaacatgtaatctagctatttcttttagtattgccgatttaaactttatgtaatgcatgctagctattggatattgagttattgacataaaaaactaataaaacttgatataatgaattaggcagagcaaatgattacttgaaagattaagaatcatttttaaaatttgttttctatcaatgcattgtggttgtatggtgtgtgtgttgttgtcatatctcaaatcatgtaggtggagaaggtgaaacgtaaggcgccaatgaaatggtacgtccgacatatatatacgttataacatatgatttgtcaataaaacaatcatgtaatcaaaattgtgattattatttcataagacaagttaggcgaggctgttcatggacatttggacatctggagatcacaacccgaaagttgggctttcatttaattggtgggacgccatataatcatatgtcttaaatggaatagtggtgagacttgattgtttatttttatatatacaattttttacagagaacaaagacaatacaaagaatacaaggagccaatgttactaaaaagacgacattacaagagaggccacaaaaacgagaactaaacaatgggaggattacactttggagaaagacaaaaaaaaaaagacgacatttgaatttgtgaagaacttttaaattttgtttggtaacagagataatagaagtaattacttagaccgtttttacctacaagaaattgatttatttgttttattatgtcaatggaatatgatgtaatattcaacaaatttgatacttaaaagaaaacattatttttaaatattagtagggttatgagacttgactatatatttggcctatagaattaatgaagatggttgacaaaaaataaataaaaaataattaagatgtcagagaaaccattaattccttaaatatgtactaaataaaattaataatgttacaatcatatgtgttagtagaatattagtgagacttgactatacatgttttactggcctataaaattaactaagatgtcagagaaacaagaattctatggactacaaactataaatttcggtaagattcaaatatcttatgactttatgacagtattttataaattatattgctcataaattctgtaaatgttttgcttttatataaaagttggagtcgcacattattcagtttctctaaaaataggcaaacaaattaagtgaaatcgatggatggacttggattctcttatttaattctgaaagctacatggtcgtgggaatgttgccttcataggtggttgatgctccatcaccgttaagagtcacaatatgtagttgttattcaatattttgtcgataactaagatcaaaaatgggacaatactatataatgaactcgtctttccgagtcctttggtctcttctactgacaataatatttaagtgtctttgttaaaaaattcaattcttcatcatatcaataattgagtatgattttattagcaacacaaacaaacaaaattctctaaacttattatattctcagagaaaacgacagataagtaaaacattaaatgtttttctttttcttgacgcccaacatcagctgtgtttttgtatttaggttaaaatgttacatgtatttataggatataaacgataacttaaaacatgtgattttgtgcaaggttttccgaaaattctgtttttatgtttacgaaaaaaaaataaaatctcatatttaaaaagttttctgtttttatcattgtatttacttgatcttgttgacaaaataactattttacttattatttataaaatttaagttaattaatttgtttaagtagtgattaacttactgatatgaatatgattgccactagtatgcttttcttctcaagtcaatatgaaaaatgtgaaattgttagccctaagcatctaacggatactgggaagcatacggttcatgtttgtcactacaacaacaatttttattagtcccttataacatatctcttttactgatcttaagcatcatccatagacaattgcaggatcacaccagttttggatcatctaaattttttttaattttactaaaattcctccagatctaaatttcattaaatcctaagtctaatacattcggtatttgagaaccccgcctttgttttaagatttttaatcataactcataagcgcgtatgaattcggattatccaaaggctaaactacagaaccaaaacgacatagttttttgtcgtttagaatctataagcgcagacaaaagtcaactttagaatcaacccaaaaatagaagtcaaaattaaaaaccaaaaccctaagattttagagtagactctcttcgaatggagaaccactttgttacatcgaaactgatccgtgtctctctacacgaagttgagaaccagctcgaactatcactacgtcaagccttcgagaatctccagccgaaactacgaccaccgttctccttagaactcccagacccacaagagtatcttgagctcaataaagccatcgtctatggagttttatgcgaaccaaattcctctaaaacccacatcaagcacttacatgctctcgtcactgatgggtacgcgtttttcactagtttacttattggaatcgttgttgaattgtatgttaagcttgttgattccgctaagattcagcttatttgggtaactaaggagatgattgatgtttcaagtgtggggattgaggatttggttgtgtcgttgttgcgacgaattggaagtggggattatggtgatcataatgtttggctttgttctgaattagttagtttgtttcttgagaaatgggaatgcttgcttgatgattctccattggtgttgactagtgctctgtatagttttcttcggttattagcggatcattatagggttttaggcgttgtgaaactggagaatgtgaagagattggagatcaaattctgtgttaaaatgtttagagagcagcttcatttaagtttgaagattggacgggaccttatcctgttgttgcaggatctgtctcatgtctctgagttcagagagatatggaacgatttggtgtcgaaccattgctctgagatataccagttgaagacttctagtagatacttccttcttcgaatcactcctgagatggaaacacaattaaggtttttgctaggaaatgttaaattgggaagtcataagcggcatcagatatggttcttgaagaagtttcttttgggtccggagaaagaaacacttttgatagatatagtgagattcgtttgctgtgttattcatccaactaacgaaatcatcagatcagagatcatgccaagatgggctattataggttggcttttggaactgtgtaggcaaaatcatcacatcgagcgaagcgttatgctggctctgttttacgactggctcttctttgacgaaagaatcgataatattatgaatgttgaacctgctgctctcttgatggtatggtcaataccgcagtatccacacatcactcactccttacttgaattcttacttcatcttgtcgaaacttatgacataacccgtcgcgatacgattgtaagaggtttgacgtcagcattcagagaaattgagcgaaaaggagttattcggtcgctggatatattcctagcaaatcctgcacttgcaccagatttgaagaagaagctagcaaatctgttgtcatgtcatcaggagaagacggttcatgtgaatctcaatcaagttagtgttctttctaagcaaacagttctttcttcggaagctaatttaaaagattgcagcaccaaaattgttgatactcctgaccagaagttggacaattccgttgaaaatccagcaaaaaaccataaggttgaactgttcaaagagtttataagaccctcacggtgaacaaaacccttagtctatgttgtgaatcttctataaatcttcagccggaatcgaagctggactctctctactaacgatcaagagactcacactcgagaaaaccatacaatcaaacacttggaacgaagacggagaagaatgacacccacgtgattcagtgattgatcctatgtctcggcgagaacagagactagcaatccactatctcaagtttacaagatcatcaagagttctaccagaggttcacgactaagtgttctcactccaaagataatagaatgaacacagcttagagatgatctttctctattatagttgtaacaaactctcgataaaccaatataatctttaaccattaccggttcaattaaatttttggttaaaagaatctttaaccgtcgatagctctccttactgatatgatccaacggttaaataaaacgtcattgtgtttacggatataactagactaaaacgcagcgttttaaattaaacgactagacccattaacccgacattttgacccgtctttgttcttcctcaatttcaattcgcgttcgatttcaaacctcagcagattccgattagattttgcgtcgatggcgtcaaatccacacagaagcggtgcgggtggttccctttatggcggagccgctccatacagatctaggtataactttattatcagtttctcgttttggaattgcttttaaatttctttctctgatcttttggatagagaaaactagagatttatgggtcatagattttgataatttctgcggaactatagctctattgatttgtatttgtggctgcagggaagggcttagtactagaaatgctgcaggttcagaagaaatccagctgaggattgatccgatgcactctgacctggatgatgagatcacaggtctccatggccaagtcaggcagttgaaaaatgtaagaaaccctcctagttaccaattctatctctcctttgtctgtgttttcattacagccttttggttttgaaagtggctctgtatatgtgtttttgttccagagtactatgatagtatgtatgttcactcatcagtgagtatctgattaattagttgacttaccaattgaattctacatatttgatgtctgttataaaccttccttgcttgttgttttatataccatacttcttaaatgaatcagttgacattctttacgattccttgtgttttacctttttgaacataacttatgcctcatgattttggttagtccattgatcgcatatttttatgcagattgctcaagaaattgggtcagaagcaaagtttcagagagacttcttagatgaactggtatgttgttgagagatgtcgcttaagttctttattcatccatcatagtaaagttgaatgtaaacaccttacatcagcaacatgcattttagtctttacactgtaggctaatcacttattattatccgagttatgggttacctttatcttgtttcaaatggctgtcattatttgggaaactacagcttcattcccaacgtatgtataaattataccatagcttacaaaccaatgaaaatcttgataaaagggactgtttagattatgttcagacttatacgcagggactggtctgaactctggtgggtactgggtaggaatatatatcttcaatctcggctagttaagtgaatgcactacaaaatggttgcagcttatcattgagtctatatataccggtttccttataaaggagagtatgatgttgaagatgaacattgctcttatttgtttctagtttttctttttgttacctaaagaacatcagctagattttgttgcgtgagactgcattaagtgctgttatacagaattactctaggatgcaaataacaagggggagaaatggtgttcttgtctgaaacataaagctttttgtttttgtgtgacagcaaatgacattgatcagagcgcaagccggggtgaagaacaacataaggaaactaaacatgagcataatccgtagtggcaacaaccacatcatgcacgtggttcttttcgctctcctcgtcttctttgtcctctacatctggtctaagatgttcaaaagataaaaagactctccaaacctacgatgaatcttcatttcaatcggcgaagaatgaaatctagaaatccccttgctcaagtttaaaagatcatcgagagttgtacaaactggagtaagaagaattcgcttactctctagagattatagaacataacattttcccacttttagacttttagttttgtgttcgaacaaactcttttgtcgataaccaaatcaatcttaaccattaccggtttaattagactttggttcaatatcaaatactactacttcttggttgtattaacagggcccaatggctttgctttctacgaaatctctacaaccaattggaaggtttaatgttttaccctgtctcctccaatcatgtcgtttcaaaatcctctaatttctcagtcctagcgctaaagctcttcctgggttcgagttgatttctcagtcatcgattgaaattttctcgggaaaaagggcctcatcgtctccatcgacaacgaggttagtcgttaattggattttgatccgtctctctaccacaaattgtttcctttcgtctcttgtcatgtgctcttaccatatccgattcgcatcaaatccgtagcaacatttaaaactaagaatctgcaactgagaactgtttcgtagctgggattatgttcattgaagcgttaatttaattctattgaacagttattgaaaggtggtggcttttgcttctttgtttcacagaaaccagaaaatgcaaagtcttagtcaacttggaccttcagagattttccttgtcgccagaagagaaaaacccagtacgaggttagttatgagcgactcgagctcgattcatgacttcttgagatattgcacttcttgactttggtgcttgattctatgaatttgcagagcacagctttggtttacgggaagactctcttttagacaagaaacaaatggtgagtgaaccaaaataatacaatggagaaaatgaatcttatctctttttttcacaatttttgaaaacaatatggtttcataacgatgttgttttttatagggattcgtttaaagaatagagtagagtttagtccaagacctgtacctccaaatctgatcgcagcagagaaagaagaagctaaagctgttttaactctattcttcaagaagcaaggtcttagcaacagtctctcttctcggttaatcaacaaatccgatctattcattgaccatttagtgtccaggctccattctgttcataaagctcgatacctcgtaggttcgatctttcttctttaaaacctttactatttaatgagaagagctcggcgatgaactctaaaagtttgactgtaacaggaagagagcttactacacttgagattcgagattctctcattccttacctcgaacaacttcatgaagaacatggtgatcttctcgctgagcttgttgtgagcttccctgatccaccagctgaacctagacttgttgcttcatctccagtttctgtcctaccacctcgtggtgacacagattctgctgcagacactcgtaaactcagagcggtgtctcgagtcagcgaacttgacacagaaggtgcattacgtcctcagaccctttaccttcttgacctcggtttaaacctcgagcagatcaaaacgatcactcgaaagttcgctgcctttccttattacagcctcgatggaaaaataaaacctgttgtggaattccttctagacctcggaattcctaaatcagatatccccacaatcctctgcaaacgcccacagatatgcggaatcagcctaaccgataacctgaaaccgacaatggcctttcttgagacacttggcattgacaagaaccaatgggcaaagatcatttcccgtttcccagccatcctcacttacagccgccagaaacttacttcaactgtcgagttcttatcacaaactggtctcacagaagaacagatagggagaatcctaacccgatgtccaaacatcatgagttacagtgtagaagacaagctccgtccaactatggagtactttagatcgctaaatgtcgatgttgcggttctcctacatcgatgtccccaaacgtttggattaagcatagaatcgaatttgaagccagtaacagagttcttcctcgaaaagggttttggtttagatgaaattggaatcatgatctctagatatggagctttgtacacattcagcttgaaagagaatgtcatgccgaaatgggattactttcagacaatggactatccaaaatccgagctttgtgaagttccctcagttttttgggtacagtttacaagagaggatcaagccgagatatgagctggttcagagaagtggagtgagactgctgttgaaccaggttttatcgctgtcgggaattgagttcgagaaagttgttaagaagaagatgatgaaacttgtgtctaataacgtaattgctgaacaaagtagtggtggtttgttgtgaatgtttagttttagagtaatcaatttgccgagttccatgtgagtcgcagaaacaaatcccagcgataccaattctgtaaactgacccattctgctgctaaatggtgttcttaaccttggcattacattggagtaaagaaaacatttatcaacaatgaaggatattatagtgtagacagtgtcacagaataaacttggtcatatacgtaaaagccaaattagccaatgaacactccaaaactttacaaagatacgagagaaaagttgaagaaacagaagttcatcgatacaacgatttgcaggtagccaaaaaccgtagttcagtggctttgtcttcccattcaacaccttctaaccatttgttttcgccgtattttacgacaagttctacacctgcagttccactcttggagttcaatggaagctttttcagctttggacaatgttcttgcactgcaagctcactcagacgtggaaaagacaatggtgaccagtagatgctctttagcttaggtaaatcagataagctaagacattctagtttttgaaaaggaatgataatacttgcattctcgtccgtaacacttgcagctttttcttcactgattatatcctctagttgctctgcgaaacgagcgtcgagataagtaaggtttggagcaaacaatagccatgtcaactcctttagaccatcacattgtcctataacgactttggagaggctagagaagcatgatgatgttctcatctcgacttttatctccttcattccacacttccatatgccaattcgacggatattacacatgcttggaaaagttaatattttgaaagattcttcctcaacctctataagctctacatattgaatagatttcgccaatctctgagagcataacaaatgttccaaaaccaaacttgaaaagatatctatggttagaacttctatatgttctaagagttgtagctccttcgctgagttcacatctagagcctttttggacttttgtagtctcagtgtcttcaaactcaacaacttagataccccagcatactctccaaactcttcatggactccaaattcagatgtattagttgtttcaactcttgtaaaccaacaggcaacctttcgatgtttgtatacgacaagtcaagatatcgcaaggagactaactctgatattttctttggtaatccagtgagactactattccatgataaatccaatacgacaaggttaggcatgaatcgaaagaattctccggaaatatttaccaatttgtggtttttttggaggaggagagttgtaagttgaggacatgtagggcaacccaaaatcttttcaagctcatttttcatcaacgacattcttctcacagctctccagttcttcacttccggtactgcatgtaacccaacaccggctcgcacaatgcattgatctttatgctttccaagatcagatgatatccatagagccatctcacgaaccacgtcatgcattttcacttccgttttcttccattcttcctccatcaataaaacatgtacggacaagagtaccgatgatctcatagccttcgtttatcgctctctctttaccatcttttgcatctatgaatccttcacatatccaatagtctactaactcctctttcttaatctcataatcttcaggaaataaagagcaatataggaaacatgatttgatatgctccctttgtaaattatcatagctatacttcaatatctgaagaatttcgtcttccatgcctgaaaactctatggctgatgaagtcaaaacatcaatcgcgtgacgccattcttgaactgtgcttttgcatgccatagtttctccaatgacattaagtgctaatggtagaccacgacatttttcagcgacttgttttgcaagttcaggaatatccggatggcttttcaaagtgttttctcctactttgttttgaaacaaatcccaagcatcttcaggttccaaacaactaacttgcatcgggtcatcgactcccatacgcccacaaacatctcgagaacgggtggtaaatgctactatgcttccattttctctacttggatacggtactccaaccaattctaagttcactttctcccatatatcatccaacaataacacaaatttatgtctcctaaggacattgtgtatgtcaacggctctcttgttttcgttttttttgtcccactcctcgcccgtaagacctagtctttttgcaatgtcttcttgaatcctatagatctctgaggttttagacacaacaacccacatcacaatatcaaatccaccatctgtttcagaaaacttcttgttgatttgcgtaagaagcgtggtttttcccactccacccattccatataaacccatgatcttgaatccatctttcatgagagtgttccaaaccctttcaagcattgtctcttgaccaacaactgtggattgaataggcatctcctcaacttgagctaccagattttcctcagtcaccacatcaaatactccacgagaagagagattctcaacttccttcaacatcacgctaaccattttcccataatgatagctctttccaaaacttttggagcaaaacccacaaaaacacaacctctctatctcaacctctttattactaaacaaatcattgaaccttttctcgataatcacgacatttgtaagccatacctgaacttgagaaagcctatgacgacgccctagaaattcttctttatcgacccttcttttcacatcatcgtgctttgtcttgagaacttcaatggctttttgtagagctgctagattctcgggaaggctatgaatgtaaccttttctaacgcataaccattgagagaactgattcacaaactgatcacatgacaccgagaccgagatacaacctcccatcttggctcaagacaagagatgagattggattttcttccactcacgcaccgatctccaaaagtcaatttcattgaacgtttactttggacgaatataaaagacttatacaactatacaaccaacgacgaccacgacttcatcttcaaagaaaaaataagaatcaaactctttagttgtgggctttatgagtttagtgaggcccaaatataaatatatccaaattggcccattcttccactaatgaacaacatcatcaattcgattcccaaatttatcgattgataaaccctaaaagtctgatcttgatctctgggcattgttcaaagctgatcctctttcggaaaaatgtcatctgttggaacatcgaaaggggttctggagatcgtcaagttcggtgtctatgtcgctgttccgatcgtccttatgtacacattcgccaacaacagcaccaatatcaagaaattcatgggcaatgtaaaaccatcctctctctctctttcacaaaattctcatcactgattattgcatcttcgaaaatgataggcttagattgatgggtttcgcttcaaaaattaggaatagtaactctaaacgcttcatttgcagaatttttgattatgagtaatatttctaattgaatctcttttgagatccgtttgtggattaggcgatgggattttcaattagggattttaatgtttggttataaattaaccttgttaacttgtttgtactctgttaggaacatagattgattggttagctgaataattaggaaatggtaactcttaacttggttaacgccattgtcactttaaatcactgtaacacagagtaatttactacaatcctagcaacattcaagatatggttcaatctccttgaattgtcaatgattcatttgcttccatcgaacttttcgatagtgttgtggggtttgtcgggtctggcatatagaaaacagtctacaatgtcggttttgcggtgcaccgaaggataaaatgttcattctaaaatgggtaacacttattgttatcaaattgtctgctgcgcttaagtcactgaaatacacttactaggatcttagaaacatacactaccccattttgatggtagtcgggttttctccgctctatcgagcagtctgtaatggttattttgcagtgcgatagaggcattctctaaccctcccaaattttggctatttgttgtgcagcgttcatatgttgtttatcctgaagaggcacctagacctccttcacccgatgagctaagagagatggcacgagagcttgcccgtaagaagaacatccggtgagtttatgagatggaatcatatacaaatgtttgatgttatctgtaatagtaaactgctcggcgtaacaactggtaataaaggtaatgttatgttgttgattcctgtaagatcataatgggattgtataagaaaaagagcaataatgacgaagaggaaacatttcttttgttacatattttgtgatttgtgcacatcaatgaatgaagtctgtaacattttcaaataaaattacaaaatcaaagatacacaaccacagcttcatgtcattgtgtgatttgttaacggccatatttcgggcctctaaatttcagtgtgagaagattttttttttggacaaatgtaagaagatttctaaaaatactacaaagttgagtaaaaagggtaattgtgaaaatactcttaaaggaaaaaaatgcatgtttttgtaaaaatgtcaacataacgataagttctgaaaatatcaacgaaattcatagtactcaagattctgacttctcttgttgaaaccattaatcttctctgagtatcttatgggtaacctctgaatcctttattaatggtgtcatcatctttacttttacttagctgtcacatgtcattgcttttgcttctactatatctataacaggtcatagattagagaagttaatgatgcttctcagctttaaattactttctttttttgttcacatttctatttatatacttaactgatttaattctatattgtttgttatcttaatcaattcttgcaagctgtctgatattttcattttagcccttttggatattgtagcaaaacgtttaggtaacataggccaaaattgactttattgatcttctaggtagaaattttagtattttttgtgagttacctaaaccactatgtattattataatttcagaaattctaatatgttaagtagctttcacatttactaagtaataaagaatttcaatacgtaaatgaaaagagaaagtaaaaaacaaaagaacccaaaagtcagtgtaactaaacacaagttttgtagtataaaaaagtcttggtctagaaatctcacatttttctgaactgaaatcagaatctctgttataaaacatatttatggggaaaaagttactatttattttatttttgtaaaatgaaaataaatactaaaaagaagtatggaagaaaaaaaagagggaaaaagaaaaaagaaaacaaaaggaggaggggaccacatttcaccaaatattcggggtctgatctcaatgcggataagtctctgtatttatgtcttctaaaaatagagaaacagatatgtttcattgttttccattctcatactattatgatctcatattttttactattttttaaaatcgacattttaaaaaacaaaatcgacattgtctccacaaaataattagcaaatatatattaattttttcgtttttcgtaatttcatctataacatgattttttattttttttgaaaaaagtcctacaatatgatcctatgtattttcatgtcaaaattttatctctctttcaattactatttagctagcaaaaattcactgtctaaccttatttacaatatttatatctgaaatttccattacacatttttcataaactgctggtatatgtatcttatcaaaaagttaatcttattttgtttgtggatttaaatggaaaactgaagaggcatgtgaataacagaataagcccatgacgatgcgccacaaaactaatcacattatctttggctctatgtgaatttctgaattttgttaggtcaataatgttagtaagactttaggcatgtcaatgtatagataggtctctttaccattagccattagcttcgtcatcttgcaggttggtccccaaacattattaatacgctatacgtaatcccctctctgtcttgcttttaatatttatctacgtaatttatgtttttgattgtcacacataaatgttgtcaagaaaattgagatctaacagtataatgttataataagacctatgtttatatgctttcatggatacgtaaactgattggagaaattgagacaaaagagtagatattactagtcgctagcttaccttcatatttcaacattttggaatgaaatttccaatccaaatgtttaacgattaatgttatttccattgcctataaaattttatttgcaaatcattatatcatgcatgtgtgaaaagagccaaggaggtccaataaaataataacactatcactataaaactatcacaagagctggttgtgcataaatcttttattcgtctgactctcacaagtcacaatgcaaaaactcaggtgataaaaagcaaacagacaatgaaacgagtatcccaactattcaaatgagtgggtgttgatggatggtttttcctttagttacatacccttacagctagagtagaaattaaactattttgcatcattcatccaaagtatttagatatcttttttcttgatgtaattggtttttaatctctatacgtacgtaacattgaaatttatatactaaattgaccaaacaaacattatctattgtattcgtatatcgaaatgttatattctgacacaaaaacgaacaaaatttaaaatctaaacatttttttgaaattcataaaatggcataaatttaattaaaaaaaatggcataatagttttttcataatgtggtctcctaattgtatcagtcataacgttatgggtttttattataattttgttgaattattttgatgatgtttaattgccaagttctttaaccaaaaaaaacatcatgtaagtttattaaactacagtatattatttcgagcgataataatggtgaattattttaatgtaaataaaagatatatacatttcaaaataaaagaatagttgattattttttcaaaaataaatttctactcctagaaataatgtcaaaccccggaaaaagactggaatggtgttgagaaaaggaaagaagcccccacaacttctgaaattattgtaaccgaccctacccattttatgcaacctaaagttattgcaatttaaaactatctagagcatgtaaaattattgtgtaatgtgtaatataatatcaagaataattaaaagtatattttgtctcataatggattacaatgtcccacaacaatgattgtgatgcatttacatattggtaatggtttggtttaaccgttttaaatcacaacacatccttatggaaacaaagttaggtccatataaaaagttggtctcggcttcgactaaaaataaagcaaacacaagttttgatttttcaaaaaaacaaaacttcatcttttcaaaagtctaacggaacattgcattatgtctttatcgaactaatcaaaccaattttttctaatctagtttgatttagttttaaaggagagaactcctcaatattcctaccaaaaaaaaaagagagactcatcaatataaataaattaaggaatcatgtatataaattgagtcatcaatagaaataaattaaggaatcatgtatataaattgagttggaacagaagtttaaccgtctaatgataagaattaagaaggaaaaatatatgtatagatctctacaaaatatgaaaatacacataaataattgcatatacataaatgtacattattttatcagcgataacatatttttgatgcaagattggatcatttttctatttgatttttattactgatttttctatatctaaattcaagtttggatctactacattatagctacactatttatttatacgtagccaaaccacacaccaaaatatttatttcactgacataagaaaatttatatcagacaacacaaaaataaatatatctaaaaacagtaattaaaagaaaagtaaataataaagagaatatttcactgttcaagtgaacagcttcttgcactccaagatgccacagacttcttctttcttctcgaatgctaccgtcatcggaaaataatagtaaaaaataaattctgataactactgacttccataaatacattgtggtaaatttgcttgcagcgtaagtgtttatgaaaaagttaaagttgtcataaatcttctgttccttttgcgccaacatatttttaaacagcagtcgcagtagaaatttcataagaaaaggtaaaacaaatttcaagaaagtaataatcaaaacattcactgcacactctcaaacgtttaccaagataagtactgatatccagtaataacatttctctgttacttttactgttttacatggactagcaaacattagtaaactaataataacctcttgaaaattgggttaaaaaaaaagtaaagaggtcagaaaagaagaaaaatatttaatgttttaactttttaacccgaaaatagaaaaattagaatttttttgtttagtgattttctttgaacagtaaagctaatcccgtgacgacctttgcttctttcttcactgactctgccacgtcatcatcatctctaccaacagacgtaatcggagacttcaatggcggcaacaagaccttctcctcgaaaatcagctcaatctccgaagaatctagctccggttcagctacgactttcgcggcagaagtaaccgtcggctttttttcgccggagtttcgagtgtaggaagatagccacttagcgcgcatgtaatcagcttttctccacggcgggaaatgcatacctttcttcttcaagctctgttttgacgcttccgaaactatagaaacaatctgacgaatcctatcagattttccgacgaaaatcaacggtagagattgaagcaactccttgtaaccactcgtctgccttgcgatctcaaactccgatctaaaatcaatgtcgattatcaacctctctccgttcacaatcacatctatatactcatactcacctgaaaaatcatcaacaataaaaacacttcaattacacgaaaaatcacaaaaatcaaaggtagaagaagaagaagaaaaactggttaaggagattataccggccggtatagaacgagttttatcccatttcgatttacaaattgaagagtcgtaaccaagagatgagagttcatcaacaacaatctttctcaattcgtcttttcttttaactgatttgttcttctctataatcttcgtagcttccactaaaagactcttctcaacgaagcttccgcattgaatcaaactctgtaatcaaatccatgaagattttagattgttgcagagatttgaaacagagtcagattgagttttttttatatataccttgaaattgtcataatcgaagaaatcgagttcatcgtcggagatatcattgttcccgttaaaacaattgcaacgatgagtattgcgaccattctttgtttgcttgtcgttgttttcttccatatagttttgaaccattttcgctaagcttggctcgaactctgttccagcgacgactccatctccagagatgagtaatttctctgagtttgagattctcgtgaacggtcgatctaataaacgcttgagacgagacttaagcactggtttggttgatgattccactctattcgccggcaaatcgttgttaatcggctggatcttcatcatcggaagtggcaaaaaaatgagatctctccaggaaacaaaaataatcgcaaaatcgaaatctactaaaaacctctcaagctactactctcaaatcagtggatcatcatcttcacaaaaacgaagaagaaaagaaaaaaaaatataagtgacggttttcttaacgctgacgattttcacgggaaacatgacgacgattgtcggaaacagcgttattagaaacagtaatggaggaaatagtcaccggaatattcattttcccggcgattgattaaggtttttgaggaaaatctaagagtaattttttttttgctattgatgagaatttcgatttttgtttcttcttctggtttggggttaaaacgagattggttgattttataggtgcagtgtgatagctgaagctgaagaggttattaaagaagaagctgactagacacgatgatgccacgtcatttatattacgtgatagagcaaattaccgtttaatcctcttagtgggacggtgtggtttgattttttcactttttggttgttattattatatttcagatttcttttatttttactgctagtagtaattgtggtagcttctttttatggaaaaaaactgtcagtgaaaattgtaataatgaacattattacagttttgtcttctttctccacagctccactactgtggcgtggaagatcgggcatatctctttcagtcatcatcgggattttcggaattatttatttattcttctgtttttattgaattgatgtaattaaaaaggtttaaatatatagacacagctatttttcgcaggaaaattagtgatgtttgtgctaataagagtggaccacgtagcaggagggaagttgatctttttactccttcgttgttgaattgcaattgaatttgctttttatatgttgttagacgatcgattaaaaatgtataaaagagattgcacagtccacttagtttcgcgtcttggtaaattcgggaattggattgtttcgttttttttttttttgtcggccaaagttattaatgtaaaagcccaattggcagtataatgatggaaataaaagcccacatttctccgttcatatatttgtattgttttttttttttgttttgtgtggatccccagtattacggatttggttgggatttgggaagtatttgtaatttgtatcttgaaatctttgtcgtggcctctttggttacttgtcttatttcaatcggtcaatgaaataattaacaaaaacaaattgattagaaaactcattagtactcgaaacatatatttgtagaacttaagtgagttataagagctacaatgtcgaaactaaaaaactttggtgaaatataaacacatgagctagctataatatacaaactgtatgtccgtgtacatgagatagtcagtggtgaggggaaataatccaaattttgttttgatatgaatccgatagtcgtttttgcacatcttatagggacatgatcagacatgatgttgagttctttaagctgtcaaaacaaagatataatgttttgtttgtaatcttaatataaaaccaaaatctttcaatgaaacttcacattatctactttacgctatataactatacaactatatatatatatatatatatatatatatatgcgtttaaatttcacagtatcttcttatatgcgtttcctaatctctctacaaaactaggatattcttccgtgacaagtaagtagtaacagcctctctctttcaatgatcagtctattaacatctatatattgatatggtcatgttttatcgcttaacgaatcaagcaacccaaaaccaccaaaaattcacatttgacatttgtcaaagactctcaatgtcaactctaaaactcatgcaaataaaataatcaaatattctcaaaatcatcaggtatagttcatgaaaacctgagaaacaatcatattattgaataaaccctcttgcagtataagtaacttatataactctatcaatgccgacacttaacattttaaatttcaagtgcctcctttttcagttgaagatcttttgtgtgtttaattaagatactactaacgtaaacatggtaacaagataatgttttaaataactccttacataatacgacttgatgcaacacggtttagttaaaggtttaccatttcaaacttcgagataatgaaagctacacttaacaatggtaacaatacaataatttaaataattctcaatataatatgacctgagggaacacggtttcaacagcattttaccgtttcaaacttatagacaatgaaaattacattggaatatacatacatatggacttgttcaaaccgaaaatcatctataaattgaactctttgtctcataaatttatcacatcttcattgacaccacaaataagaaactaacaaaaacctttttgtcttctacaaatcgtctccatacatacatatgacgataaaaagtctctcttttcttgcggctctatctctctttgctttgacacttccattagtaattgcttccgatccaagcccccttcaagacttttgtgttggtgtcaacacaccagcagatggcggtaagcacatgatcattttttaatttattaaatatatttgtatgttgatttatgcattactaatactctatttttatcaaaaccttgtctagtgtttgtgaatggaaagttttgcaaggatccaaggatagttttcgcggatgatttctttttctcgagcctcaacagacctggaaatacaaataacgcggttgggtccaacgtgacaaccgtcaatgttaacaaccttggaggactaaacactcttggtatctcacttgttcgtatagactatgcacccaacggtcagaacccacctcacacccacccacgtgccaccgagatcttggttgttcaacaaggaactctacttgtagggtttatctcatcaaaccaagacggaaaccgtcttttcgccaaaacactcaacgtgggtgacgtatttgtgtttccagaaggactcatccatttccagttcaacctaggaggaactccagcagttgcaatcgctgctttgagcagccaaaacgcaggtgttatcacaattgctaacacaatatttgggtctaaaccagatgtagacccgaatgttcttgcaagagcattccaaatggatgttaatgcggtcaggaatttacaagccaggttctaataatgtaataagaaatatagtctttggaattactttattaatacaagcatggttcagccgtactgtgacatgtatatgatgttggttgttgttttatcttaataatattttggtcattgattaattaattttctatttgtgttaaactattaagcatgttgtgcataaccttcgtgtttcttcaggaaaaagttaattcttgtattataaaattaactaaatataattataaattcatattactaataaaaaacatgaatttagatacacaaaaactaatctatatgtgtgggtaacgaaatgttttatagtaacaaaaatgtatatcattcttttaccagtattttagattaaatttaaatagaaaacaaagaataacatgtgacctactcatgtattttcacaaaaaaaagtttaagtatttttattatatccagaaacaacaataatttatgaactttacaagaatgatgatattatttttgcttctatgaaaacaattattattatttttggtgggaatgaaaaataactaatagtttagaaatacctagaatgtttagaaaaatttaacgataagtttgaccctcctaaaaaatatttatgtctccgccattgggtggagaagagatcagagttactgtgtgacgatagaataataatacccaaacaaggagagttaacaataaatatttcttagattgatttccccaaatggataaagcagcgttacagaatgtatgcaaggaaaatccaaagtatttcaatacccaatctcaataatgcaaatgtgagcttctcactgaaattttcttctctcaagcatttaaataaaatagtgcaagaaagaatcatcaagagttaactatttccaaagacgtaaaaaagttttgattttcattttgccagtaagtagcaaagtatcgtttttttcacatatttgtttagcaaaccatagtccaagacccaagaatgaaaatgtcttggttgagaaaatcagcagattaataggcttgttcttagacgcataatctagcaaatgctttacgcaattaagcagatatatagatttttatcgaagctttccccaaaacataatctctcaaatacaaaatcatatataaccgctggtttaacctacattttttattagttactgaaaattctatacagtggttacaaatacgagaggttttttgggattaaaaaaactcaagagtataatctgaattttaacctataattttagtggcaaatataaaatttcttctctcatagtctcatgttatttgttatgtgaataagctaaagctcattttcaaactatgcattctattctttaaaaaaagaaagagaaaaaccatgcatcatatttcacaaatatctatcagttctaatatcatgtcgtgtcgtttttcttagtcagaatatctaagttgacgcttcacattgaagacaaaatcaatccttttaggtttccattgatagaatgcttaaagcttacaacttgagtttcaggatgtttaaatacaaaggtggagacttggctaaaccttagagagatttgacagatgtcatacatcaggttgagttttctaaatcaagggttgagaaacgattctcgagcttaatgttgaactgctttcccatacaagaagtcgttatctccttattgccagctccacttttgtcattacttgaggaaacttctaagctctgtttgcttgaaccagatgaccgttgcttccacttttgtttcttgggcttggtttgtgctgaggcccatcagtttcattttcctctttactccattagccgaaaggacaacgtacttcgttgtctaaatattttgttgtaattgcaatgacataaaacaaatattcgttaatttccctatgttaattcttttaattaaaggggtcaaaaaagtattactaaagtgagctatttaaggttgcaaatatattttatctatattttaacctgaattattttcccacctaggaagagtaaaaatgcaaagattactaatgaagaaaagccccataattttgtttttttttttgtttttacaattcgtttctagaaactcaaaatatgaaaagttgaatcgtttcaaaaagaaattgctggttcgttaatttgctacgtctaatcgtttatttataattattttcttatatcgtgcttatgaacttataatgcaacgtatgatacatgcatttcccctactgttcgaataccaattgcagattcaatgcaagtcagcaagtatctcctaaattatttcttagcagtagatattcttcttaatgattacaatcttttagcagtagatattcttctcaattatgatatgtgacgtggaatatatattttcatctgttatataaaaacagtcgcaattattcaaacaaaatgtataggaaaataaataagtggtgtgaatatgtgattcaaatgaatctgtaatattctcaaaattcctacctccgtgaattctagaaaatgtcgtcgatcggaacaaatttgaaaatagaatgatttgtgtggataaacttttaaatcattgtgtgggaacgcacggattctacaaaatcatgctggccaagttaagcttcatagccttaatgcattcacagctatggacagtcgagttgtacgttaatatgtcttctatggacaggagcgggtaagatggccaatgaggtcattatgttgagatgtacgtagacaaatttcaatgttgttctttctgagtattaaaagagtgtgatcactgattttgaagtcagaaaaaacaaaagaacatgtttaaagcgtcaagtttatcgcatcgtctcggttctcagattgtgtatttggtagctgcggtggtggctaaattgcggtctcttttgttgacatcacttgtatttcttgactagttatttgtgctacctggttttgaatgtgtcttgctagtgcggttcttcataattgaagttagtgctgcaatgagttatcacctcttgttgcgtttgttttgtgttctagaagagttagtaagatcgatggtgttcgatgtggttatgaatcgcataaatcatgctctgctctatccgactttggggaaagaaattggtagatggagcttgcatcgttcgcataatttggttcttgaggttccatattattggaaagcttatggacttgaacaacgagtcactgtcacatgacgcgagaggagtttatgccagagaactttgagtttctaccgttgacggctcatccttagacctccaattcaaagtttttaatgcaaatagtttagcattatgcttttttcaagcagtagttacccttcttcttaaaaaaacaaaaaacaaaaaacttaattataagataaaatttcaaaatagtcatatttttatctaactcgttcggcttcaacgctttggttgagttgattgaccaaaacttgtgaatcacgatgtatgcttctatgttttatttttcttgttataggatcatttgtataggcttaaaatcttttgattgtaaatttatatttttatcatttcaataaaatatttttatttttatttaagaaaaaacagaaaaaaacaaaaaacaaaagaacataattgttgcgtacaaaatgagtggctaatgggtttgaactagacagaaaaagttagggacgttttatcaaagactattgtaggcttatacttgtttgttttaggacttgtcgttctatgtctatttgtagtagtctctacttgttagaataagatgattttttcaaaactaattttgcacaagtgatttgaactttaacaaacagcgacaattattaatttattatatgggattcagccatgtgactagaattaaattgttcaatccaagagttctagacccaaaaaaaaaacagtactgccctttcaatttaaaataatttgagaatcaattaaagagcttaaagtagttgaaaagtacataagtccaatgtagaaaaggtcttgtcacaactctacatatagaccataaatcagagatttaagcacttcaaaccttgagctccctcctctctctctctctctctctttgtcttcaaaatattctcagaaaacaatggaagaaacagcactgacaaaagatcagatcactgagttcaaagaagccttttgtctcttcgacaaagacggcgacggttctcttcctttctctagatggtcatatatagaataaagataataaagacgacgactaatattatgttgtgtgacatttatttatggttgtttggaatcctttaataggttgtataacggtggaagaacttgcaacagtgatccgttcgttggatcagaatccgacagaacaagaacttcatgatatcatcactgagattgattctgatagcaacggcaccattgaatttgctgagtttctcaacctcatggccaaaaaacttcaggttccactctctcttgatctctcatgcttatttatttcacaactaattacatcaagttaacgtagccacgtacaaaccaaaaagttacatcaagtgaaatttttttgtctatatgatttcttatatattatgttataggtcccttattgtaactctttgatatgggatcctaacaggttctagtcaaaatggagctgtctcattcattatgcttctagtttattaaaaactcttaagaaatatattggaaatattcagcttttgtattacagcaaaatctgttttgctttcggtttttcactacgaataaatctgatttgtgaagaactagacacgtaaatgtgtataatgtaaacaaagacttttatgacaatagtttttttgtatgttaagttgttgtcatgatcatgtgatggtttaggaaagtgatgcggaggaagagctgaaagaagcattcaaagtctttgacaaagaccaaaatggatacatctctgccagtgaggtccgtgactcttactctcttttttttctctctttattactaatttgatatatgtgtcaatgtgtatatttagttagatatatgcttgacttattgagaacttaaaagggaacttatgcggaaaatcctctttaagaacttataaaaacaaattagttcgatgcactggattgcgttttgtacaacgttctccaataataccatgtacggtctaactgtgtttttatttggttataaatgattagagctataattatttagatttttgtatctactagaaatccttatctaaattttggttattgtcaaatttagtttaggtacatgaaccaatttcataaatgtcttctttgcttaagtggtacatgctctatatctctaaagtgtcgtcaaatacaggctaagcacaataattatgagcatagtatttttatgtaaccacttggaccaattaattctgcattaactagaaaaaacgagaaatccagctaaaacacactttcacatatgtagaatcaatgacaaatatcagacaacaaagccagacgatcttccaatttaaagagatccatagttgtctcatttatgttctaaaacattttttaacaagacatggccatttatttatttgattttatattttcgaaagtctgttttccatcgtgagggcttagagctagctggcattgtgaatctttagagaataacgaagaggaacaaaagaaattttaatacaaagtagttagatagagtaaaatgcgtttgattttattggtttatttgacaggagggcacatgtttcacctagtttaattaaatatatatacctttctttacatcctcaaaagttacattaatgcagacacctttttgcatgcaacacaattcaatttattaatttggggttttctatatcgattggtcaaaacttaggctaaaaccagctgtattttgcttacaacttaaaaaaaaaaaaactaaacaattgtatgaatttggtttattcatatttttcgtaccgaaattagaaattgttcaagttaggccgtttgacctactatattgtattgcatattcaaatggataataaacaattattattctctgtacagggtcagacccgtctgattaacatgcacaacttaatttacaataattagactaacaattacgttaattatttattaatttgaaaagctttgttattgcagttgagtcatgtaatgataaatctaggagaaaagctaacagatgaagaagttgaacaaatgataaaggaggcagatttggatggtgatggccaagtcaattatgatgaatttgtcaagatgatgatcaacattgactgattactttttctaaatctatttattatataagccaatgatccttaattaccttgttagttgttactacttcgtgttcacaccatctcaacaaattctccattattccacattcattgaaattttcagatccagttttgttttatcacttgtgaagctgtcaaatccaatataatctctatattatagctttctctatatgattttggaattctgtttatacatagtttgtttctatattatagctttttcgatatgatatttttcttcttcttgcaatctttgattataggtgtttcaatatgattttggaattatatttagcgaatgaatacgaaacacaattttttttgtggaaaatgcaaaaaatcttaaaacaaagcagcatattgagtttatgtgaatgctaaagtatttggatattattttcctcatgaaagtgaggagttgaactccttcactcaaacgaaaatatctaatggctaaaccactagtctagacactttaaagaataattgaaaatgatttatgtaaaaaaaaagaaaagtgagactgtgagaaagccatgcccatataatatttagtaagaaaataataataaaattacaggtagtaaaaaaatttccacactttatcaaaaacccctcaaacagaaaatcccaatttaagtatacagaaaagagaaaacccaatccacactttcacttatttcctcccaatttctcagaataattagacaaaaaccatcaaatcacaaataattagttcaattcattgcggtggtgcaacaaaggcatgttcccaagagcgaagatttactccgttttctgactatgcctttcatagaatcaggtgaagctttcttgtccaccaagttatcttctgagcccttggtttctttgaagctatcattgtgtttcttcaacgaccctagagacatctcgctgcctcttgatttcacagactcacttctcttcagcatcacagttttctcttccacatcgattgttgcctcgtatatctcagtcttgtcctcacagagtaccggagtattctctaccgattcatcgcgtctttcttcgattcttaggccatgatcaaagctaggagctggcatctcaaatctagcttctttactgctttcaattatcgcttcaatagtctcttgcgttttgttgcttcctacgcaaggaacaagcagagctgcagacgtgttagctttctctaaacccatcttgtttcttgaaggaaacgcaacctctgaaaccaaatgttgaacaagcgaatctccaataactctactattctggctcactgggagtgatctacatcgatacatgcgtcttagactcgcttctcttttctccttctcttctttataaactccaagaccagtgtcttgatttgcatttgactcttgcgaacaaggtttagagttggagatcgccttatcggcttttcctttgtctgtaacttcttcatcatgaacaatacgatagtccagattcagaatctcctgtggctcgatttcaggaaactcttcccttcctcttctctgttcaattccagtctcttgatcaagctttacaacttcctctgaatgaacaatttcgtcccgagactcattcaccatgttttcatcagtatcaacagttgcaaaacatcttggagattcaaagacaatctcatcaatcacacagagcctttcttcattaccagacactgtcgaattcaatttgctcacaacagtttgagttccattcacaatctcatcaatcacacagagcctttcttcattaccagacactgtcgaattcaatttgctcacaacagtttgagttccattcatagacaacacttccacttctcttgcttcactcaaattttcaacacctgataatgaacagagagacaggattgcattaggtttattttcaaatatgaagagaggagagaaaaattaagatcaacctttcgcaactgatgtctgtttttgaagcttctcagatgtttccattaccaagctctccaagccactatggtccatctcttcttcgaaatgttttactttcggttcatcaactaaatccttgctatgtggttctgtttcttcaacaccatcacacaaactctctttctcttcatctccatcgtttccttcacctgcaagaaagaactgatcttccgtggtctctatgggaatagagtcaaacggagacattccattagtttctagcgtcgagctctctttctctagatctccttctttttcttcacccgcaagaaacaactgatcttgcctggtctctactaatattgagtccaatggagacattccattgatttctagctttaaactttccttctcttgatctccatctttttcttcaccctcaagaaacacttgctcttgcgtgatctctacgggaacagactccaatggagacattccattggtttctaggtttgagctctctttctcttcatctccatctttttcttcaccttcaagaaacacttgatcttgcgcggtctctaaagaaacagagtccaatggagacattccattggtttctagctttgagctctctatctcttcatctccatctttactttcacaagcaataaacaccagatcttgcgtggtatctacggaagaagccaatggaggtattccattgtttttaagctttgagctctcttcttgatctgcaattacacagacatctatattcagtgagaacactaacaatacaaacaataataataataagactattgttggtttacctgataaaatggcagttgcgttgttgtttcccatatcatctcctttgttcaattttcaacagatcaaaatcttttgaacaaatctgaaaacccgaaacagagaacaataagaggtttctgtctgaacggagagttccgggtactgtttgtgtcctgcttgataaagtatcaaacatgtttggtaattttattgatttttgttataaatttgattcaatgattattagttggcgtcactttgttgggaccctacagaacattatgagaccatatgatttgtaaatttttcatataaaaccgtaggacacttctatatctaagttggaatgtataaaattggaccataacaaactaaggtccaaccactaaatttaagtttttttgccacaagtttagtgtttgaagaactccaccaaatctctagataatattgtgaaagaaaaaacttgatattttggtttgttttatttttgttgtgaaatgtgaatcataattccatttttgttatactttttttcggtgcaaacatcaattccattttaaacccacaattattggcatttgtcatagtcacaacaaattgaactcgataaatttcccaagtaatactttgtctttgttaatgaagaagaggtagattctaaagttatatatatttacgagttctatggcccaacaattatttcaaccattcttggccattgaaaaacataattttagtttatgattcaatgtttggtaagcagtggacactaatagagtcgtaagaaattagaagggactattggtggtgggtcattatgttcatcccttttttgtgaggaaatgattcgtaaaacatttataatccaaatattcataagaaaactcttatgagacaatggacctcatctttaatcatttttcttctctaacttttatcttagatataattaaaatgatttgagctacggtatagcccataatcagctatcaacttttgaaaacattttctcttcttttacgtttaacaaaaacataagaggtctttttttgctggaattcctcaaaccaatcctttttgtaatattagataccttagaaaataaatttgaagtagtaggataaatgtatagacagcattttaacttagttaatatgcaattattggttagcaattagagtgagttcggctgtttcatcatgtaatgattacaacaaattggttcttctttaatatatagtcttacatactttttaaagtcatttcctgtttaattaaaaatttagttggaaacctaaatataattatagctcttactaaaaactcaaaaacccgttgaattaccaactcttaatcattttttttgtcaccaccatgaatctttttacgtctttgttgtccaatatattctttttttgttgattattttttcttagtctaaaacttactgtattattggtttagagctatggcaaaattgtttaatagaaaaaatgttgcattttcaattcaatattcttttttagaaaaaatcaaaaaaaaactttttctaaaaacaaaaggattgaatatcgatattcaactgtatatgtgttcattatgttcagtggtgacaatattcaatctttttccaaaaaacaactgttttaatcgtcatcatctgttactttattcattgtctaaatgtatgatccgatatcacggttgaatatcatcacccataaaaatattgaatacatatacagttgataaagtatatggatgctcactctgattactatgaactgactttgaagttggcgaaaactgatgtggaatagttcatttaggagatcaaagcttttgtcttgaatatgataagtgtaactgtaatcaatctcttgtcatacatatatatcgatgattgagatttggattatggatatgtctttcctaattgtttaagaattttggtttaaaatttttaattttttcatatgcattttcgatacttataatttggataaattttgaattagttagcataacaacaaaatcagaatgatcgcgtttgcattaattcaatgatagcttgaatgagagactatataatggactttaatcatcttgcattccaaactatggttatacagcttttgctttttttttttttctttctttttttttcttcctcatacagcttttgcttttattaagataaaattacaaacaataattgatcaatctttttttataaatatcttagttcacaatttgcacttgtagaaatttttttattattatttttacatagattttcacaaaactaagtaattagtatctcctttttagtttttacaatacaatcggaccaaatcattgttagaatataagaaataaactcttacataaataggtactaagcaaatgtttctaagtgtactttggctagaagacaagatttaccttgacaagtatgttggatcaggcccgactctacacatgtgctggaggagctgaggcacagggtccacccaaaatttctcttttttttaaagtaaatctagtacaattacgatccaaaaaaaaatttacataacaaaacacagatatgtgaactaattttttttccagctctgggtcctttattattttgagccgaccatgtgttgaatagacaataattatgcatcataatacaactcaatgtgaaacacacgatcttcgaatttgctgaaaatatgaaaatatgatgaaagttatttccccaacaaacacatttgcccagtaaaccttgttttcatatacctctatttggtatcttaaaacaaggtattttcataagttgaaagtttagtttgaaattaactataaaaatatataaagctttcgtgggcatgttcttgcaacttggcatgtttttcttgatgacgtggaccaaaaatagtttgataaaatacatgcaattactatctaattgttatcaaagtgtttttcagatacttctttttatcgaaataaaattgttggctattagctaaagatattaactaaataaatattactattcgattaccgaaggaaaggagagtcgggccaagaacgagtattaaccaatcctgtgtcatccacaaatccaaacattgaaaattttttatttagggttttagacctgccaagcaatcacattctcatgtgattctcgtgggctttctttcgtcttcccaaactcaacgattattgggttgggctgttagactttgaattgacatagcgagcaaaagtagcaatattcaaagcggcaccgcttcaatcggcgcagaaacagtcactggcaaaaaaaaactcatacgccgcttcgaaatctggagacctgttgaaactagagatttctcgatggtgatgagtgatgattaatccataatcgtgctctgagattggttcggttaactttggtttgaaatatttcttatatatccggtttgactacgatttcagagtctaattccaatctgagcttatcatatggaagagactcacaagcaagcaaaaatcattaccaatacaaaaaacctaaattagaccaatctttcctcttgaaggtgaaggatttcattacattcaaagatcaatgttttcattatttgcacagctagagagtagttactagttactaccaaacatgaactaaagccgagttatatagacataagagattgcccaaaaacgccatcacatgaagagatcaagcagatcactcttcagataatggtccaagatagtcaccttccaagctagccaacgcctgaaactccctctctacttccatccactttatcccaatcacaacaaccctcactgtagtctcaacctgaatcctagacgtcttctcattcatgaagatcgggttctctccagggatatacttgtaatccggcatcttcgtgtaggagaggtaaacattctcgattggaccacacctcatgaagacaccgtgcttcaacaccttgtgcaccacaccgtgaattatctctcctttgaagatcttgaaagtcattccgctgaacattaccgggaacaaaacttcaccggtgtgctccctgattttgccttctccaatcttgtccaaagttgtgactgccacgtagtagccaagctccttggttgctttcttggaagcaaacgcctctagtaactctactagtatagctctcttcaacatcagccctttggcatccatgttttcagctggaatcatcacgttccatggtaattggactttgagaaacattgttcaaccttcaaaaccaaatcaaagcaatgtcacatagctatcatcattgatccagagaatagaaatactttactatcatcacattcttctcaaaggaaagatatgagaaagactctggaaaaaatcaaaactgaaagatcacagagaaaggaaaaggaagtagacagtaatttccaggtttttctctgaaacgaacatctaggttatacaaatcatcatcagtaacctaaagtaattcatccataagataagatcaaagtttctgtttttataagaatctggacacaatgtagacatgcattagcaaaataccaatttcataactctacagtactcaaaacagagattcagaaattagtttcacattacatatctactaaaacgaacactaaacaaaaaaaaaaaaagagcttttcactaaaaagtatttctcacaggcatttaaacaaacactacgcaggcatgtaagtaaacaagtaagagtcctcaaaattctatcaaaagttaccaactttaataaacccacaaaagctttgtatttgcattttacgattaagtactcagaccatcactttttccacattttctcgagcaacccatggaccaagaccttaagactgaaaatagctgagaaattgattgagaaaatcaacagaatactgaacccatgcctttgtttatagattcctaagatatcaaacgaaacgagaatcggcaatagagagtgaaaactggttttggagaatcaacgatgcgagaagcgagagtttgttttgttgtttcaaactctctatcgactgagaagtaacactcggagactttcaattttggtttgtttacatgtcgatgggctgaaaagacccattattactgagactatattattattggcccattagtattcactttttctctattttcttttaaatatattttcagaaactaattaatttttcattttaagattactaatttcatatatttaaaaactttgaaaatttgattctcaaatatttaaaattagattaaactttttaatcatattcgaaaatatactttttcttctctaaattgatagaaaaatacaaattaatatatatttccttttaattatttaatctaattagattaaaaaaatatctccattgaaatctggtcgtctgtcacgtgttgtgattatgttttttttttactcaaacatgcttctcatattaaatagggattaaaatcccggtataatgcgtttgtgattacattaggaatgaggttgtaaaaatgcgacaaagcatcagatggtattctatgtttcgctaagatatccgccgctttgttgtgatctcttcgaacccaagtaaactggcagtcattaaacttgtctctccaaatgcgtgcttccctaatccaattaaaaatattgaaattgtgttgccgaccatgaagcagttccaccactgttttgttatcgccttcaaaacatactcttgtatatcccttaatccaacagctttgcattgcaagaattagtgcctgaaattcgctttccatagctgtgtttacatgtcttcctttagcttgacctgcacctctaaaggtgcctctgtcgtctctaatcacctatcctgcactagccggttgtccgttgataaagctaccatcatagttgcatttgatccagtttgtattcggcttcatccaatgatattcgccttgaaaaccaacgttctgaaattgcggagggttcgtcattcccaaacttctttcatcttgatcatgccattcctttgcatcacttcgagcttgtcgtattacctttcgccatgaaaagttcctttgttgaaaggtgaggttgtttcgtgatatccatagtctccacaagatccaaagaggtaagtgcttaagatgtggcgttcttgtccccgtgttacacttgaggatctctctcaacttttcttcccatggggtccgtgggtcatagagtaacctgtttgatattccagagcctcgccaaacagctttcgcataggtacagttgaaaaataaatgctctgttgtctcttcctccatacaacatcttcgacacctaaagaaacggctaatgtgattatgttaattactcattttaagaaacaaagttttacttaataaccttttcccctttttaataaggttttcccttttttatgtaattttcttattttcattgaagtgtatcctttttaactatatactttaatataaacgttttactttttttgtcaaaaaattgtatttttcatttttatgttagcatagatcaaaatctaattagaagaagttctttacatgtatcaaaatctcatcaattgattaacacatgtcataaaaaaagagaaagatggaaggtcatgatttcttctaatctcttttttactgtttctttacataagattcttatctttgaatttactaagtgttttgtatttggcaaaaaaaaaaactaactaactcaaaataagaatttacattgaaaaaaaataagaattaacattttttcaataaatattttacaaatctccgctagtttcttagtttcaacaataaataataaatatagatgaaatttgattgttttaaagaattaaatttatttcctataatttatcacaacttagttatttggatttagggtttctagtttttcagaaatcagaaatcaaaattcataaattttcgacggttaaggtaatttgattcacatttcagctttactaatgtgtaatttcaaattagtaattaaattttcttgatgtcgacataccaaaaaaaaagaagtagataagtcaaattatataagaagggaaacatatatattacattaactaaatcagagaaagtattttctttcccaaatcctaaaaggtttttcttgaatctatcttttaaaagaatctagatcatattcgtttatctgccctgtttctctgatattatatatattggatttatgatttcttctcacagggttaagagaaaagatgaatgatctgaaatttgaccccaatgtcaagcttatacttgcctcggctcgatcacatgccatgtcattgtcacatggtcaagtaactcctctgcatctcggagttactttgatttctgatctgactagtgttttctatcgagcaatcaccagtgcaggagacggcgatatctctgctcagtcagttgtcaacgttatcaaccaatccttatacaagctcactaaacgggttactccaacaacaactggagccattcctcctcaaaaaccaagccctaacaagaatcttccaaaacagactcctcccttattaagtgggaccattcctcaaaatccaaaccttccaagacagacttctactcccttatcaaatgggaccgttcctcaaaatccaagtcctaacaagaatcttccaagaccgagtacaaatggggtcattcctcaaaatccaagtccaaacaataatcttccaagatcgagtactactcccttatcaaatgggaccattcctcagaatctatatcttcacatactccaaagactgcattttccctcagtaactggaaactttcctcaagatagtccaagtcttgttacggttttgaatcgtgcacaaaagaatctcggggataccaaagtgggagtagcggtattggtaattagtcttcttgaagattctcaaatcagtgatgtgttgaaagaagctggtgttgtgcctgagaaggttaagtctgaggtggagaagcttcgtggggaggtaatccttcgggctttgaagacttatgggacagatttggttgagcaagcaggtaagcttgatcctgtcattggccgacacagggagattagaagagtaattgaggttctctcaaggagaaccaagaacaaccccgtgctcatcggtgagccaggtgttggaaaaactgctgtggttgaaggtttggctcaaaggatactgaaaggagacgtgcctatcaatcttactggtgtaaaacttatttccttggaatttggtgcaatggttgctggaacaacactccgtggacaattcgaagaaagattgaagtctgtcttgaaagcagttgaggaagctcaaggcaaagttgttctgtttatcgatgagatccacatggctcttggtgcttgcaaagcaagtgggtcaacggatgctgctaagttgcttaagcctatgttagcaagaggtcagcttcgtttcattggagctactacgcttgaggaataccgaacacatgttgagaaagatgctgcttttgagagaaggttccagcaagtgtttgtagctgagcctagtgtgcctgatactatcagtattcttcgagggcttaaagaaaaatatgaaggacatcatggtgttcgtatccaagatagagctctagttctttctgctcaattgtctgaacgttacatcactggtatgttgcgccatctttttatctaacatgtccttgtaatttattatgattcttttatgtttgcttattagtgctctgttctgtgcttaggtcgacgtttaccggataaggcaattgatttagttgatgagtcttgtgcacatgtcaaagcccagcttgatattcaaccagaagaaattgatagccttgaaagaaaagtaatgcaactagagatagagattcatgctctcgaaaaggagaaggacgacaaagctagcgaagctcgtctttccgaggtaaattactttcaaaaacatggtttttacatatagtacctcacttcttttatttgttattctgcaggtgaggaaagagcttgatgacttgagggacaagcttgagcctcttacaataaaatacaaaaaggagaaaaagatcattaatgaaactcggaggcttaaacagaatcgagacgatctcatgattgctctacaagaggctgagagacaacatgacgttcctaaagctgctgttctaaaatatggtgcaattcaggaagtagaatctgcgatagcgaaactagaaaagagtgctaaagataacgtgatgcttacagaaactgttgggccagagaatattgctgaggtagtgagccgatggactgggataccagtgactagacttgaccagaacgagaagaagaggctaatttctcttgctgataagttgcacgagagagttgttggacaagacgaagctgtgaaagctgtggctgctgcaatactaaggtcgagggttggactaggaaggccacaacaaccgtctggttcctttctcttcctcggtccaactggtgttggtaaaaccgagctggctaaggctctggctgagcaactctttgacagtgaaaacctactcgttaggcttgatatgtcggagtataatgacaaattctctgttaataaacttataggggcaccacctggatacgtgcttaaactcaagccacttctttatgtgttttttgattaatggtataatggaaactcacatgatactactttgtttttcttaggtacattggtcatgaagaaggtggacaactaactgaacctgtgaggagacgaccttactgtgttgtactatttgatgaagttgaaaagacccatgtaactgtattcaacacgctacttcaagtgctagaagacgggagattaaccgattagcatgggaggacagtcgattttaagaacacagtgatcataatgacttctaaccttggtgcagaccaccttgtttcagggcttacaggtgaaatgacaatgcaagtggctcgagacaacgcaatgaaagatgcgaaaaaacatttcaggccagagctgttaaacagattggatgagatagttatgtttcatcctttgtcccacgagcatttggcaaaaattgttcaactccaagtgaagaatgttgtgcttgcttgaggttttacatttttataatattgtatgattgttattgtaggtgtatggtgctagaggcctattagaagatggctagagaggaaagtggtcacagatatatcaatgatgattgtgcgagaagaaatcggtgacgattccattgtgtgcattgatgtaaacgaggctaaaactgatcttgtctaccgaatagataaaaatgtttttgtgaagatagagcaaacattagatgttgtgattcattcagggaataagagaggaagaagcaatgacgaagatcacatcgtcactttaaccaaaaaaataaaaaatgaagtcgtagtgatagattgaagaacgatcagggattaaaagttagattcatactggtttttttttttagtttatatgtatgtaagatttgtgttacttttgttcatatagctttctaaatcttacaacaagaaggaataatcattatgttgagaaacaaaaacaaataaatggttttatcggtcttaaaccggaatcttttccggaagtttggtgtttccggttagtgtcaaactgtcgtagtaatccacaaggactttccagcctccagggcacataaatccatctggtgggttctctctgttctttgccaatgctctcatctatcaaaacaaccatcaaatctttgatcagaaattgaatacacttgagcttagttacattatgtcccaattggtttgagaagtgtttatttaccttagtgccagaaatgaacaagaagtcctgagcccttgagggatcaaagaaagccatctttccttgtgtcttatcgtacgcagcaacctacaccaattgaaaccagaaatcagaactcaaaaagcctaaatctttgaaggaagataccaagtttgagtattatgcggtttctatgaatataccctgaaaggaagaatgttgagtcgttcgagtccaggagccatgcttagaactttcttcccgtgatcagcatcgtacagatcacgtttctccacgggatgacccattccagccggatccctaccgacaatgtagaagttagcaccagcattgatcctagcctttgcgtgccattggacttcggttggaccagcatagagcattggagatgggaatatggaaaccacagtagtctctggatcaagaacaccatcctctagcacctaatcaagtcatgaaaaccaattcagcatctcctataatgaactagcaaacaacacgcaaaaaaagactttgattccgttaataccttctcgtgctgtttcattcgccagcttagaggaacatcatcagcttttgtaaaccctcccaatggatgaagcaaaaggatagggtttttataacccatctcaagaagtctcctacgagtatcagtcataagaagagcatgtccattatgaactgggttcctaagctgaaacgcaaagaccgcatccgcaccacgtttctctagctccttacgcagttcaaacggggaaagcctgaaacgatcaagcccatcattgtacttaacaggttccaaaacctcaagatcacccccaatgagccagtctccagcattggttatcgcctcttctacataaggcaaacccggtgcagtcgtaccccaagttctcgctattcgctcttctttcggatgtttataaatctcaatactgaaaacaaacacacaaacattactctattcagtgatctctctatgcaaatctgattcctcaacaaaaataacagaactataaaaatcaaaactttattcctcaaatcaaaactttattcctcaacaacagtaacagaacgataaaaatgaaaactttattcctcaaatcctaatccaacctaagagaaacttactcattgagaatagcgattggattatcatcagaatcaacaagggagacacgtttagattcaccgattagggctttttgttgatcatcaatcgcaagaacaataggcacagacatattaacaacagacccatcatcgagattcaacaaattgaaatgaagagtttggaggaactcagattccctcataaacccacgaagaggactagcccaaccttcactcaacacatgcatccattgcaaatcaatcgccgtcaatctcactctcggcaaatccgccgcttcgtgtttcttctctcgccgtctcggttccggtacaacaagatccacaagtttcccaccatctggctcgattaagccagctcgtacagagatggttcttaagctacgagttttcgaattcgaagggaatgaaatggatgtggttacggaatcggatttgtgagattttgttagaggttgagagatgaaagaggttggtttggggaagacggtggacatggaagccattgaagaaggagaatcgaaaacaaaaaaaacagagaggaatgtgaatttgttgctgtagtggagagaatgagaatcttcgaaagttcgaattttgaagtggaagatgaagtgtgagtgggcttttatagaccaatgtgattagtttcgtaagaatattgatattagaattaggaccagttcaaaaatcgaacattatccaagaatacgtcgatgttcgaccagcactttgctcatgagtcatgacgatatcaacttggcaaattaatattgtaatcacgtgaaggaccatgcgacatcatcatcatcatttgtggggtaataacataaaactaatgccggcttaagaaaagtgtgttcatttcttaaacttaaatcacatttggaggactcattatagagctcatcacctttgacctgactttatcttgacctgaagctaccaggaatttatatctgaacttttgtttcctttttgacggcgaaataatttgtttagtataagttttgtccattctttacaggtcaaaaacataattaatactaataacgacgatattttaatgtttcctcttgcatgaaaaagcattgaaaatgacggagttgattcactttattggtggctgctttgggctcacattcaacatgtgccaattaagaattctgagggtcgacctacccatcctcattcactcatagcgacaattcaaaacagatctactggggctttaaataagggtaaggccttgttccgaactgggctttagtaagatattataacatttctgttccaaatacagtacatcaaaacttgaatctaacttatatcaacttcaataatcatcaattcatcagttaaaaaaactccttctttcatggtttagtttatcaaagatatgcatttgatttataagaaaacccaaagagtatttgttacctagtcgtccccgggtttcacggggttacaataagagaaacaaaatgggccacataatatttatttatttagtgattctgtcgtttaaaaaaaaattagtttaacacattgtcaaagtttgaactaaggaacttgtaactcaaatactgaaactttaaccattagactacatttttatgcaaattcggccaaaactaaataataatatgattagcggccgcaagcttatgttttgcttgcttggccttgtggccggctaaataacctaagtatataatcaataaattacataaacgaccggataaatcagaacttaattataatgttaaaagtaattaaatgaatgatgaccctcgtcgtctctcctcttaaaacacaataatctcataaatacaatttttatatgaagtcttcacaaactactataaatttcccaaagttgttctctctctttgtccactcgaagactcatggggataagaaggcactcgtgttatgggcttcggggctttttattgttcgccctttcgaggaccttctcacatgtttggacttttgagtctaaatgccttatttcctcacgaatgacgtgaacattttttcgtcctgaactcaaaagtatcaattacacacttcacactactaatggtcaagttttttcgtatttgaaactacaaatgtaagtaatatatgcgataaatttattatcctctgctagtaaaatccattaaaaaaaactaccaatgtgggtgtatgttttctttcagtatatataaagagttttcgcagagagcacatatcgatggtggtacatcaaatctgatcattcatatctaaataattgttgttgagttttctatatgtgtggaacgttagattgcttaagctagaaattgacacaagagtttgatcaccgagttcctgcctcctggcctctaaccggtacgtctcgggtgggaactgtctcccacaacttttcactatcaagcaaaaagtattacaagcactaatagaggtttctcttctccttgttacaaatttagaaattaactcacacacaaaagacaatagaaaaggagactataccgacacgaagactatgcccatatcttcacaattgtgctattatttaccgttctaatctggaaaaaaaaacagcgcacgtaggagaattgggcacgaagacatgaatgggacacataaaggatcaaaagagtcatcatgggtctgccatgatgaaagttaagaaagttccaatacgcgcgaaacaagattgaatgcgacttctctctataccaaaaacgaatctcccaagtcccaagtgaatattgtgagccactaacttgttattaacattttgagacaaaaaaaaaatttgtacgtgtttttgccaaacccacttggccatgaccaatcagaaaaagacaaggaagatgtgtatctatgtgtaatgaggaggccacgccatcagtttacttgcacttttccaactagacgtggcctctcaccgatctcaacctcactttcctctcatttctcaaattttattggctacgtgtttttgtgtttagcgttcaacccaaatatcgatatattcttctttttttttcacatttttaacgatttcgagcaaaataattcgatttatttgtataattttaatatggtagttttacaaataatgaaacgaatgaccaactgatttgttaggtgttacaataaatatggaaaaaatctcataagtttgaaaacatttattctgaggaaactttttcttccccaaaagaaaaaaaaagtttaaagtggaaaaaagaaaaaaaaggaataaaaagtttgaattcagtttttttcttttctttgatagatttctttctacttatttattactctactacacaccacacaaaaacaaaaataaaataagtaatcatagtatcccataaatcagtaaagataaataaaatccagaaaatactgggcctatcattttccttcaccaactctataaatgaagagataatcctacagttacacctcaaaccaactccatctcacttctcaagtcttataatttattcatttctctcttcttcatcgatcttcggcttttagaaaacctaatcagaaatggcaacggcgtcgtttaacatgcagtcagtgttcgctgctccttccggtgtattgactacacgcaacatcagaaacacaaaccaactcttcttcaagaggattgctccggtaggagtcagatgcatggctcaggtatatatacactaacctcatagtccttccacttccctacgttacttatttgacttttaatcctgaccgttccttacattgactatttttttagggcgatcctatcaaggaagatccttctgtgccctcgacctcgacttcggccactccaccacaaatgccacagtctcctcctccaccagttagcaagcctaaggtatgatctaatgatcaaagtcattaatatatatcactagctaaaaaaatgaagctaatgaataattttcttattgtctaggtgagtacgaagtttggagatttgctagcgtttagcggtccagcacccgagaggatcaacgggagactagcaatggttggattcgtggcggccatcgccatggagttatcaaagggagaaaacgtgtttgctcagatctctgacggtggtgtcgggtggtttctaggaacaacagcgttgttgacgttggcatcgatggttccgttgttcaagggaataagggcagaggcaaagtcaaaagggttcatgacttcagacgccgagctatggaacggtcggtttgcgatgctcggtctcgttgcgttggccttcaccgagtacgtcactggtgggactctagtctaaagctaaagctttttgtttgctagtttaaggacaaatttggagaatgattatgtaacgcatagattgatttaatactatgagttttaaacagtgtgtcaacatgaatcaaaatttaaaaccatgaaaaaaacattataaaaatttatttgaaaaagtacttcaaaagttttcttataagataatgtgaatggagaagaagaagtaaaaaataaattttagcttctatccaaggtttgagagtttatgcattcttttgaaatgaatcaagagccaagaataattaattatgctcttccttgttattatcgaccaatagagtcatcatgtgtctgccataatgaaagtaaagcaagttccaagacgaaacgaaattgaatgcgatttctctctaacaaatcacctcatctcaattctcaagcccatgggttagtctcatcaaagcccaatcaaagcgtcaatgcttcccaagaacaaaaaaaaatatattaagatgaacaaacaaaaaaacacttaaaagaggaaagatctggccactacaacactacacgatagtacgatcgatgaatataatcggaaagatttgagtggctcaattacatattgcttatacgacgtcgttttgagtagcatcatttcgttaatatttatgtaggagactgaaacaagacagagaaaagagaatctccgaggaaaacaaaagttgatggcgacgtctaagcttcaagctctctggaatcacccggcaggaccaaagacaagtgagttatcacattgtttcatcaataatatattactctttcttcttccgtttcaattaagactctattgaaacgttactattggaaaatgttgaattgtttatagtacagttcttgacaaaaaaaaatctatatcactttaaatcctctaatgaataatatattctaattgtaaacagtttctctctttttttgttgttgttgttgttgggtattaatcagttcatttctgggctccaacatttaagtggggtataagcattgctaacattgcagatttccagaaacctccagaaaatatttcgtaccttcagcaaattggtaaataactactactcttcagaaatctctaatctttcttgttacaattattgttataaacatattatccataattattgtattagctgtgacatgcactggaatgatttggtgtcgttgcagcactataattactcctgtaagttttgtttgcttttcgagttttacttttgtgattggattcttggttttggtttatcgatctgattctttggacttttgtttttttttaacagaaaaactggaacctgtttagtgttaatgttgctatggcagctacagggatataccaacttactcgcaaaataaagtgagaatcaaacccacttttttgttttgcttgtgttttaacatagataacaaattcatcagcttactatataaaacatttcttttgctaagttaaacgcaatcagaaaggtttggtttggcgtttacaatcagcaaaggaaattttgcttaatatgtaatgcaaacaaagagtcgaagctattttaaactcgatttttatgatgattgtctatgatagtatgattttatcttttgatacatcaatgaaatgcttattaactttttttttgatattaggtatgattatgtatctgaagcagaggctgctgttgaaattgaaggatgatgatgatgaaaaagatgaaacatttgacatgtgaaaatgttcgttcattagtactgtcttgttaatggacctctagtagcatatgccaatgtttggatttttgttagatagtgaatggtacgttacatgcttgctaaagatttttatattatttgggacaagattgatagttgagtttatgtaagattaatcagtaattagatcaaaataataactctatatctcttaaaaatatgttacctctttatcaatgactagatgagtacccgcactacgtgcgggtttacgtattatttacaaattattttatataatgtttgttcatataaagtaaaattgaatgcataggttttgaaacataaatatgatttgtaattgtttttgaaaagcccaactatattagttcatctgaaaaacgaatgtgattgaattgtttttattgttgttttagattctcagttttttttttgaatttatatatccttgctttttcagttatatgtatagattgtgagacggtgaaattttagaaaatttatttcttacactaaaaatataacatgtctttattaatcatatctctgcatattcaatctaagcatattcaacttgatgttcttggaaagtttagttaagttcttgtcataatcttatatcttacgtattagttataaggatagctcctcaaatatctttcaaattacttgttttcttagcatagatctcgaaaagcttagatatatttaatctgcatattcatttagtttctttcataataatcgtctaatttttaggctaggaatatgtgtaacatgtttggattttatcatcactttagccacttaagtggatctcaaaattaaagaggatatattgaattaaaaaaatgtaaaaagagtgatgtttcaagttctcattaattatattctcatattttagttgttatgttgaattaattactaattatgtattacttattttatgaagtataggtggcaagctctcatgtgctgatgtgtcaagttgtgggagagagttagtcttctttcatatatatgattcaatgtatattaaaatctcaaagaaactaaatatttcagtcattagtcaatagtaaaattataatcttcaaatcaaattcaatgaatatttttctctttgtttctgttttaaatacaaaccaacatttttttttttttaacactaatacaaactaacattatttcttcaaaagaatctcttacccaaattcatttccaaatttaatgtctttctataaatagtttcacaatttttttattcttcgtgcaaacatttcccgccaaatttctcagtaaaatccctcttcttccacgtctccctccttctgcgtcaccatcttagagcatccatggcttcttctctgagttccaaggcaaaaaccttcaaatccccaaccaaaactccaactaaaatgtatcgcaaatcgtatctatctccatcttcaacttcactcactcctcctcaaaccccagaaactctcactcctcttcgtagatcttctcgtcacgtttcccgtaaaatcaatctgggaaatgacccaatcgatcttccaggaaaagaatcagtcgaagaaatcaatctaattcgaaaacctagaaaacgaaccaatgatattgttgttgcagagaagtcgaagaagaagaagatagatccggaagtttccttctctcctgtttcaccaattcgatctgagacgaagaagacgaagaagaagaagagagtttattacaacaaagtcgaattcgacgaaaccgaattcgaaatcggtgatgatgtttacgttaaaagaacagaagacgcgaatccagatgaagaagaagaagaagatccagaaatcgaagattgtcagatctgcttcaaatcacatactaacacaataatgattgaatgtgatgattgtttaggtggatttcatttgaattgcttgaaaccgccattgaaggaagttcctgaaggtgattggatctgtcaattctgtgaggttaaaaagtcaggtcaaacacttgtggttgttcctaagccaccggaagggaagaaattagcgagaacgatgaaggagaagcttctctctagtgatttatgggctgctcgaattgagaagttgtggaaagaagttgatgatggtgtgtattggattagagctcgttggtatatgatacctgaagagacggttttagggagacaacgtcataatctgaaacgagagctttatttgacgaatgattttgctgatatagagatggaatgtgttcttaggcattgttttgtgaaatgtcctaaggagttttcgaaagctagtaatgatggtgatgatgtgtttttgtgtgagtatgagtatgatgttcattggggtagctttaagcgtgtggctgaattggctgatggagatgaggatagtgatcaagaatggaatggtaggaaagaggaggagattgattatagtgatgaagagattgagtttgatgatgaagagagtgttcgtggggtttcgaagagtaagcgaggtggtgcaaattctcgtaaagggcgtttctttgggcttgagaaggtggggatgaagaggattcctgaacatgtgagatgtcataagcagagtgagttagaaaaggcgaaggctactttgttgttggctacacgtcctaagtcacttccttgtagaagcaaagaaatggaagagatcactgcgtttataaaaggctcaatctctgatgatcagtgtttaggtagatgtatgtatattcatggtgttcccggtactgggaagactattagtgtgttatctgttatgaagaatctgaaagctgaggttgaagcgggaagcgtaagtccatattgctttgtggagataaatggtctcaaattggcttctcctgagaacatttacagtgttatctatgaggggttgagtggtcatcgtgtaggttggaagaaagctctacagtctctgaatgagaggtttgcagagggaaaaaagataggtaaagagaatgaaaagccttgcatacttctcatcgacgagcttgatgttctagtcactagaaatcagtctgttttatacaacattttggattggcctaccaagcctaactccaaattggttgtgttgggaatagcaaacactatggatcttccagagaagttgcttcctcggatatcaagccgaatgggtatacagagactgtgtttcggtccttataaccacaggcagctacaagaaatcatttctacaaggttggaaggaatcaatgcttttgagaagacagctatcgaatttgcttcaagaaaagtagctgcgatatcaggagatgcaagacgcgcgcttgagatatgcaggcgtgcagcggaagtagcggattaccgtctaaagaagagtaacatatctgcaaagagtcagctggtgattatggcagatgttgaagtagccattcaagagatgtttcaggcacctcatattcaagttatgaagagtgtatcgaaactgagtaggatcttcttgacggctatggttcatgagctttacaaaacaggaatggcagagacaagctttgacagagtagcaacaacagtatcgtctatttgcttaaccaatggtgaagcttttcccggttgggacattcttctcaaaatcggttgtgatcttggtgaatgcagaatcgttctttgtgaacctggagagaagcacagattgcagaagctgcagcttaattttccaagtgatgatgttgcttttgcattgaaagacaataaggatcttccatggttggccaattacttgtgattttttgctagtttaaggaaaactttggagagattgataatgtaacacagtttgatttctggagtataaactataaatacagttacaacacaaccataatgccaaagccacacgaatcaaagtttcttcacaagtggatctgtagatgacataatatccaacatgagacagaaagctctctttattgtatgcttagtttatagaaatctgatgcataagactgagaatcctctaggctgacgcgtctatgacaccaccttcattcaccttcacgaaattatcgatgtactctttcctgtaaaatagccgtttcgatatccataaacagcttttctcgtgtcttttcttggatgaacttttgcagagtaagtttttgatgagacaaaaggggaaaacagaacattgtaccttgcagggaggtggtcgtgtgggcgattgtatggtgtccagaccggttcaccaacgaaaagccgcattgcctgctcaacaagatatttcaattttctaatcaaccaaatatatatatgatgaattaaccactctgaagaagctaacattgcaccttgatatagttgtctgagtctacggtgaagcgatgatatattccagcaggtaagactatcatacctcccttctttacccatactctaatccaagcttcattgcgatccctcacatcaaagtaaccttttcccaagaaaatgaaacgttgagaatatagataccgacttaaatcaagtaaagcagccaataaaagtacttaccgcttcctgcaacgcagtaacggatctcttcatcagtgtgcaaatgttcttcgaaaaagctcttcactttcacttcatagtttggaagcttttccgggcatacctcacaaaagtcctgcattttgaacacttttccatcatcaaaccaagactcaagcacataaaacaatttgcaaatcatcaacgaattttcctaaatacattcagtagagtaagtgttacaattgagtaaaaccctagagagttaaaacaagacttgttcaaaagtaaacatctagcattcaagtctatataaacaaaccatgtaagagtaaccacgagattcgcggatctttttcaaatcctcatcggtttcatagttatcagcatcaagtctccagctaagtactcccagctctgcacacaaacattacatctgaaacaaatagagaaacagagagaagaacactgaattgaaacacacaaagagacctgcaagtttgtccaaagatagaaactccttaggatccttgtggtgaggaagtctctgatcctcttcgctatcatccatataccatgcctggatcacttcttctcttccatcctaagcaaaaacacacatacacaaacacaacaagaaaacataaatttatgatgctaagcttgaaagagaaacaaaaaacgttcagcaattagtgaaattttcgattgcaacctccaagacaaagcctgaatttcatacacaacaagtgaaactagaaaacatcaaatttgatgattaaaataaaacaaaaatcaaaattggaatagtgatcagtgattgaagaccacttaattaacaatcggcggcgattcatgttttcatagctgaaacaagaaattttccgatgagctttcacgaaatcagaatcagaagcaagagatttacgattaccttaaccacttcacccatggttgtttgttcctcttcttcttcgtcttcttcgttaggctttttatgattcctcttcgtcttcaaatccacgcgatatatgccttctctccttttcaaaagaagtcattttcgttttatcttttgggacaaaaacagagaaaaaggttaaaagactaaactaccctccatccgccggcgtgcggcgagggaaatgccgcctccacatatatccgtttcagactatttatcacatttttgaggtttgagaaaatgtaaatacgttagttagagtggtaattattgtaaaaaagttaacaaagttaaaagttaaaaactgggttaaaaatggacaaaagaagagaagtttggtggtgtcaaagtaagactcgagtcgagagtaagaaacactttggctaaaaggtctctctcgttaaaagtgtcaagtaagacatcatttacacattacaacacctagaaaatgaaagcccttctttcacctctcttgtctctactctctgtgactatatcctcacaaaaagaatcagaaacaagaaattaccactaacctactaagctctactcaaaactatagaccaaaaattatgggtgcaaaaccccggaaacacaaaagaaggccgatccgaagagaggtttcttttcttcatatctttgagcttacaagcaagcaactgtttcaacgcctattcacagcttatagcatctccacgtttcggtatcttgttaaatgcctggagaccaagcgaggagagttatgagggaaatcatccaaaccactgatttaacaaagctttatatatgattctcttcttaccttcactgtttagatcaactgaaagattgggactttttgtctggctttcaggtgactggctatgcagtggagatccggtgcagcctaggttttgcgaatatgcagctttcatccgtggctgacaattcagaaacatctccaagctagaggacgcaactcctggacactttttggcctttgagaattttctgcacattacgaaaacatatcagtttatagcgattttggaataagcgtaagtatataaatgcacctgtctttccgcttttcacgatatctttgcaaagatacctttctgttcgcctggccctccataccttaagaacgacccaaaaaacatagaacgacggttagattaataaacttcacaggtcatataacatgcagaacaacaagcaagccaagtttcctccaagttaacaacattagcatagctttgcacaggtgaagatgtgttgatcaagtttcgctccgagaatcattaaggtaatatgaatactgttcataccagaatcacgagaagaattcgccttctcaaggcctttttggggaagttccatcatcttctctgcaataagatttcacattttcaatttgatttttgactaattcaaactagactctgaagaaggaaagtggaatcactatcacaaaaacatgcaagaggcatttggatattttacgcaaggtagtatagcacaatgcaacatttagacatacttccttggtcaactacccatgcctcctttcaaagttggacaaaacaaaagcagtgtttgcaagaagagaaaataaataaaaaagctctactgcgtcagaaaagctggtccatgaactttttccagtttgatgatacacaaaacaaaatcatttcatgtttgaatcatctatctatcaactgaaaaacagatcagacactttagcaaaagcttacctttacttatgagctttgaaatcattctactggaagcaaaaataccgttttcaggcaaatcaattggattggctgcaaagtgcatgattgaccgggcctgcaaaccaatacaaaggatgaatgatcaaaaacatgccaacaaaatttctattttcagactggacagaataatgttattgatttaccttttcaggtggtattccatcatacacattcacttttccactatagaatatcgtcatttgcccaacgagctcacttgtttcagctgggcttctgatgcaagattacagacaagaatgtttaatatgcttgtagaacaacaggcacatgcagcaaaaccttttcttaagctttcgtagatggactagggaaaaaaccctctaacttacaaaatatcattaaggaattcaagtaactaattattatttcaagtcacatcagtcatattgactattattttccatttctaaagagatccaggatactaagacataacgaagatgatcttcgatcacacgatcgtggccaacctaaatactatctgacaaatccaccatcaatgccttgaaccatatatagattctgtctctaaggatgtgatattgaaccaaaaacttcctaatatcacaaacttaataatgcaatgcattacacttttcttgaattaaacaacattccagttccagatgcatagaagcagaaaggtatcaaaaaaaattcaaatacgaaaatgtaaacctgggagaaatagtcgtcttgtggccatctttctcggatacaaagtgaccagacccaccggaaaactcagctgatcttggagaatccattctatggcacgcgccgttatcttccggataagaaacccggccacaagcttccagctcgttgcttggctcaatcaacgttgttgtgacctgtagatatcagaacaaacaaggcaacttagattttcacttttttcaatctgtgagtttaaacgagaaatagaagcaaaatcgaagtaaatatctcacgcgaggcggatttactggctgagaaacgaggatcttgcggaagataccggcgccggaatcgtctccaggctcatagagagctttaagagataaaacttgctggatcgcctgagatttgttccacgacggtcttcgcattcctatttcgacatgtgtcagcctccattctcagaataaacaagcaaaaaaaagctccgacagagtagagaatttcaaaatttgacttccgctgcaaatcggagaaggaaacaagactatggagaaaggtagaagaagaagaaacctttgtctttgaggaatttgcggcagtcttcgcgagtgagctgagaaatgtcctcttcagtgagtagcttcagaggtttcgcaagtatagacttcgccggtgaaactccgacatccatctcctcctcttcaccggaatcccggcgagagagcagtggcgtttcagtaataatcggaggttttgggggtaaaattaggaagaatgagagagagcggaacagtggcgagagagagtgaggtcgaatagtttttcctatgggggagtcaatttgggggaattgttcccggagcagggaaactccctagactgccacgtaagctccacgtctacataaattattataagcctaatcatggctgctaaacttgctaagtttacttttatatcccctttttcttccattcaactactgtttattgtaatccattaagataggagaataaaatgattactccaattctatagactatagagttaatgtaggtcggatttaaggagattccaaactctaaaaggaaattacaaaagaaagccacaaatgtaaacgaaaacgaaaatcttatgtccaaccacaaatacacaaaaccacacttttcttccttagaaccgtgaacatgttcgataacaacaaccaccaaacgaaccatccttaaaaccgtcagcatgttaagatacacaacaacaaccaaacgaaccatggtttagattaaaccaaagaagttgacgcggttggacgtattacttcttattagtttcttctaatttgttggtttttgaaaagcaaataaaaaagaatagagatttgtgtaaaaactcaacatattgcacataggaacgaacgtaagacaatatgaatcccaatgtaatcttttcgtatatgggatacgacaaagatggtaaagagagacatatcagagagtgtaactaagtttacaacaactcaagcataccaaaagccatcattctacacaggaatacatataaatatccaatacttgacaggaaagctttctttattgtaggccttgtttatagatccttgtttcagaaagccagatatagagagaggaagctctctaagccgaggcattgatcatgaagttatcgacatattctttcctgtaaaatatcagaatttatttctcgtaaaataacagaatttcttgcttgattatatatcccattgtttgcataagagaacaaacaaaaggggaaaacccaggacattgtaccttgcaggaagatggtcgtgtgggcgattgtatggtgtccataccggttcacccacgaatagccgcattgcctgttcaacaagatatttcaattttctaagcaagcccaaactataaaataaatggctagaagaaaagctgacattgcaccttgatatagttgtcagagtccacagtgaagcgatgatagatcccagcaggtaagactatcatacctcccttctttaccaataccctaatccaagcttcattacgatctctcacatcaaagtaacctttttcccaagaaaataaaacatgactactatatcgaaattttaagtttacgagtaaagccgccagtaaaagaagttcttaccagttcctgcaacgcagtaacggatctcctcatcagtgtgtaaatgttcttcgaaaaagctcttcactttcacttcatagtttggaagcttttccgggcatacctcacaaaagtcctgcattttgaacactttttaatcatcaaaccaagattgagaaaacccctagagagttaaaataagacttggacaaaaataaacatctaccattcaagtctagtgggatagtaaataaataaagaccacaaaccatgtaagagtaaccacgagattcacggatctttttcaaatcctcatcggtttcatagttatcagcatcaagtctccagctaagtactcccagctctgcacacaaacattacatgtgaaacaaaatagagaagcagagagaacaacattgaattgaaacacacaaagagggggacctgcaagtttgtccaacgatacaaactctttaggatccttgtggtgaggaagtctctgatcctcttcactatcatccatataccaagcttgaatcacttcttctctcccatcctaagcaaaagcacatcaagatgggattagattccttgggaggcaatgttcagatattttatatttaatctgattttagcttcaaaacttcagacaattcgagaaatcgtcaattgcataactaaattgaatacgaataggcattaaactgactgcgagatttgagcaaaagaagtagttatgatgattcgaaaatcgtcgaaaatgaatcaaatcactcagataacaatcgacgattcatgcttgcatcgcaaaactaggaattatcgattggcattaacagatcagaagcagaggagacaaagataaaaacataccttgaccgcttcacccatcgtgttcctcgtgatgtcttagtccttcttcgtcttcaaaaccacccgattactcgattcttctttttaaaacagggaaaagatcaaataaataaaaatctttggttaaaaagactaaactacccttatttctcaactttatagaagaatgttgcaaatctcagacatatcacatacatcatgccatgaaaatagacaaattaattatctcatacatatcaatcacaaagaagttgtgttacttggacctcaaagattggtatcatcaataaggtctctctcattataagacaagcatttacataatacaaaccgccacatcctctctctctctctcgcgtctctctaacctactcaaaactacagaccaaaaaagatggacgcaacccgtaaaaaaaacaaaaccatacaagacccgcactgatccagctcaaatctttaacccatgtttcttccacaatgaacgagaacattcattgtttgctttctttctttttgtacatggctaacatgttataagaacatgaaattgttcttcccgccttttgacccgtagtaccatctccagttcttttggcaccttgttaattatctataaaaaagcgaatgagagttttaagggagatcattggaaccatttgacaaatgcttgttcataccttcgctgtttagatcactgtttagatcaactgagatattgggactttttgtttgattttcaggtgactcgcaatgccctgtgccactaaggttttgtgaatatgcagcgttcatccgtggctgacgattcagaaacatctccaagctagaggacgcaactcctggagccttcttggtcttagaaaatcttctgctcagaaagaaaggtatcagtattcatcgatttggaataagcaagcacacagcataatagcaacaactacctgtctttccgcttttcaagatatctttgcaacgatacttttctgttcgcctgaccctcaacatcttcagaaaagaccaacaaaaagaacaatagttaaattaacagaatttcatggtcgtatatcatgcagaacaagcaagtagtttagcgtagcatgtagaggtgaagaggtggaccaaatttcgctctcaggtgttttaaagcatcattgaataataggatttcatatctttaaggtaaaatgagtactgtttgtaccagaatcacgagaagcaggtgccttttcaagtccatattggggaagctccaccatcttctctgaaaaaatcaaatcacaatttcaaaaaaaggggcacgaggcatctgtagacacataagctagtagaggtagcagcaattacagcatttagacatgcttctttggtaatttaacaatgcctcctttcaaaattggacaaaatgaaaggccgtgtttgacataagaaagaaagaaagactcatcttgagatgcagcagctctagtcattttttcaagttagattatacattaaaaaaaaaactcatttcaagtctgaatcatcaatctttcaactgaaaagcagatcagacactttagcaaatgcttacctttactcatgggtttcgaaatcattctactagaagcaaaaataccattttcaggcaaatcaattggattggctgcaaaatgcatgatagaccgggcctgcaaatcaatacacaagatgaatgatcaaaaccataccatcaaaatttatattttcaggctggacagaattatgtgattcatttaccttttcaggtggtactccatcatatacattcactttgccactataaaatatcgtcatttgcccaaccaccgcatttgtttcagctgggcttctgatgcaacattacaaaaaagcgtgtttaaacaacttaattaaataacattggagtagtaatttgtttataaaacaacatgcacctaatatcaataagactttgtacatgaactacccctaaaactcttgttagtaattgcagaattcacaaatcatatagactaatggactaagtaactgatttatcgttcactagcaataatcacatcacatcataccaatcctcaaaacagaagagtaaagagtaacacagaaccaagaagatctatctgactcttttaacctaaattctgtgtgaccaatccaccatcaaaaccatgattcatatagaaacttttcaatgtctaagacactgatatcaaaccaagtacttattctaagatcacaaacagaatgtcacaatgcatcagttctcttcttgaggcatgaaagcagaagaaagataccacacaaagtcaaaacgctatagaagaaaatgtaaacctgggggaaacagaaacagtcttgtggctatctttatccgcaacaaactgaccagaactaccagaaaactcagctgatcttggagaatcccttctatggcacgcaccatcatcttcctgtaaaggaatccttccacaagcttcgagctcgttccttggctcaatcaacgttgttgtaacctgtgaacaaaacagcagtacacacagaacaacaattttccctaaatcagcaccaaccaagtaaacgattctctactacttcagaacttagatttttctctgtaaatcgaaacaaaatcgaagaacaacactcacgcgaggcggatttggcggctgagaaacaaggatcttgcggaggattccggcgccggaatcatctccaggttcatagagagctttaagagataaaacttgctggatcgcctgagatttattccacgaaggcctgcgcattcctgtttcgacacgtgtcagccgccattctccagagagcgaaaaaaaaagctcggagagaagaagaatagagaatttcaaaaaattgactatgtacgattcttctcagcaaaatccgtgaggaagatcctaccgtcgaagacaataagaccggaaaaaaatggagaaaggaagaagaagaaacctttctctttgaggaatttgcggcaatcttcgcgagtaagctgagaaatgtcttcttcagtgagaagcttcagaggcttctcaagtatagacttcgccgtagtaactcctacatccatatcccttgtcagattccggccaaaacggcctcaccggagtcccgacgagagagcagtggcgttttcgtaataattggagggttttgagggcaaaattagaagagcgagagagagagagagagagaaagaaagagaaagagtgaagtcgctaatagtctatgggcttcaattttaggggaatggtttttggagcagcgaagctccctagactgccacgtaagcatcctattagtctctctagattatagcctaatcatgcattgcttaagtatcccaattattttttattttttgggtaaatcttatgctgattatttttttcgcgtcaaacagtgaaataaaatagtaaatggtaacagttttatattaaatttaaatataataatagcatgagtgataaagaaaaatgacacgaaagaaaacagagattattttgtaatcagagagtatcttgtttgtttattactgagtggatgtcaatttatctaaaatcgcatacgatcaatttgcatgtgatattttgattaaacaactaattatttctataaatggataagagttattccaaaaatagaacaaaatatcttttgtgttttgtttgtatactactttagtctagatggacaatcatcaattcttggttagtgtttttttcctggttttacaattcttggttagtatctctaaaaaatggaagatcatgtcacttatacgattattacttgttagttagcagaacctccagcattgcaacacttcaacatgtcacgcaatttttgcaaaaagataatcattccaaacatttttgcaaacagacaattttcagtttaaaacaaccaatcaaaccctaaatgtaatcatgttaaatgagttttttttttcttaaaaaaacatctcataaacatgttaacaaaaaatttgttaagctaatttactagttgatacttttaaaatggatttagcatttgtttggcaacaacatgtgtgctatgaattggatagcaaattagcaatacaacaaaaacactagcacaaaccatttacttttttgttaaaggatctagcacaaaccattatactaaaaaatctcttcgatatccatattcagtagatcatttagatgcatgtaaatgaaaatggctcaacacataaaaacgaagactagtcattttctgaagtgaataccaaaacaattgaaaaatacaagagatagagtaataaattgacaagacgaaggaggagaaatatattttcacatgagtctgaccaatatcgattctcccttaaaccttgcttggtcttgcgtgacatcccttctcattatccaatatataaagtgataattgataacaatgcatgatacatgtaattatactcgtgatgtacgataaggattcatcactcaattcatccaatgtcgtaattgtcaagatatacatgcatgaataaacgaacagttgaaaacttctttttaaaatatagtttcgtcatccatacatacggtgatgtcccgaaaaatgattagataagcaaaccatattaatgcaactttttctttttagattactatgaaatttggaatactgatccataatttttttgaacaagagaatggaacgtgtaaacattttattttttttaacatcgaaagtcgaactttgtgactttgaagttaattcactctcgtttgaaggtttttataacttaccaacaattgatattgaaatatataatattaatcaatggtcttcaaaaatcaaaactatctaccttatactgtatatgcatataccattttttttttctttattgttattgttaaccagaaatttctaatttttggctcatagttttatgtccatggactagcatttgataatatatacttattgcgattccacaaacgtaaatcatctctctccatatatagcacttaagactcgacctcatatttggtagtactgttacaataccctctagcaagttgacagcaattttcaatttgccaataacttgtaaatcgtaaaaacttaacataaaaattgggatatagaattgactattgagagtagtggaagatatgagatatagaagagggaaacaaaaaaaaaacagagtggaaataggaagagtcgttatcgaagaaatggatccaagttggtaccatacctttaatctaaaggatgcatccgccatttctatcgacaccactcaccaaaccctacccaaatttatttttttcttaaaggtttttaaattatatattgttgactttattatgatgtgctttaaaaaaaaacaatattgtgattttgtaattgaccatgaatatgagaggttttggaatataacatataggtgaactactagccaattgttagtcggattactggtttaataagatgatcagaacaactaaacttgtaaacttccatcgattacaacaatcttgtgaggctaacttgaagtagttcaccattttggttggtgaacactatatatgtcaatttatgttctctaatatatattttcttgtttggttttctcaatatgtgttgtcgagtcgaaagtgattaattgatcgagctcaagatcttgctattaaggcgaagtaaagattgcaattcatattgctgtatcctaacaaatgtgatggtctcttatcgttctaacatctctctttcagatttatataaaaatatatatattgtctacaaaactcattcatccacatccaaaatttaaaatttggattattacacaaaagtagataaaccactagacaaataatatctagtcgaattaattaaattactcgtctaaattattagctttttagatatatatatctaaactaaggactaaagctagttagtgtaaatttgacttttttttgttctttgaaactatgtgtaatatctatttttttgtaaatgcaaagataatcgagtaatgaacatgaaaactactatattataaggaaaaaaatggtatttaaataaaaaaatatgaatagtgattgaagaaccgtacaggttatgtttgtgcagggagaggggtcgcgagtgcgtgggtcgggtacagaggatgagtcagtgagtcaggacctgtttccccctttgtagggacacttttaccatcctttaatgggcctattcttttcataggcccatttaaatcatatcagtcagtctttttcttgggcctcatctttgttttgtggttcttgcgatttgaactatctgatggtgactacaattggacgaccgcagaacaacccaaccgtatatgctgtcttttgtgggcaaatcttttttattgatatggattgtctcaaaataagtgatagaagtccgatataaagcataaaacaatctctcatgatcaaccattaaaagaaataaactagcaacaacccatgttcctcttactgacatacatacacatatagtcaaagatttatgcaataatttggactttattaaaaatatttacaaaccatatagacatatatatagtcatttttgatatcttggtttcaaaatctttctagatctttagttccaataaactttcaatttaaaagcggttttctaaaaatccgaagttggccaagtgatatattagtcctgtccaaactgacacaactcacgaatgtggtacgggttgaaaagccttaggccatgttcgtgaggtaaagatactcgcggtcgatcaactttggggaacgaattcgttcttggaacttttgttgattgattacgggcgtcatacgtgacgcccctgttcttttttatttttaggacggtttgggggtgttacaagagtggtaccaaaagacgacgaatatattgactcatatcttttatatcttagcatagtttgctttttcacttttaatgtgagaattctaacatgcacatttgagataatgaatcattttcactcatcgttttggatcgaacctcgttttgtttttggtttggtcataactttttaacttgaaaaccacttgagagtgagtcgactgatttatatactccttatattttactttatatcccatatttttttatgatgtaagattcttaacatagtcaagtactcataatgatctagtagttgaatgatttacgatgattcgaatcattctacttcgattgagggtgtacactaattagatcctattatatatgatataaactgatatatataagaattattatataatgcaaaaaatgatcataagacggacggtgtatatttattttgaatataatacaaaattatcatatgtccaactccagattcgtgtgcatgtctctacgtatctccggatacgatcatgctataagagtcaagacccctacacgatatgacaaaacgagtaggaaaaacgtgacaccaaaagatattaaaaagctgaaactaatatatagaaatgaaaatgagagatacatatcaacattatacaagaaagaaaatgaataaaataattgtaatgtaggactgaaaacctaaaaagaaaaagaaacatcaaaaggttgccaaaataaaaaagtaacatgaaaataaaacctgaccagaaatttccataaagcccaacctatttattttgcctacactctgagccccactcattagttgctcaactattttaattccttgtcataattgttatttaagaacctttataactttcactttcagggtatataatctctatggatttaaatggagaaaaccccagtgaccatagtttgatttaaggaagggaaagttataggaatggattatgaaatattataaattttgcatattaatgcaaaatatctatctttataaaacatacttttaaaaatatataatgttaagaaacaaaaggaggttaatattaagtgaagactctcactaaagtatacaaatgaagagatataaaaagcaggataaaaatagagtcaaaaagaaagaaaacaaaaacaagacatagcaatttgaatttaatatttggattccaaatccaagctcatgggtctattctactgttcacagtcacacacacactctctatctaagcttcttttgacttaagaccaaaatgaataaccccaaacctcaaacactcaaacataaacccaaaaaatctctctcacagagaaaaataaaacacacaattttaaccacaacacttgtctctctgctaacatacgcatcctctccggttcttgactaatgggcaccttccgtcgccgccgtcgctttcttttagctgcactcgtcacatttgctctcctccacctcttctccgcctcctccatagtctccgccggtaagaaaccaataacaatgtgattttttttttcttgcaactcaaacccgaaaatttcttgattttcttgatttcataataaaatttttggtttgagtaattaaaaacgcaatattttttgtagtccaatggttaaatgtacttgatgtgtaaatggtgagcgagttaactcagtagtggttaaattcatttaccagatggtagatggattggtcagagaaccgggtcggatttaccgggtgggttcataaggagtaataagcggtttggtggtccgggttcatcaccaccgacgtgtagatcgaagtgtgggaaatgtcagccgtgtaaaccggttcacgtaccaattcaacccggtttaagtatgccattggagtattaccctgaagcttggcggtgcaagtgtggcaacaagctcttcatgccctaaagtttgatcaattattaaacaattcagaagaagaaaaaaaatgttttaattctttttgttttgttttttgttcctcatttcttgtgcttctctgattaattattgtaatgaaaactatatgttaatattaaaaaattggtcatgtgaagaaattgaggactttgggaaaaggcaaatttttgaggggtgatagtaccgagaaagaaagagagcattcatcatttttaccctaatgacacttgcttcattgtagaaccaattgatattgcagatgtctaattcaggtagtgaatttctatcttttctttgttataacttgtaagaaaataaatatgtcatacacaaaacaaatcgtttttaatcagtaacatgaaatgacaaatgttttagacaggtataaatagtaaaatatcttactaatggtaaaatcattttactacatagaatttctgaaaataagttaaaacgttaaaaataggtttcactaaatagaatttctgcaaattagataagttataactaaaaaagaactataattagaaaacgttaaaaagaactctacaggattagtgatgtaatttgttatgttttaacacatcaataatatatatatactagtagaagtaattttttaaaacgtggaatgtaatgaatattttgaatggtaaactaccacaactacgtttttaaaatgtgaaaatgtatagaaatagttactttatataaatataagatgttttggttaaaagcacaaagtttaataaacttatatttttatattaaaaacatagttaaatatctaatcaaagagagtttggcaaatgataaaaatttctgcataatataaataatcacaaaatttcctgttgaaatgtcttttggatttttgtaaattaaacaatcttatggtgaattatttgacaaaatccgccaaaaacaattgtgagtgatggatatttgttttgtttccatttggtgttatcagtaaaatcagtgatttgccccttattttcaaacaaatcccacttaacaaaacaaatcctaagtactttgtttgtctggttatgcatgtttgtttggacccataggtttttgtccctcgacagctatgaagatttcattattgctctttgatgataatttattaatttttgtaaggtatcaatataaatcatgattaatatttatatcgtacttgcacgtgtaagtatgcagcaggaccatattataaaaaaatgaaacaaataataatattattatagaaaacgaatgtaaaaagtagtaaaagcatttatggtttggagtttttcccattttcactacaaagccgcatatgtactcgtgtcgtactgcatactctgttccttacatataagtttgcaatatctgaattaacttctctcgtttcttttatttttctccttatgagatgtaccaagttattctacttttgattttagtatttggaaaagtatctacttgtctcatatttatagcttgattttacaattttagctttttaaaatagagaggaaataaagaaccattgacctataaaagatacacaaataatttctttgtagatgcctaaaaagcgtactagttacaacaataattgtataagttggagaatgatggtttactctagacttatagagatgttatgatcatcattagaagctgacttacgttacgtatagaaagattatgaaacgtattaatttcagggtcgaacgggacaagactttggtcctatattcggagttcggacaagtcatggttataaatttgtgtagatgacataaatggtggagaattattttgattatgagctttgaaaatttggaaacacgtaaccatttactaacttctaaccactgtcctatcggtcgtgtagggccattgtactcgacccaaacgttgactaataataacaactgcatggtgtttatatcataacgaacatatttgtaagattttagtattttacaactttcactcctttttttgtgttttcgattttttatatactcttaatttaatatgatggtacgtaaggtacgttctacatgagatagttgatactccatcgacgaacgaaataacacaaaggagctattacacaaattcttaggttctttatgtttttcacatttaggaaaaaaaaaggataatattagtagataaccaaataaaacatacaaattaagaaattagcagagagaaaattttttgttacaaaataaccatggacccacgttgtcggaagaaaggaaataacaaagctacccttcatttgttgtaagatgaacagtaaacgaaacacatccgtgtaatttttaaaaatagcatgtaacattaaaatttcacatgttatatttagtttaaaaacatgctatttcaaaaaacgttatgaatttttaagaaaaaacattattatgaaatttttttacatgaacagaatcttaagaaaaaaaaattatatgtgattttaataaaaaccatatattactaaaaaataagaatatatttttaaagaaatcacgtgtgatcttaataaaaaacgtgtattactacaaaatatcatgataaaaagagatattaaactgaatagaatgttttttccaaaaaatatcatgtgctttttataaatactatgtaataagagaaaataacaagataaaaagaggataatatgttatcgcatgtatttcggaaaaataacatgttacaaaggacatttacgtaattacacgtgttctccaacatgtttccgacaagatattgtgactcaaggttagtttgtacattcttttcaaatctatagtcatttattataaatactcaaaaaaataaaacataaattatttacgcgttctcagtttgtatcaattttgaccggaaattggttatatggcatgcaaacagtccaaaagttaatgcaaaggtcgaagttagaaagatgaagcaaagagataaaaaggatagcttttcaagcagttatgtatcatttttttgataaaagacagctatacgtatctttgttgtcttctatactagtttagaaaaaatgatgctatacttttttttttgaatatttgaaacattacacttttgttatctctggtctgagccatactatttcatatattctacaacatctagtcgtttaaaagtggctaagcttaacttattatgtgaagtgcctaacactttcataaacatagattttaagcaattgatgtgtgattgggacgttatagtaaaccctattcaatacttattaagaaaatagaatgtctgcattttaacgtgaagaaaaagcaaataattagtgtgcttgtgcgaaactgtaaataatgtcaaaggggtcggagaaaaaagcaataatcaaaggagtttacagagatgagactgatgtgatgggtttggttgggttggtggtcgactgtacagacatagcttccacttttcctgtaaattattttcactctctctttttgttttgagaaaaactttgtttgtccattcgccgaggaaaatctagtatattgttcatactaaaaatgctttagttaaggcatacaaaatatgctttttggttccatagtataagatccataattaaaaatttcgctacacattagataggcagacgtacgtagcatttagtaaagaaatcaaagactaatcgattattaacttaataaaatcaaaaataaaattttgtgtagtcaataaaaaatataacaactatgaaatgcaccaattttctttgacacacttgaaaccacacaatatttttacatttttttaacttgaccaacaacaaacacaaattagtaaaatctaggatgctctttttactaagtcggattgtgattgaaaaaataattgttgttctctgaacatacaggttatgatccagatgaatgcttaatgaagtgacaaaagtctactgcatatatccatagccttaaactagatcccatgcacctacaaatattggatggtggtatctataatatattgttaatataaataaaaagtgaaaaaatcacggtaattttgatatcatattaaaatgagagcagtaattattgccaatactgtttttttttttgtgattctatttctgcgtggtctaacgagccaatatccagcaactaaactacaaagccaatatgggaatatgctagccataaaaggaatataaacgagaagcataatctaatttgcttgaggaatcataaaaataaggtactaatggtgataattaaacgatggattagaaaatgttgtcacttttaaaaatgaacagaaaatgagaagtgcattgtcaaatcgatcgcatcaaacgattctttttcatatagtttgagataaacatcagagaatagtccttgagtaggttcatagacaccgtcctacacttggaaacttcaattaattcttctctaccccacttttcttattttatcaatttcttattgcactcaaatgtattctttgtaagttgaaacttatctctcattatttgtataaaaacccaatgggctttagtctccaatattatagattcggccccctcgttctacaattgttggagtggttacgacttagttggttacacatagtcgatcatagttgtatacttgttagcagccaattgattttttattctttggttctcaataacatttgtgacatgtcattagcattgttagtgatttaataatgatcctatatataaatttaaactgaatcagtactaacctcgttgaagaattttcccggtttacgaataaccaagatatctataaatagttcaataaactttattcccatagagagtggtcccctgtctattaccatgcaaatttgagtttacgacaaataacctacacaaagtgaaaaaacctcatgcgtgaacgacacaccacactaccacagtcataaagaatcactaagtttatacgtcataatcactatagtcactctcttattgttccagtctcgtgaatagaaacgacggaacagtatagtcactctcttagttaagtttcctgagcaaagaaatcataacctcttccccttttcttcttcttcttcagtggtttctttgttttcaataacaatggcgaaatatgacattgaaagtggtggtggtatcgatctctatcccgagatgaaagagagtacgaagcttcgctggactttcatcagaaaagtttatgtcatcatgctgctcctttctatcctttttctcggagtagccgccgtttttctttcgtagatctcatcaccaatcccgaccatcccctcgacttcttttatgttgtattccggcttcggttccttcgttaagtctcctttcacatatttcgtttttaaaaaaaaaaaaaaatcagttgatccttcgatttcttgcttatttagaaattatagctatgctaattgggttatttagggtttatagctatgttaattttttcggcatcacattgcttatttagggcttttgggttactttatttgtgccaatgcgattcaccaaaaaagctcgagattttatcgatacaattagctacacttgtttttgttgatcttgtacaacgaatttaactgttctgttgattcatcgcttgaatgcttatatatttaatggtgtttgtggtgttgtggccactctttgcttttgagaagttccaaaggatcagtttgaacattaattgttaattaagaacaataaaagtgggttgttgtagtattaatgttcttgtcatgacagtggaggcactagaagaaacgattgaggaaactaactaaagaggatgcacgagaagatgagacagacatccgattagtctccaagctataaggacgtacatcttcctacacttggaaaactccaattaattctcctctaccccgcttttattattttgtcaatttcttcatccaatcaaatgtataaagctcatagttcctttgtaagtaactattctcacattgtttgaatatatacgttggagtctcccatggtttctaatgaacttcaattggcaccaatattatagattcggtcatcccgttctattgttgtttgagacggttggttggttggttaaacttacacatagtcgctcagttcacaaagcgtaattgttatgttacgctctatttctatgagataaattagccatatgaattttaaagcttaagagtaaaatgatgtatatatgattctacatttactcatgttagaattctaaacaagatttctcagtttaaatagtaaaaacttgatatggctcaaacacttgaagtgacagacacgttgcaaatttgggactacgttgtgaataaaacttctgactggaaacggtgtctttgattcgtcttaattgcgaccacaatgatataatctactagtagtcttataatattaaggaatatgagacggtttatcgactacattttttgtcataattttgtgatggttttgtcattactttgtgtgtagtcatttattagttgcaaaataatcataaaaccattacaaatatttgcgacaaaaaaaattcataaaatataatcccaaaatgcatgttttcttgtagtaaacatgttccttagagtggaatttcttcatatatttaaatatcttagttggcttggaataccctccaggcctccatcttgggtcatggtaacccatatagataatttttatttttcaaaacctaaatagtagtttaataaattcatagccttagctatatcttagtatgttgatgtaatttttattttcaggtccacaactgattatttgtttatctgttttctcaaataagtccacttcctatattaatcttagttaatctttatacaatgtatcttctttaaatatgctatcatgaaaatgacacagtttttggtcttttatcagtcagattccaaaacattttacaccatttcgatatcctacaaactcttctctcttgacttttgggttaagtacttgtcttgatccacatgtacaagttatttataaaaccaaaccttttgagattaaacaaagccttagtttagtaattaataaccaaaacccataagattggttaacgtttttgataaatgattctaacgcgttatctaaagaacaaactctatcagattatgaactgtttcactgtaggtctctcgtttaaagtaaattttcgattatacagtgagctttctaaaactcttaaaatcatacattaataacacttaatcaactcactagatcgtcatttgatatacattttatcctctcttttttttggttttagaaaaggaaaattaaagaaataattgtcatagatatcataattactgtatatccgctattttaaatatatagcatttcaatttacaaatttatttctataaatagtacaagaatagtaatagtctcctttccatttgcatatattttgagttacgacaaataaataagacaaaaattacgtacccgttaacaccacagttataaagcagccccagatagaacacgtgtcttaagatcattggtacgtctcgagatccaatatgacggtgcagtgactgtaaattaacccgtaactcacctcttgattcaacaaaaatgaaaaaccgatactttcccggcaatgtttggttacacagtcagtgtcacactcacacacccgcggaaaaacgccgtccactgaattccacgtgtcgaaacataattgggtagttagagtaaccacagtgacggaacagtaacaccagcattaccctttagtttccccgtcactttctttcttccgtagtttcctcagacaatcaaaaacctcttcttcttcttcagagctttgtttttttttgcgatttcaacaacaaaa

SEQ ID NO: 582 - DNA, 202860 bp, Arabidopsis thaliana
atcccttgtcagattccggccaaaacggcctcaccggagtcccgacgagagagcagtggcgttttcgtaataattggagggttttgagggcaaaattagaagagcgagagagagagagagagagaaagaaagagaaagagtgaagtcgctaatagtctatgggcttcaattttaggggaatggtttttggagcagcgaagctccctagactgccacgtaagcatcctattagtctctctagattatagcctaatcatgcattgcttaagtatcccaattattttttattttttgggtaaatcttatgctgattatttttttcgcgtcaaacagtgaaataaaatagtaaatggtaacagttttatattaaatttaaatataataatagcatgagtgataaagaaaaatgacacgaaagaaaacagagattattttgtaatcagagagtatcttgtttgtttattactgagtggatgtcaatttatctaaaatcgcatacgatcaatttgcatgtgatattttgattaaacaactaattatttctataaatggataagagttattccaaaaatagaacaaaatatcttttgtgttttgtttgtatactactttagtctagatggacaatcatcaattcttggttagtgtttttttcctggttttacaattcttggttagtatctctaaaaaatggaagatcatgtcacttatacgattattacttgttagttagcagaacctccagcattgcaacacttcaacatgtcacgcaatttttgcaaaaagataatcattccaaacatttttgcaaacagacaattttcagtttaaaacaaccaatcaaaccctaaatgtaatcatgttaaatgagttttttttttcttaaaaaaacatctcataaacatgttaacaaaaaatttgttaagctaatttactagttgatacttttaaaatggatttagcatttgtttggcaacaacatgtgtgctatgaattggatagcaaattagcaatacaacaaaaacactagcacaaaccatttacttttttgttaaaggatctagcacaaaccattatactaaaaaatctcttcgatatccatattcagtagatcatttagatgcatgtaaatgaaaatggctcaacacataaaaacgaagactagtcattttctgaagtgaataccaaaacaattgaaaaatacaagagatagagtaataaattgacaagacgaaggaggagaaatatattttcacatgagtctgaccaatatcgattctcccttaaaccttgcttggtcttgcgtgacatcccttctcattatccaatatataaagtgataattgataacaatgcatgatacatgtaattatactcgtgatgtacgataaggattcatcactcaattcatccaatgtcgtaattgtcaagatatacatgcatgaataaacgaacagttgaaaacttctttttaaaatatagtttcgtcatccatacatacggtgatgtcccgaaaaatgattagataagcaaaccatattaatgcaactttttctttttagattactatgaaatttggaatactgatccataatttttttgaacaagagaatggaacgtgtaaacattttattttttttaacatcgaaagtcgaactttgtgactttgaagttaattcactctcgtttgaaggtttttataacttaccaacaattgatattgaaatatataatattaatcaatggtcttcaaaaatcaaaactatctaccttatactgtatatgcatataccattttttttttctttattgttattgttaaccagaaatttctaatttttggctcatagttttatgtccatggactagcatttgataatatatacttattgcgattccacaaacgtaaatcatctctctccatatatagcacttaagactcgacctcatatttggtagtactgttacaataccctctagcaagttgacagcaattttcaatttgccaataacttgtaaatcgtaaaaacttaacataaaaattgggatatagaattgactattgagagtagtggaagatatgagatatagaagagggaaacaaaaaaaaaacagagtggaaataggaagagtcgttatcgaagaaatggatccaagttggtaccatacctttaatctaaaggatgcatccgccatttctatcgacaccactcaccaaaccctacccaaatttatttttttcttaaaggtttttaaattatatattgttgactttattatgatgtgctttaaaaaaaaacaatattgtgattttgtaattgaccatgaatatgagaggttttggaatataacatataggtgaactactagccaattgttagtcggattactggtttaataagatgatcagaacaactaaacttgtaaacttccatcgattacaacaatcttgtgaggctaacttgaagtagttcaccattttggttggtgaacactatatatgtcaatttatgttctctaatatatattttcttgtttggttttctcaatatgtgttgtcgagtcgaaagtgattaattgatcgagctcaagatcttgctattaaggcgaagtaaagattgcaattcatattgctgtatcctaacaaatgtgatggtctcttatcgttctaacatctctctttcagatttatataaaaatatatatattgtctacaaaactcattcatccacatccaaaatttaaaatttggattattacacaaaagtagataaaccactagacaaataatatctagtcgaattaattaaattactcgtctaaattattagctttttagatatatatatctaaactaaggactaaagctagttagtgtaaatttgacttttttttgttctttgaaactatgtgtaatatctatttttttgtaaatgcaaagataatcgagtaatgaacatgaaaactactatattataaggaaaaaaatggtatttaaataaaaaaatatgaatagtgattgaagaaccgtacaggttatgtttgtgcagggagaggggtcgcgagtgcgtgggtcgggtacagaggatgagtcagtgagtcaggacctgtttccccctttgtagggacacttttaccatcctttaatgggcctattcttttcataggcccatttaaatcatatcagtcagtctttttcttgggcctcatctttgttttgtggttcttgcgatttgaactatctgatggtgactacaattggacgaccgcagaacaacccaaccgtatatgctgtcttttgtgggcaaatcttttttattgatatggattgtctcaaaataagtgatagaagtccgatataaagcataaaacaatctctcatgatcaaccattaaaagaaataaactagcaacaacccatgttcctcttactgacatacatacacatatagtcaaagatttatgcaataatttggactttattaaaaatatttacaaaccatatagacatatatatagtcatttttgatatcttggtttcaaaatctttctagatctttagttccaataaactttcaatttaaaagcggttttctaaaaatccgaagttggccaagtgatatattagtcctgtccaaactgacacaactcacgaatgtggtacgggttgaaaagccttaggccatgttcgtgaggtaaagatactcgcggtcgatcaactttggggaacgaattcgttcttggaacttttgttgattgattacgggcgtcatacgtgacgcccctgttcttttttatttttaggacggtttgggggtgttacaagagtggtaccaaaagacgacgaatatattgactcatatcttttatatcttagcatagtttgctttttcacttttaatgtgagaattctaacatgcacatttgagataatgaatcattttcactcatcgttttggatcgaacctcgttttgtttttggtttggtcataactttttaacttgaaaaccacttgagagtgagtcgactgatttatatactccttatattttactttatatcccatatttttttatgatgtaagattcttaacatagtcaagtactcataatgatctagtagttgaatgatttacgatgattcgaatcattctacttcgattgagggtgtacactaattagatcctattatatatgatataaactgatatatataagaattattatataatgcaaaaaatgatcataagacggacggtgtatatttattttgaatataatacaaaattatcatatgtccaactccagattcgtgtgcatgtctctacgtatctccggatacgatcatgctataagagtcaagacccctacacgatatgacaaaacgagtaggaaaaacgtgacaccaaaagatattaaaaagctgaaactaatatatagaaatgaaaatgagagatacatatcaacattatacaagaaagaaaatgaataaaataattgtaatgtaggactgaaaacctaaaaagaaaaagaaacatcaaaaggttgccaaaataaaaaagtaacatgaaaataaaacctgaccagaaatttccataaagcccaacctatttattttgcctacactctgagccccactcattagttgctcaactattttaattccttgtcataattgttatttaagaacctttataactttcactttcagggtatataatctctatggatttaaatggagaaaaccccagtgaccatagtttgatttaaggaagggaaagttataggaatggattatgaaatattataaattttgcatattaatgcaaaatatctatctttataaaacatacttttaaaaatatataatgttaagaaacaaaaggaggttaatattaagtgaagactctcactaaagtatacaaatgaagagatataaaaagcaggataaaaatagagtcaaaaagaaagaaaacaaaaacaagacatagcaatttgaatttaatatttggattccaaatccaagctcatgggtctattctactgttcacagtcacacacacactctctatctaagcttcttttgacttaagaccaaaatgaataaccccaaacctcaaacactcaaacataaacccaaaaaatctctctcacagagaaaaataaaacacacaattttaaccacaacacttgtctctctgctaacatacgcatcctctccggttcttgactaatgggcaccttccgtcgccgccgtcgctttcttttagctgcactcgtcacatttgctctcctccacctcttctccgcctcctccatagtctccgccggtaagaaaccaataacaatgtgattttttttttcttgcaactcaaacccgaaaatttcttgattttcttgatttcataataaaatttttggtttgagtaattaaaaacgcaatattttttgtagtccaatggttaaatgtacttgatgtgtaaatggtgagcgagttaactcagtagtggttaaattcatttaccagatggtagatggattggtcagagaaccgggtcggatttaccgggtgggttcataaggagtaataagcggtttggtggtccgggttcatcaccaccgacgtgtagatcgaagtgtgggaaatgtcagccgtgtaaaccggttcacgtaccaattcaacccggtttaagtatgccattggagtattaccctgaagcttggcggtgcaagtgtggcaacaagctcttcatgccctaaagtttgatcaattattaaacaattcagaagaagaaaaaaaatgttttaattctttttgttttgttttttgttcctcatttcttgtgcttctctgattaattattgtaatgaaaactatatgttaatattaaaaaattggtcatgtgaagaaattgaggactttgggaaaaggcaaatttttgaggggtgatagtaccgagaaagaaagagagcattcatcatttttaccctaatgacacttgcttcattgtagaaccaattgatattgcagatgtctaattcaggtagtgaatttctatcttttctttgttataacttgtaagaaaataaatatgtcatacacaaaacaaatcgtttttaatcagtaacatgaaatgacaaatgttttagacaggtataaatagtaaaatatcttactaatggtaaaatcattttactacatagaatttctgaaaataagttaaaacgttaaaaataggtttcactaaatagaatttctgcaaattagataagttataactaaaaaagaactataattagaaaacgttaaaaagaactctacaggattagtgatgtaatttgttatgttttaacacatcaataatatatatatactagtagaagtaattttttaaaacgtggaatgtaatgaatattttgaatggtaaactaccacaactacgtttttaaaatgtgaaaatgtatagaaatagttactttatataaatataagatgttttggttaaaagcacaaagtttaataaacttatatttttatattaaaaacatagttaaatatctaatcaaagagagtttggcaaatgataaaaatttctgcataatataaataatcacaaaatttcctgttgaaatgtcttttggatttttgtaaattaaacaatcttatggtgaattatttgacaaaatccgccaaaaacaattgtgagtgatggatatttgttttgtttccatttggtgttatcagtaaaatcagtgatttgccccttattttcaaacaaatcccacttaacaaaacaaatcctaagtactttgtttgtctggttatgcatgtttgtttggacccataggtttttgtccctcgacagctatgaagatttcattattgctctttgatgataatttattaatttttgtaaggtatcaatataaatcatgattaatatttatatcgtacttgcacgtgtaagtatgcagcaggaccatattataaaaaaatgaaacaaataataatattattatagaaaacgaatgtaaaaagtagtaaaagcatttatggtttggagtttttcccattttcactacaaagccgcatatgtactcgtgtcgtactgcatactctgttccttacatataagtttgcaatatctgaattaacttctctcgtttcttttatttttctccttatgagatgtaccaagttattctacttttgattttagtatttggaaaagtatctacttgtctcatatttatagcttgattttacaattttagctttttaaaatagagaggaaataaagaaccattgacctataaaagatacacaaataatttctttgtagatgcctaaaaagcgtactagttacaacaataattgtataagttggagaatgatggtttactctagacttatagagatgttatgatcatcattagaagctgacttacgttacgtatagaaagattatgaaacgtattaatttcagggtcgaacgggacaagactttggtcctatattcggagttcggacaagtcatggttataaatttgtgtagatgacataaatggtggagaattattttgattatgagctttgaaaatttggaaacacgtaaccatttactaacttctaaccactgtcctatcggtcgtgtagggccattgtactcgacccaaacgttgactaataataacaactgcatggtgtttatatcataacgaacatatttgtaagattttagtattttacaactttcactcctttttttgtgttttcgattttttatatactcttaatttaatatgatggtacgtaaggtacgttctacatgagatagttgatactccatcgacgaacgaaataacacaaaggagctattacacaaattcttaggttctttatgtttttcacatttaggaaaaaaaaaggataatattagtagataaccaaataaaacatacaaattaagaaattagcagagagaaaattttttgttacaaaataaccatggacccacgttgtcggaagaaaggaaataacaaagctacccttcatttgttgtaagatgaacagtaaacgaaacacatccgtgtaatttttaaaaatagcatgtaacattaaaatttcacatgttatatttagtttaaaaacatgctatttcaaaaaacgttatgaatttttaagaaaaaacattattatgaaatttttttacatgaacagaatcttaagaaaaaaaaattatatgtgattttaataaaaaccatatattactaaaaaataagaatatatttttaaagaaatcacgtgtgatcttaataaaaaacgtgtattactacaaaatatcatgataaaaagagatattaaactgaatagaatgttttttccaaaaaatatcatgtgctttttataaatactatgtaataagagaaaataacaagataaaaagaggataatatgttatcgcatgtatttcggaaaaataacatgttacaaaggacatttacgtaattacacgtgttctccaacatgtttccgacaagatattgtgactcaaggttagtttgtacattcttttcaaatctatagtcatttattataaatactcaaaaaaataaaacataaattatttacgcgttctcagtttgtatcaattttgaccggaaattggttatatggcatgcaaacagtccaaaagttaatgcaaaggtcgaagttagaaagatgaagcaaagagataaaaaggatagcttttcaagcagttatgtatcatttttttgataaaagacagctatacgtatctttgttgtcttctatactagtttagaaaaaatgatgctatacttttttttttgaatatttgaaacattacacttttgttatctctggtctgagccatactatttcatatattctacaacatctagtcgtttaaaagtggctaagcttaacttattatgtgaagtgcctaacactttcataaacatagattttaagcaattgatgtgtgattgggacgttatagtaaaccctattcaatacttattaagaaaatagaatgtctgcattttaacgtgaagaaaaagcaaataattagtgtgcttgtgcgaaactgtaaataatgtcaaaggggtcggagaaaaaagcaataatcaaaggagtttacagagatgagactgatgtgatgggtttggttgggttggtggtcgactgtacagacatagcttccacttttcctgtaaattattttcactctctctttttgttttgagaaaaactttgtttgtccattcgccgaggaaaatctagtatattgttcatactaaaaatgctttagttaaggcatacaaaatatgctttttggttccatagtataagatccataattaaaaatttcgctacacattagataggcagacgtacgtagcatttagtaaagaaatcaaagactaatcgattattaacttaataaaatcaaaaataaaattttgtgtagtcaataaaaaatataacaactatgaaatgcaccaattttctttgacacacttgaaaccacacaatatttttacatttttttaacttgaccaacaacaaacacaaattagtaaaatctaggatgctctttttactaagtcggattgtgattgaaaaaataattgttgttctctgaacatacaggttatgatccagatgaatgcttaatgaagtgacaaaagtctactgcatatatccatagccttaaactagatcccatgcacctacaaatattggatggtggtatctataatatattgttaatataaataaaaagtgaaaaaatcacggtaattttgatatcatattaaaatgagagcagtaattattgccaatactgtttttttttttgtgattctatttctgcgtggtctaacgagccaatatccagcaactaaactacaaagccaatatgggaatatgctagccataaaaggaatataaacgagaagcataatctaatttgcttgaggaatcataaaaataaggtactaatggtgataattaaacgatggattagaaaatgttgtcacttttaaaaatgaacagaaaatgagaagtgcattgtcaaatcgatcgcatcaaacgattctttttcatatagtttgagataaacatcagagaatagtccttgagtaggttcatagacaccgtcctacacttggaaacttcaattaattcttctctaccccacttttcttattttatcaatttcttattgcactcaaatgtattctttgtaagttgaaacttatctctcattatttgtataaaaacccaatgggctttagtctccaatattatagattcggccccctcgttctacaattgttggagtggttacgacttagttggttacacatagtcgatcatagttgtatacttgttagcagccaattgattttttattctttggttctcaataacatttgtgacatgtcattagcattgttagtgatttaataatgatcctatatataaatttaaactgaatcagtactaacctcgttgaagaattttcccggtttacgaataaccaagatatctataaatagttcaataaactttattcccatagagagtggtcccctgtctattaccatgcaaatttgagtttacgacaaataacctacacaaagtgaaaaaacctcatgcgtgaacgacacaccacactaccacagtcataaagaatcactaagtttatacgtcataatcactatagtcactctcttattgttccagtctcgtgaatagaaacgacggaacagtatagtcactctcttagttaagtttcctgagcaaagaaatcataacctcttccccttttcttcttcttcttcagtggtttctttgttttcaataacaatggcgaaatatgacattgaaagtggtggtggtatcgatctctatcccgagatgaaagagagtacgaagcttcgctggactttcatcagaaaagtttatgtcatcatgctgctcctttctatcctttttctcggagtagccgccgtttttctttcgtagatctcatcaccaatcccgaccatcccctcgacttcttttatgttgtattccggcttcggttccttcgttaagtctcctttcacatatttcgtttttaaaaaaaaaaaaaaatcagttgatccttcgatttcttgcttatttagaaattatagctatgctaattgggttatttagggtttatagctatgttaattttttcggcatcacattgcttatttagggcttttgggttactttatttgtgccaatgcgattcaccaaaaaagctcgagattttatcgatacaattagctacacttgtttttgttgatcttgtacaacgaatttaactgttctgttgattcatcgcttgaatgcttatatatttaatggtgtttgtggtgttgtggccactctttgcttttgagaagttccaaaggatcagtttgaacattaattgttaattaagaacaataaaagtgggttgttgtagtattaatgttcttgtcatgacagtggaggcactagaagaaacgattgaggaaactaactaaagaggatgcacgagaagatgagacagacatccgattagtctccaagctataaggacgtacatcttcctacacttggaaaactccaattaattctcctctaccccgcttttattattttgtcaatttcttcatccaatcaaatgtataaagctcatagttcctttgtaagtaactattctcacattgtttgaatatatacgttggagtctcccatggtttctaatgaacttcaattggcaccaatattatagattcggtcatcccgttctattgttgtttgagacggttggttggttggttaaacttacacatagtcgctcagttcacaaagcgtaattgttatgttacgctctatttctatgagataaattagccatatgaattttaaagcttaagagtaaaatgatgtatatatgattctacatttactcatgttagaattctaaacaagatttctcagtttaaatagtaaaaacttgatatggctcaaacacttgaagtgacagacacgttgcaaatttgggactacgttgtgaataaaacttctgactggaaacggtgtctttgattcgtcttaattgcgaccacaatgatataatctactagtagtcttataatattaaggaatatgagacggtttatcgactacattttttgtcataattttgtgatggttttgtcattactttgtgtgtagtcatttattagttgcaaaataatcataaaaccattacaaatatttgcgacaaaaaaaattcataaaatataatcccaaaatgcatgttttcttgtagtaaacatgttccttagagtggaatttcttcatatatttaaatatcttagttggcttggaataccctccaggcctccatcttgggtcatggtaacccatatagataatttttatttttcaaaacctaaatagtagtttaataaattcatagccttagctatatcttagtatgttgatgtaatttttattttcaggtccacaactgattatttgtttatctgttttctcaaataagtccacttcctatattaatcttagttaatctttatacaatgtatcttctttaaatatgctatcatgaaaatgacacagtttttggtcttttatcagtcagattccaaaacattttacaccatttcgatatcctacaaactcttctctcttgacttttgggttaagtacttgtcttgatccacatgtacaagttatttataaaaccaaaccttttgagattaaacaaagccttagtttagtaattaataaccaaaacccataagattggttaacgtttttgataaatgattctaacgcgttatctaaagaacaaactctatcagattatgaactgtttcactgtaggtctctcgtttaaagtaaattttcgattatacagtgagctttctaaaactcttaaaatcatacattaataacacttaatcaactcactagatcgtcatttgatatacattttatcctctcttttttttggttttagaaaaggaaaattaaagaaataattgtcatagatatcataattactgtatatccgctattttaaatatatagcatttcaatttacaaatttatttctataaatagtacaagaatagtaatagtctcctttccatttgcatatattttgagttacgacaaataaataagacaaaaattacgtacccgttaacaccacagttataaagcagccccagatagaacacgtgtcttaagatcattggtacgtctcgagatccaatatgacggtgcagtgactgtaaattaacccgtaactcacctcttgattcaacaaaaatgaaaaaccgatactttcccggcaatgtttggttacacagtcagtgtcacactcacacacccgcggaaaaacgccgtccactgaattccacgtgtcgaaacataattgggtagttagagtaaccacagtgacggaacagtaacaccagcattaccctttagtttccccgtcactttctttcttccgtagtttcctcagacaatcaaaaacctcttcttcttcttcagagctttgtttttttttgcgatttcaacaacaaaaatggcgaaatctgacattgaaactggtggtggtaacgagctgtatccgggaatgaaagagagctcggagcttcgttgggctttcataagaaaactttacagcattttgtctcttcagttgcttgtcaccgtcggagtctccgccgttgtttacttcgtccgtccgatccccgagttcatcaccgagactcaccgtggccttgccgtctttttcgtcatcctcctccttcctctcctccgttacgtctcctttcacatacttttgtttatccattcatttctaggttccatcatcgtcgcttagggttttgagttgctttatttgtgcggttcactaaaaaagcttgcgacttgatcgatatagtgttcactttagctactctagcttcgttgatgttgtgaaactataatgttccgttgattcatcgtttaaattctactgtgttgttaacgatttgatatatccacttagtttgtagagtgtttcactgagtgatctggatttgatgtgtgttgtagtgttgtggcctctgttggcttttgagaagaagcatccgataaactgcattgtcctgtccatcttcactctctccatttccttctctgtggggatttgctgctctctctcccaaggtatggatacagagatatatcacacttggttggcttgtggtgttgttaaaagacaaaccatttgtcatattttgccttggattgttctctgcttgaaataatcaaccaacactagtgttggtgtgatattgattagatagtactgttttcttaaccataaaagttgaaatttagtatcttgttggctttaacatggtgaatcatgaaaaagaggaacatggcatgagatgctttcatgcttttttgtcaagcaacttattaactctgtttcctataactagagttacaccatttggttagaatctaatttccaagtattgtgaaaacagggaggattgttctggaggctgcaattctcacagctgtgatggtctttggtctaacgatctacaccttctgggcagtgaagagaggacatgatttctccttccttggaccattcctctttggtgctctcctcattatccttgtcttcacccttttgcaggtactaactcagtaactctcaatctattcaaagttttgggatatattatcacaaagctaaacaatgaaatgaatgcagatattccaccctctggggaagctatcatcgatgatattcagcggaatagcttcaatagtgttctgcggatacatcatcttcgacaccaatcagctgatcaagaaactcaactacgacgaatatatcactgcagcgattcgtctatacctcgacgttatgaatctcttcctcagtctcctcggcattataagcaactgaacgttatgaatctcaatctcctatagtattctacttattccagacatagatttatcgaatattaagaacacatgtttatggcttgattaagttgttaacaataccaaaggtccaaaacattctacataagcaaacaatccttaatgatttatttgtctccttgtgagtttagaaatataggcagcttctttggtcaatcaatggatagatattacaacaataatgggacaaaaaagaagcatatttgatgttgttcccaataaaatattgaaattggacccatcaattttaaaattaaaacatactatatatctattacttcaactttgtttttttatacaaaaagaccaccaacaaccaaaaaaaaactaagaacatagatattacagatcacccccactaagttttgtttacccaaatgcttcctcaccttgactggtaggtccattttatcctatacccaacccaaaaaaccattaccttaaaagaacccctactaatgaaatttgaccacataagttaaaaaaaaactcacacttaaaccaagcagccattgaacgtttattcacatcctaaacttcctctcagcagcaagaacaagaagccttgagacaccttgtgtccacatttcatattccctttggctcttgacctcgaattcaacatcacctcgcataaccgtcttcaaaccgaagtatcttagatcatctcctccctctagcaaatgtcgtccaggccaggccgggacattcttgatcacatcaagcacaatgtctgtaacaaaattggaaagatagtaaaataattaatagaagagtcttcttcaagttcacattcaaaagcaagacaaaaagtaaaagattgaagggatttgatcctatagttactttagtcacatatacacttttgctttttcaattttttttccttttctcgtctcaaatccccatatctaaagcagacccacctcaaagttttgaattctctttaccaggttcacatataattgactcattgacagtagatagtgacaaaaagtaaagctttcaatatcaaactaaagaaacattctttgtttttaaacccattagaagaatcatctgaaatgtcttggaaggaattagagaaatctccaaccaaactattcagggtttaaagtggtgttatacttatagtatgtaaaaagagtaaataatcacttactctttttcttcttggtgaaggttcctccaacatgcctgctcttcatcttcaacataacctataagttcaataaatcaaaacaaattagtgattctgtaagagatgcttaagcagcaaagacaaaagtggatcccatgatttcagtatcatcatcattatcaaaacagtgctttttatttttaagctttagtattgtttctactttctcttcttttcctgccgtttgaaatttctcttttctcatctttttgtgtgtttcatataacaaagttaacatccatgtgaagtaactaaagattcccactgattcacaaataatttggctctctttaatctttttcatcagatcaacaacgatcatttcctaaagtgaaacgaaactcgaggcacaataagaaaaagaatctttacctgattcattttgttgatgtaaacagatactatcttccagtggagatcacctgcaaaagtcacacatcattagacaaaagattcaacaactaaaatttaaacttttaaatacacaagtttgaatttttcttacctttgcgagtgcgtttgaggagttcacaacctctagcgagccattctctactacaagttcccaagaaattctcctgttgtacaagttcaccactgtgactactgcttgagcttccattgctaccattaacattattgctgcttcctcctgtagaagtgagtcctttatccattggtatcactgatgctatgttccacacttccttcattgcccttgccttcaatgtttgcactcctcttaaagctacacaccaaaaatacaaatcaaattaccaaaaattaacttctgattccttcataaagttccaattttgagccaatccctaaatcaatgctatcattatcttcaacaaaatcaaaactttagcaattctcattacagggtcaagaagtattaaacatgtttcaacctaaagtcaatcaattttagcgttttcttttgaaagttccaaactttatcaaaactctgtactaaacaaacctgtagctgctccggcggtgagagtcataatatctccggcagaacgaacattgacggcggagctaacaacagaagccaaatactctctctcagctcccataacttcagcagcttccacacactgagcagccacaagggtcgcagcagaagcaacggccatgtcagttttagccatctgctcatccttaccacagctagaagacgcagcggtggctgctgcaatagcagcaacagctgcagcaacgccggcgacagagacagcagcgtgaatctgagcgttatgagcccgagtctcctctttctttttctctctccggtccttaagccaccgtcccaccgtcttggactgtgtagctgtagcggttataggtcccggagttgccgccgttgaacggaactgagaatttacactgttcaatgaatttttgttcgctctgcaaaattgctgcattttaagattaaaaatttgagttttagtatcagagattcgccagaacccagaagagtgaagcaaaatctaaaaaaggaaatgtttttggaagaagagtgatgaacaagaaaaagacaaaaccaaatcaagtaaaggagattgctttagaccaaagtgtcactaaataatacttatttaattaagaaaaccaacaattcgttaatgggtttaaggaataattataaaattgaattgaaatgatgaagaatcatcggaaacagtagtgggagaaagacatgatctctgggtatggttggataaagagaaagcttctagtgaagattctttttttattttcacagtctctcattgtacccaaaattgtcagtgacgcagtaaaaattgaaacatttacatagagagtaacaccaaaactcagaaacccagaacatgctttagtatcaaaactaaatacagttttggtcaagaaattggaaccttaatgtcgtcggattcgggaggagacacaggaggactgtcggtcaaagaaccattaagtggaccactactgtgagatagccgaccagatgttcttggtgatacttcttgctgcaaacaaaattattaaagaagatgagacaaaagtagaatcaagaagaagagatgatgacaaatccataaacttgttattatgtttttagggacccagaaagcgagtgtgtagataaaaatcgtaactttttttcttgattaatagttataattattgcgcgtgaaaattttctcttcattaatcacacttaataaagagagattcatgaacataatttgctaaaaattaaaactttgattgaccatatttgggaaattctgatgaaagaaacaaaataaaatttgtcaacatcgaaagtaaaaaaaaaaagaatgctttgttttgtccggaaatgctctgtttttatctgaagaaaagacttacagagtgagacaagatacgatccatgaccatttgagaagtttctgaacaagcgaaggagaatgggtttccggtgacaagtccggtgtcttccgtgtcgccgtcgccgtctacgacagaggagatgggttcttcttcttcttcttcttcggttttggagaggagaatctgagggttgggtggtgttagagccttggagacttcgagagcagagacgctccatgaacgagctaaaaactccatcggttcgagtggtgtttccggtggacggtaaaccgggtcgggtctccatgtcggaaccatgagtttttccattttgaaagaaagagagagtgaagagagagagagatatagagagagatatatagagagagagatatagagagagagttttgatggaagtgaaaggttgtcaatggggatgcgatttatagaatgacaagtgacaacgaagctgttcttttcatcactctctctgctttttcagctcttccgttttttcttgctttttccctactactctctttctctctctctaaatgaaaaataagctaaaattttgtgaaaaaataattaaaaatgaagctttttttttatttttgtaaattttccaaatatacggatattttctgaaattggccatcaatatttttttaggttaaacgagtaattaaaaaaaaaaaaaatacacaattcacttttttgtgtgaattgatattccagaaggaattggagaacatttcaagatttattatttgaacgatttagttatattaaagaaaatatctttacttaaaagacaaaattttatgttgtaaagtttaacgttgttcttttttggcaacttgttgtattctttttggaatacaggatataagtagaaaataatcaataaaaatatggttttttgtgaaatgttaatctcacatcaacaaaaaagttgcttacgtggtaaatatatagaatctcactcatcttttggataaaataaaaagttgaaatagagtttggaactaattactcgtagagcagctcaacaatttattaatggaagaagaaatgaaggcaaacaaaatctacttacagaccatttctgcattgttctaatatttttgccacgtttcatttgaagaactgttgatgtttcttgaaatcgaatggaggacagttctatactgttcgagtttataatcgaatgatagaaaaaaaataattggcatgcgttgcaatgacaacgatgattcatagataataaattaattacccgaaatatatggggacaaatgaaagagacttattaatagatatgctaaaaatttaattgaattcgataagtgtttttgagtttttttttgttagtatagaggacataaatgagaagagagacctctcaccatctcgtatctttcatgagtaaacctacgaaaagcatggaagataaagcctctcgtcggtcgatcttcatctatcaactaactacttgaagtatatttaatattcgatggattgatatttttctatgactttgattttgtttccagggttcgtcactctttatagttcttttaaataggaacaaaatggtttgaccccaaaaacaatacggtcaaaacatcgtatattatgtagttgtagccgataaagaaactcgtatattgaaaattaaaaatacgtattttaattacccaaatagaaacaatcaaacagctgttgaaaaattacaaaaaaaaaactaagagtaaactaagttagacttgaagttcttctaattgagtaaattacaagtaaaaaaaaaaacatttgtaaagcaaaagaagtacgtcgtacgtgttggactggaactaaactacactgcactgcaactaatttgtacgttagattagaatctcaaaaatgtgatcttctttcttctctacttgcatgcacaaatactgtatgcttccgtacattcagtttcacaatagtcttgtcaaatgcatcttcgcttccctgtctaaatatgatcactttacatagtttattttgaaacaatcgcaaaaaacaaatagcttttccaaacagtgctgctgtaactgagatattgtgaattatacgtggtgatgtttaacagtatatgtggtacaattttggattataagttggtgaagaagattcctttatttttgtgggtttaggttagagattgagtttgcacaaaaaaaaaaaaaaaaaaggttagagattgagttcttttatagtataaggatctccaccattgttaatacattaatgacactcaatgttatacagattccgagaattatatttgattttcgacgtgaaacttctatatcctttttgtatgttttgttttagatgtgaaactttctgaatattaaaaaaatcaataaaacacatcttgatatcataataagaatatttttctgaaatacataggattcttagaaatacaaaaatttgatttcgtaaataatgagcaatgtaaaactgtttcaaatgaatgatcgcctcaggagaatatggtccccaatcttgatatgtaacagacacaccactcagcagttagtagcaggactattctcatttcatgcgtttggaattgtggttattatgttttctgatttcaactactttgtttagtactactattcttttttctttgtctcagatattatagtttatattcagatatatcatcatacatccattcattgcatatttcttaatgaagatatttttagattttgttttgattagtttcaacactaatgactctctatctctctcctaaaccttattaattaaatctttggagagattagaaaaagtggttccgaggaatccatgggaaatgtagctgaacttcatgatttctcatggtccctcttaatgacactaccattgtccattttacaagtgctttcccttcctttttctgtttaagtattttcacattatcaacaaaaaattcacaatcagcttatctaatcagaatttcaaaagaaacattatttataacagaaagaaaaaaggtaatgttttctaatagtctagaataatatgtatatacacaatccgcaatgatatctccgtgacacatatatagaaacgtttgatatgaatttaatagatgtgacattaaatacaagagacccattgggcataagagaatgatagagagaaattaattttatttgtggttatgcggatgggtggatgtgttgggactccacaataatctttatcttcatcattaaagtttgacactattcctacctattttatatgcccacagtccaatccccgattttaatcgttttgactaaatcccttagatgtatacttgccttagattttttatttctcttcttaaaacattatatttgatctgtttatcatctttagatgctagtgtgtttatggagaacatgtagccatttttgtatgtatcatgatgatttttcataacaaatagtatatgattagctttccaattcttgttatttgtattcaatgatattttgggaatatagtaagtagtttacaaatctagaatatagaagtgttaataaaaatgatttgaattcacaatctcgtcgaatgtacgacacatatggctcatagatataagtgatcaatctatctccttcaaaatttgatgaccattttaccaaacccggtgaatattaaagtattttacacttttttttttttttgctcatccgattttaacattatacacttcataaaacagaatttgtgaccaactctaatctaaaaagactaataagtgactaaccatacactgatacacatcagtcatcacataaacaaccacgtatcaactactctatctctctattgtcttttccttacactcaaatctcattgtaaaaaaataataataataataataatctcattctttactgtataatttaagcgtcgagaaggttaccaaaagactccatgcacatatgtgaactctataaccacgggaatgttttttgtgtgcatatatatatatatatatatatatatatatatatatatatatatacttccaatgatcatgtataacaaacagaatgttttttgttatatatataagaaataacaaatttacattattttagacatagaatatttatcatttttataaacagaatataaacctgatttgttttttatctaatctacttaattaaaaaatatttgtgtgaggatgagagacttggttgcttctattgtgtcgggatgtttttcctattggttggtctgtttctttggctaattttttggaagtttagaggaggtatgatcctttgctcttttctgattacatcttgactagtttcaagattgttttgtatttgactcttaatctttctaatatataagtctcagacggaaaaacagaaaagaaattcatgatacggcaataatgacgtttaacgccactgaagtaaagaaaggaaaaggccaagagattccctctttggtcttcaccaacacaaacgcattgtacaatagggccaacggaaaattaaattaaataaccgtctgcatattttttttgagttacgaaaaaatcaatcgttttaaaatgacatcagtatcttattgttacatatgcaggtccgtactaaatatttggagaggtctaaaccattgtgagtaaatagggaatttagatattttaataattgtaaacatcaatacattgagaaatttatttttatttttttgaatttaatgttaaattatattcaaaaaaaataaactgtttatacatagaaatgcaaactttttaaaaaaaagaaaaatagatcaaatgtgtattctatctatctttgattttgagcttgccttgaagcaaaccacacttggattccttttgggtacttctcttcacctctcacccttagtgtgcttaatcgatttcttatgtttttgtcgattagcctgattatcttctgcgtcctcgacggcgtctctccatgtcttctctcatttctctctctccatatagaatgtatcgtgttttgaaacacataccgaaacacaaaccttgtagtggcgtcaagatctttactcactaactccttcacgatatctagccatttgtccgtatatttgctagctagtagtcttgagacagtatatttattttatacgtaaacggatttacacttagaaaattcaagacacataaggaagtaagaaccaaatcataaaaaattgcatgcactagcggtttaacaaattttagtattttagtcttcgagtttaaattgacatattatgatttgaacatcaaaaagttttcgaaattcctttaacaaaaaaaagctttttggaaacactacaatagtatcttaagtgaccagatttttttgcggtattatgatcccaacaatctaaaacaaagcaaccgcaagaaacaactactccttgagtccttctcttctttgttgtggatccatttagtatattcgttgagtaaccaaacaacaacaaatttttttttttttttttttttaacattgattgttgtttgaaattttacggaatattgtttatacacctaaatattcatacggaattttacgcaaataaagcattaatattgctggctacttgtaagtatccttgccgagaaaggttagacatatgtactatatggtaaccttgcatccactgtaaaaacttattgtagtcactttcatttttgggttttagactttagacacacaagtagtatcgctactgaataatgataatgaatttattgtttgggccgcgtaatatggcccatataaattaattggactaagaaaaacctaaaagtaaatggcagccgccggaggtaaccttaattctctgagatgagtgtcttttgtgtatttatatggtttcgcgttctgcaaatcgtaggagcttcttctctattaatgtctgaatgatataattcgtgatcttagggttaggtccgtgactattttcgtttgtgatatttagggtttttgtgagagagatttgtgatgtcttagttttatgggatgtggaaggggttgaatatggtgatgatacaagagtattgtggactagagtttcagatctgggattcttctcccagaagttgaagattaacccttggctgtctgagtattaattcccctttcactcaatatcttatcttttgattgatttgaagataaatttctctgttattgttttttttgttggttgatgtttttttttacttatgagctgatgatgaaaaaaaacaattatcttagcggatttcagtgaggtttttgaatcaatgaactgaatttgttacacacactgaagcttatttgttctttcaatgttttttgttttgttttgttggattactgttatgggtttgatgatgatgatgcaatgatgagataaaagcacgaagagtgtgagaagagcagtgggtttaccgtgagctctcctttaaaacgacttctccttccactgagcattttttatcaaaaattttgccctattgaagaaagagttttagtgttttttgtttttgtattggcgtccattaccaattctgagggataaaaacagttccttcaggtataatggcttgtgacgctatattggttgtggtatatcctgatctttttgcttttttccatgccttttgatcctggaaatgcctcgcacattatatcaattggttttacttttatctgatgctggtaattactttattctaatgacaaccaactatgctacatacatgcatctctttctgtcaaaattgttacattgttcatttatattatatgatagtgttatctcggtgggcagagggaagttggttgcgttagcttctctagtatatccgtttcacagtttttcctctgttgaattcttgcactagctttcatatgggccatattaagttacatgtgggtgggtgccgtaacagtgcagcaaccattctgctagcttgtgcaagagtttaaaagtggtgaaacttttatttggataatcgaattggttgaggagtctaacaagtgatagtagctaaagaggctagagggacgctagaaaaagaacaaaccatgagcgtatgaaattactttaaaacaataccccatgccccatgaactattattcttcttcctctcttgtagatgaggcattcggtatcttcctctactttatcttcttcagtgtccttcactactacaacttctccaagcttccttccaaattatgctatctatttcacattacggggcttccgattcaactaattttaaacacagaatccaaagcctgcttgacaacaaaatgcacatctagaggaaatcagattcaccaaattctaaaaattagaaatctcaacttgcctttattttaagcttctcacatcccaccattttcatccaaagcctgctagacaaccaaatgcacatctaatcagagataaaggaaaacttgagggatacgtatatttggaagcaatatgatcctgacatacattatgtgtatggtcctcactcttgagatgcgtgttgaaatcttcaaagctttggccagcaaaatcgcacattgagcagcacgaccagggagactcacccgtttcacttcacttgtcctgaagaacaagtcttgttgtcaactttttatcccctgcagaccctgaatccatatcatctgttgaaaaaacaaactagttcagaaacagctttgctggctatttcaaagctgcgtgagagagagagggtaaggaaaaacacctgctagtaactagtaagcttttccagagccattcttattaaaccccagacataaagtttttccagagccagtctggagctggatggcgttgaggatatgccagaagaattgtgtatccatcaatattaggccataaagagtacgagctaagctttccattcacgaccagatatgagcattatattagccggaggtggattcctctccacccactcaaacaaatccgtttgaagttctgtttcagtaaagaacttgaccagaagaggcagagattgacgagagagaccatattgggtcatattcatggattttggggactgcatttctttgagagctttagagtgtcataaccttttagttggtcgaaggttttgcagtttgtctttctaacaattttagaagaaaaatattttgaaacatgtaaaacctcttttttgaaatgtgttattctatctctaatcttgaaactgtgaggttttgtgatatacagtataacctctataaattaatactatataaattaataatttttataaattaataaattcttacggtccccagttgggaccagtgtaaaaaatgacataaatcgataaattaataagataatattttttttgaaagtcctatgtaaatctatggtcccatcaatatcataaattaataattatataaatatatcaactatatatatatatatattatatgtaaaaaaaaaattataatatatttataatatttttttgcttaaattcatatttattctttgtttgactatagttttcatattttactgtatcaaaacttttggtgttgttatctaaacaatattattatgttttactttaactggttctagaaagatattttctataatgaaagaaatcttatagaaatttttaaaaagttaccaatttagaaaaatctctctagaaattgataaatattaatttatcgataaattaatacctctctaaattaataaaattttgtagtcccaacattattaatttatagaggttttactgtagcttgaattttaactttctaatttatttatagaaattcatgaaagttcatttttttgatatagcttttaataacaccaaaatttaatgaaatattttcaaattttataataatgtataacttaaagtcatctatgtatttctatgaacaaaaaatgtaaaacagaaagcaaagaaataccaagtagtacaatataccaccataataacatctaaagtaaatatgtttgtacacaaaaatttgataccaaaagtaagagagatcaaatgaagagtatcctccatggcgctaaagagacacataatgttatccaccacaacgatgatcctcttagatttaatcctgctcaatttaagacaaaactcaaaatcttcaataagtaatatctttattaaagagaaactatcttgttttaacgagtcaaaccttgattcttgctgctatcaggcagagcaggtggagaagacgatgatgagtttgacaaaggaatcccaagattcaaacagtccattccaagtgcacctatcaaacacaaacaatctcaatttttgagtcttggtttttcttcaattgacaatacataaaaaatgttctgcttacattgcttcaagcaaggaaatgtggttatgttcatgagattgctgtaaccttcacggcaattgcagctgtattgaaacggcattgaactgttgcaaagccctcctccacagtccatccattgacaagctatagtaaaaaacacacacaaggaggaagcaaatgagattagaggcccaacgtttgtagctctacaagtttactaggagaccttgtaaaggaaatgtgtctcaaggtctcaagttctagtctcatcctggggaagaggctaatattaacatgctctgatcttcgacccacggggactatatgcctagggccggaaaagcataaaaagaatgagattagagatttacggtcgaaaaatgaagtaatgttgtctttgggaggcggtttgggttgtgctggagaagctgcttcaccacatgttagatcaaaggtacctaataagatgcagtgaatactttgttatgttctctataatgatcaaaccaatctaaccagtgatcaagggagagatattacagttgggggtgatgcaagggagaaacttgaggtgttgatcaaactgcttccaaccgtcttcacactcacattcatacataaaagttgtgtttgaaggtgctttgcatttccctttcccacattccacttccttgcatatattatctgtgttttttttccccacaataattgtatcaaccaactttaaatcattaacaaaaaaatacttgatgagtcacaatctactaaattggaaatttgagaaggacccttcaaagaagatcactttttactcaaaaaccaactcataaagatactttaattctgtcacgaaaaaaaagtatgtcctcttattacatctctagttcaaatttcggcgggagtttaaccctaatcttgacataatcaagttacatgtctattcttggacacataatcaagttttgttcttcctaaataaagtttagtatttaaacagattatccttgtttatttttgctaatgagataatcattgtttcaaagaagttaaatacatcaatgaaaaactagaggaacttaacttcaattaacaataaatcaagatttggattaaacgatcccaccaatatcaaatatgagaaaaacaattcaggaaaaagtgaggaagaggaagggacataccatacacaggagcgaaaagaggagaaaggaaatcggaagtagctgtcttctggttgatcagaagtaaagcagcaacaagacagagtgtgttcctaagacgagccatgattctgtcttcttctcccttaatttgaagtacacagaaaacaattaatttgaaataacaaaataagaagacgaaagattcttggacttttgttatataaattagttgaggatttggtaagtgtgtaaggtggatacggatgtcaatagtgatgtggactgaccgacttggctacagattttcttgagttagttattagttgattgctgagatccaattaatgcgtttaattttcatttctttgttttttttatatatttagggtcaacatattcaataaattagtcttgaaaataatcatatcatattggagcaaataaaaaagagaagaataataatcattcatatcatatttttttgttgcacttgcacaatattgacattgatattaagttctatcatatataatataattattgtgtttattacgaacaaaacaagttttatggatgaatctgacaaaaaaaacggcagaaagctaataaattatgatcaataaattagtgttgaaattaataattcaaacctgtttctttttgttctaaaaatgccactgatataaagttttctcaaataaacagggttattgaattgaaaattcatactatgattactattaatcagattctaaataatttatatgaaacaattctacataagaaaatagagaaatcctttatactagaattctaggaataaaaaatcttaaaactctatactaaatcagattaatagattaattagtcatagacatataattctatttttaacataatatgtttttacttcattgtagccatgtgatacttaaaaagtagaaagtaataagtgtttaaaaagttctgttgaattccatacctaaaaaaaattctaagaagttgcatttatagtttaaaagtatttatgtcaaacatgctcatctagtttataggacacggtatgccttctattttatccgatagaatggcaaaaagtcaagtcaccggcccatcgaacacgcttatgtaataaagatcacgacttcagaactctcacgttgagcagtcgccattctaaagcaaaacagtgtttctattttattttttattttttattaaagagaaacaaatacaaggtcaagcaaactgaaagaggcacatataccccaaaaaaacgcatatgccaaacaacaacaaaaaaaaaaaaccaaaactataaaaaaatcttaaacgctcaagaagtccggacacaaaaggagaagagaccccttaatctaagaaaattaaccaagcggagagtagagaaaaccatggaggagcgatacgttgctttttagcaagatgatcaagacgcgcccacattaacgacttgatgtctttgatgattgacgtggggtcttgaaattcgtagtgcagatacgagagttacatttcttccaaaggagatagaccgctgcctgaaacacaattattatgatcaaatcaagatttggatccctagtagccgagtagacccagtgaaaacaagccataaaatggtttgggggtaaccaagtgtcgttagctcaattggtaaagatcctagacaaagtttagagattgctggttcgagtgacgcttaggacgaaactaatattactggctgtagtttcgggtctgggagattatgagtttcggtccagaacttcctgttattcaaaaaaaaaaaagttcaaacaacataacaggtaataaaaaacaagtactctcttaactcattagaaccgttgcaacgaacacaagagggagagataaaatgtccctcgatcctaagtctatcacggttcacgggggatgatggtccgacttccacaaatagatgtcatcatccaaaggattcaactcccataaattcctattcccattgtttctgttaccagtgtttctattttataaaagaggattaaaatcacggcacaaattcaaccttaagcattaaaattgaagtacaaactcaaaagacttcccctaagctttccaattaaaacccgaaaacgcaataagaacaccaatatgattggagatccccaaatgaaatatgtcgtaatagcttgatggtattgagtagcaaagagaagtatttatatacaatgagtttcctatattacgacaagactgtatctaagtaaatctagttaaataaaagattgacatatacatatctagtttaatatctaaaagggacaaaaacaaaactcaaacgaccttgctatatttccgcatacaatcaattatttgtgtcgtctacccattcatcgcatataaaatccaaacattgggcatatacatatcaatttcagtggtttctaaccaaacaaatatattctcgatttcattttgtagttcgtgttcagtcctactcatacatcacagattggttttgctgactttggtaatgggccttatatctattagggcattgggcttcattccttaacgcttacttcgcaattaataaactaatatacactacttataacactgatcacgtccagttattttagccgccagaactcagaagacatgcaaaagatctaaatgcagcagaaataaaagattcgaaaatagtgtctacgtcagtcaatcaaataatgttgaaacattgagacaaatttcaatattggattggcaaaaagaaccagaaatagaagtagaagaagctaaattttgtaagcagaaagtggcgacatgatccgagaaccgagagtttcgtgtttcgatatgttaacagatttcatttataaaccatggtaactctataattttgacagctcatccactttagtaaacatttaatacgtaggaattaagtggttatgtggtccatgcatatgtctcgatactaacacgtaaatggaaatatggtttcattcgtacctatgtttctgtatccacatacgagtatatttacttatgtttttttttagttttaaaattattaatggagtatatgtctaatatatctgaccgaaactaatgtcaacttgtttaactaaaaacccttacatttttcttctatttcttcttcttttttgtactacgataaaaaaaaatcataaaatatgtaattatagctttataactttactcagttgcaaaatagataagagttaaattgaagtaagaaaaaaaagtcatgaccaataatgcactaattactaaagcacaagaagaagaaaaatcatcaaaatcatcttttatagaaaaacaaagaacttttattgttttcgaccaattaaacggtgcgagtgaaatatcattatttgattagtccattgtcgtattctctagcaactccacctctagtttacttcctcaagaaagagtcatatcatacgttaagtctatatcggcaaatcttgaccaaaagaatatatcaaatagaataaaatatattgagatcgaaaggaatagactcttattccaaagattagaaatcagaatgaaaatggatcggcaaacggcgccgtatttgttgccggccgccgggaataaacaagaaaagtaatggcaacaaacatcaaagtaatggtttggatagatcgatgaaaccataattgaggacgctagtcaacgtattgtagtaacatgccatgtgattgccagcttcatgcacagacaccgacatgtattatcatgctactattcatatattaatatcaatatattagtcttatgtaggaattttttagttaactattaatgcacgataattaaggagtgatgatgacaaatcctcatgcatatatagttggaacaaagttccaattcatgcactaaccactagttaatcgtcaatgacagagcgagaggcagcaataatcttctctgatgattggcttccagattcaacaacttaattatatcaatgttttttttgggtgcaatttgatttatatatatactagttatttagcatctcaagacattcttatcatatttaagttgataacttgatattgtaatcagaatcatcaaatattgacattgtacgatgcatgcatttcattagatccacactgtctgatccgcttcttccatttggagtttttgtatactaatccctgatactaatataactatttaattcattttttgtttgtttaagatatcattttttacgagatttgagtgagacattgcattggttgaactaattcaccacaaaaacctaattcattacatacggaccatttctgattgttttaaacttaatttcaactaactcttatttattgtggtacctaaatttcctatataataataagcacatttaagaaaatttgtcgatctcaagtttcaacaactgtctattaaacccaaattgtctagaagcagcatccatcttctcaagctaaacaattgaatttagacctatcatatatgcatcatatctaattatcatttatggatctatgggaaacaaataagcaagaaatattgtggtatagggtctaattactatcaaaacgtgtcctacattttgagggggtcctccgaccaagaaaataaatactttggaattaatctttaatgctgtgaagacataaaagataagtataccaattttattagcaagcgtcacttactgaaaaacaatccctataagatttctatttctgcacaaaagaagaaaaaacatgaaaggttatatagtacttatatatccatcgaatttatacgcccacaaatgactaatgcctgattcacatgcaggcaattcaaaactagctcaattttcttctgttaaccagctctgattactcattttatctaatagtgttggattatatatagggataaaatgtgatgtatagatatctcttgaatagtctcattcgactgaccacaaactaaactactaacatcattttctcatacatttcagcgtgggccaataaagccaacgtgtttttattattccaaatgttgacataagatataatctattatatggtaatggtaatatgtgtctcattctcatgctaaaatccatgaacgcagaacgtctctcatcataaaatactagaagttaatgataaattatgtcacacggattctgcatgttcttatacccttttttcacatggctcacccatcacaaatctcactatctaatgacttattcacccctttctaagtccatgtccaagtccaaaactctaggtgtctatttcttttggatgagcagtgatgtatcaatatctcattatgttacgtagctatcttagctaggttcatcacatacgccgtcctacatatattaagtgttgaatagaaagttaattccatctatctcaattatcaaccaacgtaactatcgtatttagatatcaatcacacacacacacacacacacacaaaagtttatgtgattaattaggagtaggattcggagctacatttaaatgcaagttcaaactctacaatatcgataacaatattaactcaattgtttaattagtctacttatcttttattgagtaaactcgaaggatatgtatgagttgcataagagggtattctagtactttgtgatatccaacgaataaggcaaggaatctaatctgagctaatcataattattgagattgtgtgtagttggccttcgagtggataaatcgtggctatggagcttccgttctgcttcttcttctcccaaattattaagtcatcctccaaatcatatttcactaaacttgcaaaaaatataaaaaagtatatatcttcataattaatgaatggtaattaacctactaaattttcattgatttatgtataatggttatgtgtttttatattacatatatagtttactagagtttaaacattccaacataattccactaaaactcaaccaaaaagggggtacaaaaaaagagaaaaaaaaaattaaatgttattgagtgatgggtagttaaagaacttatggtgttaggctgtccaaaaagagaagcagttaaagagtttggagtacaatgtcttaaacaagaaaatgtctgtcccattataacatctcgaaaccaaacacacacacacacacatataacaatctcttcttctctgacattacacaatggtggtttgagtttacagaagataataatggggaaaactagcaaatggtttcgaagtctcttaaccggaaagaaagagagaacaaaggaacatatcattcaaagcgagtgtgtattcacttcttccattccaggcactcctaaggagaaacgtcgatggagttttcgacgttcttcagcaactggaccaccgccaccagcttgtgctattacactgaaagattcaccaccaccgccgccaccaccacctccacctccaccgctacaacaaccatttgtggtcgaaatcgtggacaatgaagatgaacaaatcaagaacgtttcagctgaagagattgaagaatttgcagcaataaagattcaagcgtgctatcgttctcatttggtaaatgtttacaaaaattccaagtaacgaatccattttttttctattttttctatttttttgcttcaattagtctaacaaaagaaatcaaaattttataaattttgtggtaggcgaggaaagcattaagagcattaaaagggttagtgaaattacaagcactagtgagaggtcatttagtaaggaaacaagcaacagctacacttagatgtatgcaagcattaataacacttcaagccaaagctcgagaacagaggattcgtatgatcggaggagattcaacaaatccaagaacatcgattcacaaaaccaggatcaataacttttaccacgtaatggatctacaaaacccatatctcaaaatccaaacttgacaatgactcctcaatttgacctaacttttaaaatcctctgttttttggcaggagaatgaagaaaacatcaagattgtggaaatggacattcaatcgaaaatgtactctccggctccttcggctttaaccgagatgagtcctcgcgcgtatagtagccatttcgaggattgtaactcattcaacacagctcaaagtagtccacaatgtttcagcagattcaaagagtattacaatggagatactttgtcttcttatgattaccctctcttccctaattacatggctaatactcagtcttctaaagccaaggctcggtctcaaagtgcgccgaagcagagacctcctgagatctatgagaagcagatgagtgggaggagaagatcttcgatggaagcaccgaggaataacggtgtcccgagagctgtaaggatgcagagatcttcatctcaactagggtcaaacacagccaaggaaagtcaacaacatcatcatcatcagtactatccgtggatggcgataaagctcgatagatctaatatttcgcttatggagagcgaatgcggatctacaagtaccgttatgactaataccaactacggtagacatgttgatgtgagtccggaaagattacttgtttcacaagaaaatatgaattttgagattagcacttatatttcttgactttgtattattgcaggttcagggaaacaacaacatgtactgaacactgtgctttagaatttgagagattgctggaaaaataggcaagcctaaaaaacgaagaggacaggtttataggagttttttttatgatgatggagatttaacaatctctatatgtaaagcaaaaaatgtagtagactgtagaagtgactcatctcgtcttaaattttgatttttcctttttaattatcattcgaattaacgttaacagtatttgtcaaattcatggatgttactatgttcaaaatccataatttgtatattgattcgattacattagtcatcagcaaactgaattacaatcaaacaggacaggaaaaaaaattgaaatttacttggcgattatattacaaaataaactagttatcaaagtaccttggaatgactctaatcaaattttaatttggttttgaagacaaaaattcggtacagctctggtttggtatggtcagaccgaaacgaacactcattaatgaagttaaagttggacagttccagtgggtatagcccaataagcgtgataggcccataaactgttcatatcataaagcccacgtaattctttttttattttttttaagttacggtatgaaaagtttcttcagctcaataatataacttctcccctgcttcttgttttcttttctttttcttgtatccatacaaacgcagaagagtgacattcgcgttgcgtatatgaaacacacgtttgttattggggactctactcgccttaatttttggattagaagtaattgaatgatatcttacaccattggtaagcatcaccttcgtaaataatgtaaccatatttcataccgaaaagttaataatgcaaccatatcgatttatttcacctaatgctatgatacacattgttttaaacatggattgattataccatcctcacaattgtacatttttgtcaaattatagttcagtgttgttataatattcaccgggatgagaaggacacaataatgccacccttataacaacgacatttctccatacctaacattgacaattcacttactatatggcaaaatgaatatgatatgaagaccctacactttatcttacatatacgtccaaattggctacatttgtccatgaatataataaaatacacaaacacaaatcttctgagaaacatgtattgcttggtaattaccattatattatcacacgatggaatcaaattttacaaagaaaaaaaatcttttatcatttttggcttttgatgaggactttacagattaattgagtttctattgttagcttcattagtgaccaaaacaagacaggttataaacttgttctcacatataactctttttgtgacatcccacctttttttatgtctcttctactcacatttttttctgtggagatcttgatgacccctcttcttgatcattatccattttttagatcttgaacgtacacttattgatgtttgttggtggaaatgtggcttgcgtgcaaaacaaaaagaaaaatatttgaacatcttgcggtttttgagactctaagattgtaatttgacaagcactttatcctcactaatacatgtaatcaaatgatataacaatttgaattataactttttatacatttaactgtgtttgtaggcatttgttttagtttaaatatctttttaaactatctattttcaatattgatatttcaattttgacgatttttgtaattaaaaaaaaattgttatttaaataggcgactttacattggaggcaatatctcttactaaattttgtgattaaaatttgttttttttttttaaaatgcagtcatcttccggaaaagatcaatcgtcctcttgaaacccctaattttctattgctgaaatctttaataatttcactaaacatcattaatatcgatgatcacatcttatccagggccaaaacaatatctatctcaccgatcctcccgttaatagttcatttgtcaacggctataatcgttcagacatagtattgaatatcagtgagatctttcactttgcaacaattttttttattagttaagaagagacattaaacaatatttgcttactcctttgttaatacatatgattaattaagaacacaaaaagctaatatgcatgattacacgggcaataatgttgttcaacatgtccctttttataaagtgagaagtgtaaatatttattttcttgaaaaagtagttacaggtgataagtttgtatatagaacaacaattgaatacatgcatgcctaacatttcttaaaacataacatgcccaacttattgctaacttcagactaataaatgagatggtgtgatacacacactatatataatatatgagagaagcttaaactactaaatacatgtaaaatgctaaaataatgttttctttatacagttgatcattttagactaaaaaatcagattacataatctaaaataaatcattgtcgaaattaaattaaacaaagatatctaagacattattcattattgaaattactgtatttaatgtggacacatttgtcgtatgttgaaatttttgatatgtcacatttgtgcctctctgcatatcaaagtctttcatatttaaatcctatcatattgccgacacttaaaatccttttttttttctttcactaaaccatattcctataaagatacaaaaatttccttaaatttcgttaaacaggtaatttttctactatttaattacaaaatgacaccaagataaaaaagagtccaaaagatatagacaaaaaaaaggtaagaaaatttatttttacaaaaaaaaggtaagaaaaattattaaaaatcgaatatttactatatgcgccaatcatactaattattctcttgtcacgcagtgtagacgaaggagagagagaagagaatgttgtgtgtctctgtggttctcctccattgatgtctgaaactgaagagtcaagtgattgaatttgtgttcttgttttttaccctttgtatatatttctttttgggtaagtaagtgcttttgatcctttagaaattctctgagataaatcgttttcgcttgatgtttcagttttcaatcgaaagttgtcatctttgtgtcgctgttgcttgcattcatcacaagtttttctcctgaatttcgataaagttacttcctttggcaattttgttgctacccattttcatatttctggttaatttcatctacaagtaagatttgtttagctttgtttgtgtatataagtttgattagttttgttcccaaagtttgacgaagaattgttatttgctgtctctattattggtggttgatgaagtgtctgtctctctatgatacattttcctgaagtctgcagttttcagtttgtaccaactcaattcttatgaaacataaagactagcttttcccttttctccctcttcttgattgtgttttgttatacattaaaaagcttactcatgtttgtatctttgtctatgccttgtttgaagatagttttgtgtgttatctctctgaagattgctgttttttttttcttgttcaggacgatccagtgtttatcattcttaaggacaccaaattgatatttagcattaagtacaaatccacagtgcaaaggtttgtttgcattgggaaagcaatttaaatctaatgtaacttccttcgttgtttagcttgattataaggtcattttgtttcagttttgtagaattcttagtttctagcatactagtagaggatcaaaggaatcaagtagtttactttggcgtagaacccgttcgttgagcttcttgcagcagctgttatggccagtctgtcgcagtcagaatctgggaggttgtactcgtggtggtgggatagtcacattcctaaaaactcaaaatggattcaggataaccttgcaggtattctataatctttcttgacttctccttggtgttttttatgagtcttgaaaattgtggcattataatgcttttgatttgtatgtttaaagatattttgtttcttttggaagtcaatttaaaggaaatatttgtttgtgttgaaacagacatggattccaaagtcaagacaatgataaagctcatcgaagctgatgcagattcgtttgcaagaagggcagacatgtacttcaagaaacgtccagagctaatgaaactggtggaagagctatacagagcttatcgtgctttagctgagaggtatgatcatacaactgtggagcttcggcgtgcgcataaagtcatggttgaggcgtttcctaaccagatgtcttttgacatgattgaggattctgcatcatcttcttctgagcctcgtacagaagcagatacagaagctctacaaaaggatggtactaaaagtaaaaggagttttagtcagatgaataaattagatggaacttctgattctcacgaagcagattctgaagttgaaaccttaaagagaacattgcttgagcttcagactgaaaaggaagctttgaatctccaatatcagttaatcttgagcaaagtatccagatttgaaaaggaactcaacgatgctcaaaaggatgttaaaggatttgatgaacgtgcttgcaaagctgacattgagattaaaatactcaaggaatctcttgcaaagctagaggtggagagggatactgggcttcttcagtatagtcaagccattgagagaatagcggatttggaagcatcgatttctcatgggcaagaatatgcgaaggggctcactaaccgagtgtctgaagcagaaagagaagccatgagtctcaagaaagagctttctagattgcagtctgagaaggaggctggcttgctacgatacaataaaagccttgagttgatatcttccttagagaagacaattagagatgcggaggagagtgttagagtattcagggaccaatcggaacaagcagaaactgaaatcaaagctttgaaacaagaacttctgaagttgaacgaagtcaatgaggacttgaatgttcgatatcagcagtgtttggagacaatatcaaagttagagagagaagtttctcatgctcaagataatgccaaaagactgagcagtgaagttcttgctggcgctgcaaaaataaagactgtggaggaacaatgcgctcttttggagagcttcaatcaaacaatgaaggtagaagcagaaaatctagcgcacaaaatgtcagctaaggatcaagaactttcccagaagcaaaacgagattgaaaagcttcaagctgtaatgcaagaagaacaattgcggttttcagaacttggagctagccttcgaaatttggagagtttgcattctcaatcccaagaggagcagaaggttctcacctcagaacttcatagccggattcaaatgttgagagaactggagatgcgaaatagtaagttggaaggtgacatcagctctaaagaagaaaaccgaaacttaagcgaaataaatgacacttctatctccttggagattcagaaaaatgagatctcttgcttgaagaaaatgaaagaaaagctcgaggaagaagttgcgaaacagatgaaccagagcagtgcccttcaagtagagatccactgtgtgaagggtaatattgacagcatgaataggagataccaaaaactaattgaccaagtaagcctcacaggtttcgatcccgaatctctttcctactccgtgaagaaactacaagacgagaactcgaagctagtcgagttatgcaccaatcagagagacgaaaataatgctgttacagggaagctatgtgaaatggacagcattctaaagaggaatgctgatttggagaaattgcttctggaatcaaacaccaaactagacggttccagggagaaagcgaaggatctgatagaaagatgtgagtctttacgaggagagaaatctgagcttgctgccgagagagctaacttggtttcccagttgcaaatcatgactgcgaatatgcagacactcttggaaaagaactctgtattagagaaatccctgtcttgtgcaaacattgagcttgaaagtttgagggataagtcaaagtgctttgatgatttcttccagtttctcaaaaatgataagtctgagcttatgaaggaaagagaatctcttgtctctcagttgtgtaaggttgaggagaagctaggagtcttggagaagaagtatacagaactggaagtaaggtatactgatttacagagagataataagctcaaaagccatcaagtagaagagttacaggtctcacttgccgctgagaagcaggagagtgctaattacaaacgatctactgaaagcagattagcagatcttcagaagaatgtgagctttcttcgagaagagtgtcgttccaggaaaagagagtacgaggatgagcttgacagagttgtaaacaaacaagtcgagatcttcatcttgcaaaagcttatagaagatctagagcagaagaatttttctctcctgattgagtgtcagaagcatgttgaagcatcagaattttccgagaaactcattgctgagctggaaagtgagaatctcgagcagcagatggaagcagaaatatttttggatgagattgatagcttgagaggtgcaatctatcaggtgataaaggcacttcaagttgaagcagattgcaagactgaacagaagattacaaaagaccaaatttcagtttcacgtgctttgggagagattgatagcctaaaaggttcactctccagtgctgaatatgagatgcatcgacttgtagttgagaactcggtgcttttatctctacttggacaattccagtcagatggtttggtgctcgaatcggagaagaacatactcgaaaaagatctaaagactaaaatacatcagtgtggaatgcttgaaaaggacaagcaagatctacaggaagcgaaccggttgttgaaatcaaaactgatcaaaagagagcaacaagagcaaaagctgagagctgaactgaaatttgagaatttgaagtttgagagtttgcatgactcatacatggttttgcaacaagattattcctatacactcaatgataacaaaactttgcttctgaaattttcagaatttaaagatggaatgcatgtagttgaggaagaaaatgatgcaattcttcaggaggctgttgctttgagtaacacgtgtgttgtttacaggtcctttgggtctgaaatggctgaggaggtcgaagattttgttgaaactgtaagcagtttacgagaaattagtacgggactgaagcgcaaggttgagacactggagaagaagttagaaggtaaagagaaagaaagtcaaggtcttaacaagatgctggaaaatttacaggaaggccttgaagaagacaacttcttaactggactcttggaacatcaggtttctaatgtagacgaaatcttggaacatagggaaatggagatcctagaagcagagcatatgctcaaggccacaaacaatgaaaacgaagagctgcacaaagaagttgaggagctgaggaaagactatgaagactcaagacggatgagggcaaatttagagtggcagatttctgaactgtcagatgttgctggaagacaggaggaagagattagaaaacttaacgctttgaatgagaatttggagtcagaggtacagtttttaaacaaagaaattcaacgacaacaggttcgagaggagtacctgagtttggagctgcaagagaaaagcaatgagattggactttgggattctgcggcaacatctttctactttgatcttcaggtctcagctatccgtgaactcattcttgagaacaaagttaacgaactctcaggagtttgtgaaaacctcaatgatgaagttgttacgaaaacgactaagattaaacagatgaaagaaacagttggatttttggagtctcaagtgactgagctgaagagtcagttgtcagcttatgatcctgtgatagcatctttggcaggggatgtaaaagcccttgagaaaagtacacatgctttaacgaaatttcctgcaacagcctatcaacaaagagtggtaaacttttgcactcgttcttctatttcaaatgtcaactcatctttctcgctgtaccgatcttaaataattctaaacatttccatttttttcagggaaacaatctggaagaaagcggcagtaccaccagcccatgcaatggaattgtgattctgaaggaaattaatccaagtattaagaccatcgaacaagcatttgttaaagaaaaaggcaggctatcaaggcaaataacacgaagcacctcccaaaaacgcagagaccgcaggaagattgaaaatatacaacctgatgaccaggtcactggtgaatctagacagccaagattgaggcctgagatgacagaggtgaaaaatgaattattaatgaaagacaatcctcgtgatcaagtcacagactccctgacctatggcagaagccagggaactagtcatggttccaatgacatgtttgagttttgggatgaatctgctgaatcagagaccagtgtaaactttctcatcaacagtaacaaaccgcagaggtcattgaactccaatctccgtcatcaaagccggaatccctctatagaatctgataaagcggttggagttgttgacaaactagagttatctagaaacatcgaagacaaggcaaagattctggagagacttttgtctgattcaaggagactgtcaagtctccggattagcctaacagatctgaaaagaaagctggagatgaatgagaaacaaagaagattcagcaacgctgatttggttatagtgaagagacagttgaaagaaatggaagaagctgtctcgcagctggaaaacacaaacgagattctttcaaaggaaattgaagagactggagatgccagagatatatacagaaaggtggtcgtggagaagtcaagaagcgggtctgagaagatagagcagctgcaaaacaaaatgcagaacattgagcaaacagttctgaagcttgaagatggcaccaaaagcaaaggaaggaaaatgttttcagagactaggacagtgattctcttgagagacattattcataagggcggaaaaagaagtgcgagaaagaagaaaaaccggttctgcgggtgtataaggtcttcgactaaagaagagtagggtggttcataaggtaaattacatctagtctttcatagattattgtaaagatattcattgaactgactctagaagagtataatatgatatgatttctgaaatattgtagcaactagcttaagatgtattttaaaataaagctagtgctggggttgaatgagaaacgtggcagaaactcggattttagaagcagacacagtatgtttcgatatagtagaacttcaagagaaggaacctatattacaagaaatgtttggttttgttgtgaagaacatgatggattgacatctttattacacaacgactagactacagatttaaaagtgtgctaagtgctaacttactaccaactagaagttgacttatatcatctttcaccttgaaaaagattcaaagaatttccttagctacacaacaccaaatgctttcagtgttggggagtgagagaaggaaacgatggaatcgactgcaatatcagtttccgcccgccatttcttctccctaagattgagcctgagctagatgattccatatgaggaggagagaccctctttccgttgggagagacactcttgatgttaggtataggggaatggatgagaatctcaggcatttgttcagctccatcaactgcgactgtctcgaatgacttctcgattctggattgagacaaactaatgtctggttttcttagatattgactgttaaatatccctgaggaagatccacctccaagaagagactgtggaggaggcatcctgttcttagatgatgagaaaggtagttgaaccagttctggtctgaaaaaaaaaacaaaaaactcagctactcaggtgatatagactcacataaaaagtcctctagaatttgatattctacctgtaaatcggcgttggtgtcgtaggtagagcagaactcatgtcctttctcattaaaacctcagtgttttgttggcttttggctgttctgcttttctcagatgtttcattttcctcttcttgttcggcttccatgtcaatggaagaccctgagatattcattaagcagaatcagaatcagaaagagaatgtgaggttattagtaatgaaaaattgaaaactcagaagcagagaagctaaccatctttccggccgaatgcgttcttacatccttcacatctacagtttatggaacagcccacaccaccctttaaagaaacaacataccaaattaccggaatcaggccataggaagttaatcacatggaaccattgaaagcacatcgatgagggaaaataaaaacctgatagcattcacagtatttcttcagacagtttgatttcttgcagttgcagccacgtttatggcgcgcagaagctggagttttgcttgcatcatcctgtgtgtcattacaatattattataacttcaagcaagatagatggatgatgcagaggaatcaaaggacggggaaaagaatcctaccccggtttcttgaactgagtcagagttcctaatgactttaggagcaaatgcaagtggattccgagattcaatctgtttgcgagtcgccaggacaacgtcttcatggataggtttattgaagcagtctatacatgaacatggctctatgcaatagactccagcagcaaagcattcacagtaactgcaccacacaaacatcagaagactcaaaacaccaaacttttttgaagggccaaagatcaaaaatgtggaactttggagcttacagtttcaaacacttggactttttgcagttgcatcgcttacacgactcgccttctccagaatccaacttaaccctgtgtgtttatcatgccaacagttattaagacagagataaaaggactctacacagaggagttactcttaaaggaaaaaatcttacctcttcttcttagggctgctcaaatttaactcttgcaaagctggttcaacaggaacatcttgatctgcatcttcccggatttcattttctgtttggtccaaagaatcttgcagtgtagagatggacctttgtaaacccacttgtatattcgcagaacatgagtaatcttgagtaacattggttttacagtcctttgaagacattaaaatggcatttagatgaagaccaatactcggtacaacacatctcgaagaggattcacaagccgcggtgttattctcacttgatgtttgcttattcccgggcatctcaaagtcaagacaacgtcttcttataccacggtgcaagagtgaaacagcctatcacacaaaacaaaaaccaagaagacaactcttttagagacagtaagtatttataaaacactgaagataactacttgtgatattactcctgagtttacctcataaggaatcgcattcgcggactccggttccttgtttgaatcgtgctgcattgtttgcttctccacaccatttctaaaacgtgcttcagagtttgatgctctctgcatcataaagcatctaaaagcctcagaagcatcaggtgagtcaaagattaacagctcagaagcatctgcaatcaaactttcccaatccggagtttcagttttcccctgaacattatcatgcatcttctgcagctccattccattatcctcacaagaaccatcctctcctcgagtaggagcgtaaggaacaagcgaaagatcagtagtatttccaccacacggtgaagcaacggaatcatcaagattcgtttcaactgaagcttcttctcgcatgcaatcatctatgttaagaccttttgtatcttctccttctgctggaacttcttcatgagaagtagactcgtcttcttgagattcaacggaattggtaggatcagaagaagaagagttgtgagttttgaagaatctggattctttgtgagaagaagttaggtgaggtgaagtgaaaacagagggaggggaagtgaaattcagagagctaaattggttaggatttggtatggatctgactggtcttattggagacaaactgtttatgtaattgaacactggagaatcctgcattttcagacaaaacacaaaaaggggaagattatgaatcttattttggtactgtaattaaggttacagattccaattaaaagaatcttatgagacagaacagaaacaaaagtacagatcttttagcgaattagggataaataatcataatatgacagaaacaactaaaccatcagattaaaacaactaaaatttgcattataattatgaatcttttttgtaccattaaggttacagattccacaattcaaagaatcttaagaaaaacaggacagaaacaaaaagtatagaatttgtagtgagaattggagataactgatcataattaacaacacttcactgtaacatgtgaaacaactaaaaccgtcaaagtcaaacaaatctaaaaccagttacagttatgtctttgaactaactgcattgacttcaaacacaaaaccaaagtacttttttttttttttttgtaaaaaaatgaattgaataattggtccattaaacctatgaaatctgaatttctatgacaataaattagaaaagaattcagagaaatctgataattggcacaaaaaaacagcaaaacatttcattaaaatacaaaaacacagaactttgaccaaaccaattattagagttatacagaagaagaaaaacctcgaatctggatttggaaattggagttccgatctgagtaatactcttctgaggggtatccattttccaacacacaaacaaaaaaaatcacatccacaaacacagtgtcactctctctctctttcttatctctgaggaaagtctcagtcttttattaagtttctctctctctctctctatatatgtctttagtggaagaagaaggaggaggaggagagatattcaaacaatagcaaaggcgggaaatggggactatgtcagaaatcagacccaccactactatcaactttgccctaacacctgtctctctttctctgtattatatacaacaagtgtctctatgtatctgtgtatgtataagcagtgaataatgaatctttgatgctttgctttgtctgcaatctaagtccaagtataagtaatatactctctctcgattcctaaaccttttaataaagtaacggacatcagttttttttttcttttcccttttttctcttttttgttttagttattattagtggacagaaaataatagaataaggaatttgagaattttacagttctattattcactgctgctgcttctcttttgtttctatgcaataaaaaaaaaatttgttttctctcttttgttaggtggtttatttacaatgcaatttgccactaagtactaacaatgaatacgtctttgtttttataacgttgaaagtctttttttttgtttaataacgttgaaaaaaccaagtcttagttcatgcacgcttaatatgtctctctatacgctatatcataattttatggatttgttagcaaacaaaaaaataaaattacccgaaacagtaatgcacgctttttagtgcataagaggaaaaaaaagaagagagaattaaaagactgacgactgacagagaggattgtttatggtcagtagcacattataaggctaaaactgggagaattatatatcagtagtcactagatttgctaatcacgagaaagcgtttatggtcaattattcagaataataaattatgatttacactaatgactaaataacgctcgataaatcatgtacattattgcataaaattgccttttcttgtcatagacattcttgtaccaatctgtttgactcaaatagtttctctcttacaaatactttgtaattatttgtacacgcttctaacaaataattaagatctacctaaaagaaatgattgcatgtgtctattatttttgtacactaaaactgtctccatgtgatcattagatcatgaaagtcggttgtatatacacattttatgttttatcattcacgatcataacaaaaataggagtaacatgattactgtgatctaaaatgtggtaattaaaatacaaagtgccgggctatggtaataaaaataatttcatcttttcacgtattatattttaaatgtttccactaaaacaagatattaataaaaatagccaaaaacatgccttccccgtgaacgcctttaaagtttaaaagacctaagaatttaatataaaatcgccggtggggttacgtttttgttactacgtgattttttaccgaatttacatttatatccatgtccttatctaggagccatcatgttcccccatgggtattttcggaattaacaaagtgacagctaggcgttatgtgacaatgggcgggaaaatggatttataacgaaagagtagttcatgtacgctgtggtttactttgttatggtgcgctattgagatggtgggatctaatggatggtagacagacacgtggatggacgttgagtcgttgacttaaattggcttcgcaagttacggtgtccgaacgtcgaactacgtggacatgtaacccagatcttgtgtctaccatccattctctttgcattggtcaaagagagaccacacgacgaaaatggcataataatttctgttcgaatgttttttttcgtgatataagatttactttaaaacgataattgtatgaattctgttcgaattacatcattatcgaatatatattgttgtaaatagtctaatttaaaaaaaaataaaaaattgtcactttattattatgtaaaagtgatgtcgtaacaaatttataaataaattaaaaaaatagaaaaaaaatagaaataaatatcgattaggaggaagataaatagagaactgaacaaaaccaaaccaaatcgataattaagtgtcattacttattcttcagtcctttgtagtttgtatcatcttgtctgctatccttgtaatttttatgctttttacatattctacttgtaatctttttaaaattaaagaaggatggaaaagaaaaggaaatataaggataactaaattaagaaaacatacattcatacaaaaaatgaaaaataaaacaatgacatatgtaaaacataaatacaaacaattagaagttgattttagtatgttattttatttgataatacattattttaaatagagtaaaacttttataaatcaatactcgataaattaacgatctctataaattaaaaaattatttcgatctgagttgggacaagtgtaaaaaaatattataaatcgataatttaaaaaaacggtttaaaaaaaaaatcttatatatgtagacatcttatatattacaaatatcataaaataatctgtataaattcatcagtgtacatatatgtacaaattaatattgttatatatatatatatatcatagtaattaatacatgtaaatattttgtgaaatatcactctaatattgtttgtttttcctaaatttgtattaattcttggtaaaattattttttaatacttttattacatcaaaaaagttcgtgttgttttctaaactaaagaattacttttctacttgtaattggttttagaaaaatattgattacagtgaaaaaaaactgttcttcatatagatattttttttagaattacaaaactagtaaaatctctcttcaaattgataattattaatttagttatgattttgtcatcatacagtttttgttttgtaaaattaggctatctatctaattaaccatgtattttattaatactaagaatttcttaatatttcctccaaaaattgaaacactctaacagtatttggtatttgggcattggtaaggtcataaagttgtattcacaattatgaaaaatggggtgttttcgtgtttgttggttttaagtaggaatgttgaaaaatgtgtcttttgacatatgtgtttgttggttttaaagtaggaatgttgtacggttaggtggtggttatattggtgtaatgtgagagggacatttttttctaagcatatatatatgcttcctttgtagtcttgaggcctaactcacgatcaaaaaattcaaattaactttacgttttatgttgatataagatgggcttgaacgaaacggattgagttagtctaaagtctaaacaataatccgtaactatatataattattaaaaataatgtggtgaaatgtcgacatttatatatggctaagatcacttataatttacaataattgcaatcattctagctagagtcatatactgatttatctttgttcgttggatctcacataagtgatatttactaacacccattgataaggtaggtagctagattgaacccaatctttatagatgtcaaacaacttaaaaatgagtgctagctacatatagaactattagtgactttgtggccaaccactgggttgattttttctttttgtaaatgttatatatcaatatcggtgagtaatctttaatcccgtacgtaaacagaaaatgcagctgaatgacgaattgcttttagtaaaatgatagtgaattccctaattattcaacactataagtaaatatcgttggtacacatgcaatgatgcagatttaccaagaaagtaatacatattaatatagatgctgcaaatccaggaaatgcataacgcgaaaaaatgtcgtaaatacaccgaaaacaaaaggaaaacaattcgtaaaaatagcaaaaatgatatggaaaattgaaagaattataacaaaaatagaaaatatggactagattattgaataaattgtagtctccaaagtaatacatatggagagaaggaaaagcaaattcttctggcataaagaagctccatgctaaaatcataatgtcgaccaaacatgctgcctgcaagatcacgtgcctacatgccacatcacgtgacctaaaacacataagaaagatatccttcgtatgtaagaaaacatattaaattaaacgcaatacattgagtctttacatataattgttagtatttataaactattatatataaagttgttagttgaacttttagcgaatgtcaggtagcttgatacttagtggcagatcattagtcaaagattaataaagaattaaagactataaaacaaataattatttacattttgattagtacgtaagtcaagatccctctcaatgcttctcacaaaatgactataagaaaaagccaaaggtaccaaagtcattatttagtctcatatgtttgtaaggtgaatctttattttttttttgtataataaggttatgacttatgaatcgaactaaagctattaaaaaaaatattgctcggaacaaaatgtctagtttcttgaattgttgaattataatgggatattttttggagaattaaggatttgttagttttagaagaacttagggatgaatggtttagcctttggaaagtcgacaattgaaccagttcggtggtctggagtatagctccgagtcgagctatcctataaggagaattttaaaaaactatcgctggtcgaggacttttatagttgaggacatgagtccgttgcaacaaacaaatgatatcatcaaacaataacatattaacatggtacgtgaacagatgattctccataagaataaatggaggagtgtctttctaaatatttactgacgctacaaaattacaaaacttgctgaaagctttggaataaagataaataaacatagtttgtttaaagtcatagaaaaattaatatgtgacgactcggccgtatatttgagttagcttagtaaaaaaaaatgaaagatattatatatagccatttaaaaaaaagagatgagatgcttacgggagaactttaagttgattgcttgaagaccgaacccatatgttaagctaaaattagatgttttgatgaaacatatatcgggtacttcatgcttcatgcttgagcgtttgaatgcatgaaagctagactcgttcggcctaagtgcgggactagccgatcttggatttttttaaaaaaataattaataacaagtttatatgaattatattgcatattatgattttttctaagtgtcttttgattgcgagatgtctacgtatcgttttgtgattcacaatcctaactcaatcaagatttctgtgtcgattttttacgcatgtatgaattagataagtttgtagttgacaattattttttgaaaaacggtattttctcgtaataatttttttgtccattcctcttagattgatgtgaataattgtaatatatatttttgggctgaccttggactttgcaagtctctcgtcttttctctttaagtacaaaaaagttggtatgcaattcttttgacttatgtactcacgaatcaaggtgaatttcaactttttcattttttcatatcaatatattgatttcaatataacaaagtggagccacgccgatatatataatattaagacttgtttttctttatcaccaatgtccggctccttgaagagataaacaaaccatgttataaaaagaggatgtctatttgagctttttagatgataatatatgttttctaatagctagtgttcgaaggtgagaatgttatgtttatatatatcacatcatccccgatttctactttggatcttaaagaaataataccgttcactcataaccggataagtggaagctgttattcactagatatggtatattggtattactattaaccttttgaagtcaagtggagatttaactgcaataaattttggtcataccagatacaatgctagataataaaagcttgacatggttttctaaatgttaatggttttgagagcgcgtacatatgtagattgatgaatggaagcttgacatgctttggtcaaagaaagaactgcaactaataatttgatattggctattatattaaggtgtttagaccaactatactacttataggtttatgaagtcaaatgtttttgacttttcagtaagatatacatgtacatgtcaatcttacgtatagatgtgtattgcgacacaaaacaatatatttaagattgggtttgatcacatcttggaccgggctccttcaaaacaatttatgtttgtttgtattgtattttcaactttttaaaaaaaaaatagttcaaaaaaacttgggaaccccgggaaaacatgtacacacgggttcgtggtaagattttttagaaattacctaaacataatagtttgaatggtttctatatgttaaatgtatttcagtatgaacccaagtgataaggcgcaatggtaagttgggatacattatgtagacacttcagtgtgtacgttggatttctctacgtactaaaatctttagtataaagatatttatttcgtagacttactggtttgtcaaagtcttaagtaccgtttgaaccgatcaagcaggcgactaaatcttctgccttaagtttttatgggtcttagtttgggccatccatgtaaattgggcctcaagatctcagtttgtagtatatgacaagccttaacatttgataacatatgtactcaatttaaaagaaaactattttgtttttgttcaatggctaataatatgtatttcctgccaaattataattttatatgtatgcattatcatacattatatatgcatttaatatttctatattatatagacatatttttcttttttaaaatgttaaaatattacaaaactgaagatataaatgtttaattctgtttagatatatatttcaaacacaatagatatatacattatcaaatagtggatatacactttaatatcctacgcgatatagttggaaaaaatatagaaaacaagaagataaagattaccatagatttaatctcttagatctttagagattaaaacctaattgaaaattcaaacaattagaaggtattgaatttaatattttcaatatctctaagaacaggtctaccaatagcaaaacacataatccaatttttgtttttaattcagttttttggatatgatttagatgggaacgattcaatttatcagatagattaaaaaaataaatgtttttatgatatttacttcctattttaaaaaatccaaaaaccaaagatatgttttgatgatatttctttaagaaatatttgagagaaaaaaacaaataaatacgtatccttaaaagaagcctgaaagaaacagcttctgttccgtctttcactctccatctctcttccgtcgtttcctaagtccttttctcttatttagagattctctcttttcatccaaaaaaaaggagagatatttcagaaacaatcctctgcttctggagataaatctcgctcttttagcctcataatccaaaacccaccattaaaaatcctctctttcgttccctttgaacccatcaatttcagtttgcttattacgtctctgttctctgcatgtccttgtggttgatacagctgacttttggttttgtcgtttatgttaattgaattttaatatttgatcatcgttgtgctatattagtggttaacgagtcgttttcttaaggtttactttttcgtattgtcacgttagattttttaggctacaattgtagagaaattcattatctgaatgtcaaaccatgtgcatgatctttgagaaagtttggtgattaatagtttcttcattattaaagctgcctttgtttaacttagcaatcataagattgtttttgataacttttgtgtgatttaactattcactagtaataatctgaaaaaattagtactagatttcatgatgatgatgaaaagattgatgatttgagtcacaaaatcttgttttttgaaagttgtgtgatcttcttgtttgcatagtgaattagttttgatttgaaaagattttaagtaatggagaagaaatcagaagaagatgggaacaacacgacgaaagaaaagatctttagagcggataagattgatttgaagagtttagatagacagcttgagaaacatctgagtagggtttggtcgaggaaccttgaggtgaatcctaaagctaaggaagaatgggagattgatttggctaagcttgaaacaagtaatgttattgctcgtggtacttatggtactgtctacaaaggcatttatgatggacaagatgttgcaggtaataataataaactaaatccaaaatcttgatcttgacttatgtttttgttagagattgtgactgtgtttgagtaatttgcagtgaaggtgcttgattgggaagatgatgggaatgaaacaacggccaagaccgctacaaatcgagctttgttccgtcaagaggtcactgtttggcacaaactcaaccatccaaatgtcacaaaggttagttggttaataagttagttagttaattcactgaattgagtattgaaatattgaaatgaaacagtttgttggagcgtcgatgggaacaacgaatcttaatatacgatcagctgattcgaaaggctcgttgcctcaacaagcatgttgtgtggttgtggaatatcttcctggtggaacattgaaacaacacttgattcgtcataagagcaagaaactcgcttttaaagccgttatcaaactcgctcttgatctcgccagagggtaattaattagtcttttgacactgctaatctttttcagatttgtgcaaacaaacatcttattgttgttcttactgcaggctaagctatttgcactcagagaagattgtccaccgcgatgtgaaaacagagaacatgcttttggatgctcagaagaatttgaaaatagcggattttggagtagcacgagtggaagctcttaatccaaaagacatgacaggagaaaccggtactcttggatacatggctcctgaggtaaaactataacctttttttttgttctctctgttttcaaaactgaatcgaatttaacttagtgttgtgtttaggtcattgatggtaagccatacaacagaaggtgcgatgtttacagctttgggatatgtttatgggaaatctactgctgcgatatgccttatcctgatcttagctttgtcgatgtttcttccgcggttgtcttacatgtaagtttttgacctaagaaaaccctagctagttttccttgatacttacgtaatgtcgaattctgaaactttttttctatggttttaaaaaagaatctgagaccggagataccgagatgctgtccgactgcattggcgggcataatgaagacatgttgggatgggaatccgcagaaacggccggagatgaaggaggtggtgaaaatgcttgaaggtgttgataccagtaaaggtggcggaatgataccggaagatcaaagtcggggctgtttctgctttgctcctgctcgtggaccttaaatttccctttctacctctgtttggttttattgtcttgtttttgtcgacatttaactgaatgccccttttgcttcttctccaagaaacttcttttaacaagatttgttaaataaattattttgatcattgtgaatctagtcattgtgtttttttgttttataatgattaggaggttcttgacccgtggatctgaacattaatccgcacgacggtagacaaatcatgtattttttttttttcttttagagagcaaacttttaccgacacgaatcgaacatgtgagattcaaggtctctacgttgttcacaaactaaatactgtatcgtaaatctaaagtcgtgtgggtttgtaagaaacggttaaaaacacttgtaaaattttgacttcaaagttcaccctcaaccagaaatactagagcaactcatcattggtttctcaagttctttaaaaaaaatattgctttaattatagtaaaaattgtgcttctaaaaatggaagccgattctaccgatcattttgacttggctcatccttattttctcaaacttatcggaaaagttatgttgttgtggttattgtatatatactaccggtgtttacaagtaacaacaataaaatatatttgttacgagaagttgacaaaaaaaaaaatttggccaaataatagagagaatatttatcaatattgaagcatgaggtgtactactttgattatggtttcttttgttgtcagctgtttgcttctaagccttgttgaaggtagtatattaatttcttttattggttgtttcaaataacaaaaagtagtgttgcaaaacgagaaagcagctcaagaatatgacgtaacttaaaactatggtattactaattgcttatatctttataacctaaatatatattttgattgataaaaaattagaatcggaagctggagcacctcccgtagagtgttggagtgagatcctattttctggaaaatgcgggtttcatggaaagaagaaatgctacaaagaaatggaatctaagctaaaacaacgtgttcttaaatgtagatgtgaggatgttaaaaaagattccaatacatctaaggacgaacattactgcggatgtcaaagagaaaatccctatgagtgtaactaaaatcttttaaaaatttcagctatcaatacgaaaatttgtttactaattaagaaataacaaaataaaaactacgtacacgagtttttggtgtagacgacagtatggtaagctaatgtttttttcttcttctgaataataagtagttgtcatagaacttcatttgtataactaatttcagtcatgtaagaatctatatcatttgtcgctttgttgtcttaaaactgtttaaatctaatataaagagagcttttgtccaaatagccttccaccgtggaggactagaatgtgctccatgcctccatgatgaagtgagagagatcgctataagagtacgtttcttctttatgcattttgtgatctacattacaaaattaaaggtcaaaattcaaaaaagaaagatataaagaagtcgagacaaaacttatttcatcatcaaattcaacaaaataaactgattcacgctattgctacaaagtgacttcatatctgaagtaaaaacaatattatggaatgcatgtgacaaatattattaatgcatttcttacatcttaaagcatgtcatgtttaacgaaatgataaaatgaacaaataaatcaaatggtttatctactgttaatgacaatttttgagtgcaccattatcaaatactgttaagatcttgtctttacttttttccttggtgaacaaaccaacgagaagaacaagacaattgtccaaccaaacttgaagtttattctgagagtttttgccgccttagatatcgtgagaagcgggcaggagagtttagtctatttccctctaagaattgctcaatcaatctgtaaaattcaatgtttctttgaatcaaaacgtcaagcaaagcagaggaaaagataatgccgttttctaattctagctacttacaaattgcagattgacttttgcgaagctgctacttcgcggtcaggaaaagaatcctctagccttaagcttaaccatacgtacagatccaaaacctgctcaatcgtcatctagttaaactaacaaaatccacattttctctcttgattttggttaatgaacaattaagatcataatgagattaaacccatctattgcaatatgagcttcgaagattctgttttatcacgagtttttgaataaaatacatacacttcctttgatcactactcatagaggaaaagaaagatgttaccttgtgaatggattcaagttccttgagttctgtaggtgttttgggaaccttcactctgtcaggtgcaagtatctcccggagcctcacaatgcctgccttcgagaagttttgagcaaactaatgtacaaagaaaaaaaagtaaaagtgaacaatttttttgcagacatagatacctttattgatatctcaaaataaaaaagataagagattcaagtttttcacctgtgcaagtccctgacctgaaatttcgtcatttacatcaactggactgcacataagtaacattagatcagtctaagctggtatatatttaaatcttattggatgcagaaaacaagaaaagacgaaaatatgttatttttgctattacctgaccacgaaaagatacttctcttgcaatccgaggggtaattcatcaacaatggcagcaactttctgaaaatcaagaccaacatatgtgttaagaaaacattctctttctgatatctgaacaaaactacatcatagctgagctttaccatcatgtcttcaacattagagatgaagtagtttgaagacagcttagcattttcaacaaaatgttcctgccaaagttaatgagccatgatttcagatccattcataaggaccgaaggcgagaataacgaaggaagaaaatatatcttaccaatatctggtacaacccgtgtgtagggtgtgcttgggaatacccagataggaggtcaaatgttggaaatagtccagcacgctgcatgataggagttttgtgtaaacttagacaagcttaagaaggaacagatgtagagaactaatcttaatgccataaatttgcctcaagaataggtgatggagacttgagagaagagtgaagcaacggaagatcctctttgtgcaaacaagttacttcgccaatagggaactttgattgaaacctgccagctctccctacaacaggatcatcagaacattagagaggacataccaatactcttgatgtattatttggtgctttttgttgaaaatttacctgcaatttgtttaatctcagatactgttaggtctctggtctcggaaccatcatatttttgaagggtcgagaagataatccttgaaatattcaaattaagacccatgccaatcgcatcgctggcaacaagcacatcaaagtcattggtctcatcgttaaaccttgttgcctgcagattttaaagcatttggaaacaaaaaaagataattcttagagcatccagttaagcctatagccaagacagtaaggaactcaaacctgtgccgtgcgagtctctggaggcaacgaaccataaaccacagagcaaagatgcttccccgcacgttcaattgttttctacgaaaaggtaccaaaaaaaagagtaaagaatatgtatggaagcattcaatactcatgacgcgtagagaatagagctatgtatgcatataatatgatgccaaaatgttctatttctttcgcagcaaactcaagcagaaaaaagcaaaatacaggaagagagaacaagataagtaactgctaaccttatacgcatatatatcttttcgggaaaaagtgacaagacaatccccagttttaatactggaaactgatgaaacaggaaccttcaaagggactaatggtgaaagcctctcataggtatgaacctgaattcaaaataaaagggatcaagaggtcgtgattacatcaagagtattggtatttaattataaacaagaaataattagagaagaaaaagggactctagctcgaataaacatgatacctcgacatcatctccagttactttcagtatatcttcaacaagaggtacgacagctggatcgccacataaatgtagctcatcagccgcgattccaagtaaagcacgagtaaatgcaaatcccctttgtttacatcccaccatctgaaattagggaaagaaaggatgagaataacaaacaaaaagttcttgtcgatttcttaagccaaagtcgagcaagactagcctgaatttcgtcaatgatggcacaatcgtagacagatgtaacatcagccatttcaactgtcacagctttgtgtgttgccccttccactaagtctttctcttgtcccgtgatcaaatcacatggaacatttgctttgtttaaccgtttagctacctcccatgccaacaatcttaacggaccacaatatacaccttcaagtgaaagaagcaaattttaaacagttcaagaactggcttccaaaaggtttattagtcaccttcaaggcatacctgaagaactctgttcaaggtgcttaagggcactatatgtcttcccgctgtttgtcgggccaacatgtagaatgaccttacgcttcttcttccgagctataggataccatgtatgaggacagctagaattcaaagtaatgacagaaatataaatcagttcctctttactaatctctccacaacaacaatggaactgcaaagagaatcgcaattagttgctactggggagctaacaaaaaaattctacaagaagttttactcttacgtgagatcagtgaaatcgaactttgaggtggttccagtgccagtgaaatcaaactttggagatccagagttctttctataattcctagtcaagacacctaatctcaaaaggtcaccaaactcaggttcaaagtgaaaccgccacaaacttcctttatcagctgaaacattaggcaacacgaagccatcataagatacaacgttaaaccaatccaatcttcttctagacactacacagaaacagatgtagaagctgcaaagctcataaaggttcaaactttctgtatccagatgatcaaaatttctgatagttcctttctaagatcacttacaaactacaatccgcaatttctaaccaaaagagaaccagaaaacagagaaaaaaagggtttaaaagctccaaccttgaagaacacgagaaatccccaaagctgaaacctttcgaagccgaacaacagaatacgccatgtttagattgttttatctattgaaatgaagacacaacacttccttatcctttattcaccatgggaaatacaattcgagtatactcacgacgacacctttcatttgctttgaaggaagctcaaagttacagaaatcaaactcttgaaatcgaggacgagataaacaataaagagaaattaaaaccaaattctcttttataattagaaactgaagaaaccatctcagacttccattgttagaccttattcttctcagagggtcggcgactcagcaagaagcgggagagagaagaaaacgagaggttcctttttaatttacaaattaacccctaagcttttcctattactctctcttacaccctcctactttaaaaaatagaaatgtccccataacgttaatatgtctaaaatacccctgactatattctagaactaccaaatcaacccgtcttgttcgccaagtcgctttgatctaaaaagctcttaaactattcttccagcgaccggaagaaacgaataatcggaatcgaaaaattcgaaaaaggaactgagaagaaacagatctgaagatggagtgtgtatttggtctagttgggaatggattcgctatcgtggcggcggatacatcagcagttcacagtattcttcttcacaagaacaaagaggacaagatcatgactcttgactctcacaagctcgtcgccgctagtggtgagcctggtgaccggtaaaaaaacttctccgtctctctctctgtctgtgattcagtagtagtagtacatgaatttgatttctgtttttttttggatttactttagggttcagtttacggagtatgttcagaagaatgtgtcactgtatcagtttcgtaatgggattcctttgagtactgctgctgctgctaacttcactcgtggagaacttgccactgctttgagaaaggttctaacttttcttctacggttttttatttttttatttcagaagtttctctgccttattttagatttggggaattagggttttaatctctttgaggtacatatacttttatgaaatagtgagattgtggggtatcatcagatcagcgattggtgcttagtgcttattcttggttttttagtttcctcttttgatgcaatgtagttgaacttgtctttcttctttagttaaacatgtcaatttttttgaagctttcctctgtcatactatggttttgattgtgttaagatgtttgatgcttaatacttgttgataagtttatataagcctttgtgtttcacttcctcttgtatggtggtgtaaaaccattgttgatacaggtagttctaatacttgttaatattcattacctcagagtagctaaatgccattagaaactttacctaatgtgttcattatgtagacatagtgtggcctttagaaatattcaaggtatttcagactattctacacattgttgcagttttatgtccttggatgttacagaagattatctttgagttggacgaagttatgaaatttagaattatgatgcagaaaagatgaaactcggattacagcttaatagttttcttatgccaagcttgataagtaatattatttcattaactaagaatttacaagactaggaattttgtgctaccttccaaggttactctgacttctgtgtcttgatggtgaaaatctgatactcaaggctaactgatgtgtgatcatttttaccggtttagggtagatcttccaactttggacagtgttgagtggggtttatacccatgtagccttagctatagattgttaaatgatctgattgattccctggatttttttgggttgtttaggactggtctgcatattcgcacttgacattttgagatttcccattgttgtctgttctatttgattccagaatccatattcggtgaacatcctgatggctggctatgacaaagaagccggcgcatctctatactacattgactacattgcaaccctccacaaggttgataagggagcatttggatacggctcatacttctctctctctacaatggacagacactaccgcagcgacatgtctgttgaagaagccattgaattggtggacaaatgcatactcgagatcaggtcaaggctggtcattgcaccaccaaactttgttatcaagattgttgacaaggacggagcccgtgagtacggatggcgtatcagcactgctgatgcctaagttgttttcattgtgtttattagtccatttatgttactcggctcacatttatattctctgttgaacttcaagctccctggatattaaagttcctagataatgatgatgatatgcatgtgttgaactttttctttccttattgcgtatatgaagcaaaagatagtgcaatgtaaacctaaacatcttcttctactatatcatctctattctctgcgtttctacatagggaagactttaacacaagcccaatggtaaaatcttaagtatcaatgaagtaaacataagcagtaaaaagcacagagagcttaaaacagttcagatacgagcgagaatagaagtggcaaaagtcatgatgatagtcgatggaaaccagaagtttctgatcttgagagagtcgcttgagaagtattgtagaactggtagtggtggtggtggtggtggtggtgctagggtggctgtttccggtgagaatagatcggagcttggtgaaacttccggtgctaagtcgactgattgaggagaggcagaaacattattacctgcagaatatgaatgaatgaagcaagttacatgtcaacgaaacttaaaacagaatccaccggaataatccgtttcttaccggaaacaaacggatttgtgaactgaatactctgaagcggaggaagctccggcgactctgcaccacagatcaaaaccatagaaatcacacatctgagattcgaattcaatcgattcaattacataggaggattcgaaattaacctgataccgaacagagagattcgaaagattcttcggaattctgatcggtacagatctgagaaagagaaatcaatctagatctatccaacgggaatccaaggatcatcggctgccggagaagataacagagacagtttccggtgctagaatgaacggaggaggtaaaaaccgagcagcaaataggatccggagtctctgacatattgtttggtggagaggagacgtaaggaaggcaaggagagaacatgacgagctcctccgtacaagtcagaaccggtggagaagacgaaggtgcttgctgcgtcgcggttacggcggaggaggaggagaaggtgatcgtgagtatgaggatgaaaacgccggtgattttggtcgccatttttgttgcttcagagatctctcgtcttcgtgattagagttagttacagagatttcacacttatggctgattcgtagcgataactgagattgtatgacgatggtggcgggaaataaacagttgtggaggtttgataacgaagttactaatttgcccctatattgatattttcgggtgatgctgagttggtagtgactggccactaaggtccgtccacgtgggtgaagattagtttcgtttgggcttttagattgaatatcaaagcccacagtttatgtttttgacattttatagtttagttgactttgaaattttatacttctgttttttaaagaggataaataaaaatctaatggttacggcggttgaggcgaacaaaaccttcaacagatcataccgctttttatttaccattcatcaattatagtccgcagtagttcggaccaaaaaaaaagaaaaaccgcagcaaaccgtttttatatacaaataaatttggtacgcaccgatttattgtccgcccaaaaataaaatggattaaactgcagaaaaattagacctttttgtccgccgcatccattcaaagtttaagtgggaaagttaattacttatttagttgatattcgtttggacgagggctcccgaacacatcgtaagctaaatcggtgctgacgaataaccagcccacaacaaataggaaatgtatggaatagtaatactatgaatgacccaatatagaatactggtaataatatcatcaaaagaacgttctcatgtgcttccaaacatactgaactcaatataaatttagagaatcaatataaatttagagaacataacaaacatagacaattaaaaaaaagaaaaaacgaacaaacatagacttgtgaaaccgttataattatccatggaactgttgatgcttgtgaaactgtaaaatccaccaaaatgccagatattcacgaagaaacctgctcaacagctgctagaaaaaggatagtgattgtgatttatccgtccataacgatccatggagctgttgatgtttgtgaaacgataaaatcacaatttcctcgtagctgttatgcagatatcttcgtgaaatatctgatatcttgaagaatttttcttgaaggctctttgcttagtttgaatattcgttgaccgtggactcggtggttcgagttaagtttcgtcagaagatgttttttcttgtcgtggttttgtttttcggtggtcgtgaagatcgtgaagtgttggctaataatggtttacgtatggtggagcatatcggaatctcagtttctgaataagaacgcaaactttaccatatttatattgcaaaagttggtcatgctctttatcaaatagagaagttagatcatgcagattaagccacatcctgacatccttctttttgttttttttttttatgcgacatatatcagtttctatttatttacgaactcccaaaaagactccaacacaaattaaaccaataaactcaaacaaccatattaaaatgaacaattcacaagtaagtgtttggtgttgcttataattttaatggtttctacaaatttatctacgtatcttattttttttcttgtttttttcattgaaaaggtcagcaatcaaatttcaatcaggtgaaactcaaaaactttatataatcacaaaaaataattcaacaaacatatccttaaaccaaacgtaatcatattctttcacaaacttcaccataaggtgttgcaaaagttggtcatgcaaattgagccacatccttattttcgtctttttctgcggcctcaacttcttatttatttacgtaaccacaaaagaaaagactccaacacaaaccattaagcgatcaaacaactaaattaaaaaaaaatcttgagagattcttggaacacaagaaaaacatgaaacctagaatgtgtttaatcttgtttattgctttaatgagagtaatgtcgattgtttctgctcagtcgagttgcacaaatgttctaatcagcatggcgccgtgtctcagcttcatcactcaaaacacttctctcccgtctcaacaatgttgtaaccagttggctcatgttgtccggtattcttctgagtgtttgtgtcaggttctcgatggtggaggttctcagcttgggatcaatgttaatgagacacaagctcttgctttgcctaaagcttgtcatgttgaaactcctcctgctagtcgctgccatagtaaaataaactcactttccatgcattagattcatatttttgctatcttttttctctcacacatcagaactttattattttcaggtggttcttcggttaattcacattcaggtaaaggactaacttataaatagaacctaatctaatcatatctattttgacattatccttttttgacattatctctatgaacagaacatggaaatggatcaaaaacagtcccaagagaaaagtcatcatctgatggttctattaagttctcattccctcttctcgccatcctattcacagcttcttacattacattaatctacgcaaaatactgacttattttaccaataaagcttttggcctctttgaagaacatattcatttttagtctctattaaatcgcggtgtattgtgctgaagtattttgtgctctaaatccctactttctaggtgatattggtttgtagtccaaagagtgtgattgtatatctttgatttatgcaataaacattattttctagctaggacatatttgaaatacatgatatatatatgtattgttatcactaacatatgtctaaacatcacttaaaatttagagggagtactattgttatcactaacacatgtattgtagaaggagtacgattgctatcacaaacacatgtattgttgccattttagtcacagtttctaaatatgagctttgtctgttaccctaaatgttattgctcaatgttcaccataaacttttgcgcagagtgtcgcgtctctatccactttttcttttgccggtaattttacgaagggaattatcgcctttctcaaaaatttctctatttttaagttgcatacttgtaaatcgttttggtatttctcttttaatattccagaacatatgttgtgaaagctatagacaaacatttatatgctggctgaaatctggaagacagtttctagcaagagtcaaacaaatgtctagagaagtcaaagcaacaatgataatggaaattaactaacacctacttttcttaatcaaactagtgattcactaatttaaatgtgagattgacagaaaaattctgcaaactttattaaatttagtgattcttatagacttgtttagaagacaagtcatcagtttttttatagaatgtagtattgttttgtgataatgaatttgtagtttttgttcgcaagttatactaaatattaattgatatgtgcatgaaatgaaggtcaaataatggtagaaggggacccttgaacaagaccacctttgtctccatttccacaaatcacaacctcatgtccctttagaacatggagccaattattgcaactccttgccctcccatagttttgtttaaatatgtcaaatctttattttcatatacaaaaatcattggtatcctgcaataaatattttcatcaacgtggacttaacacatctaaaaacatatcatatcaaaagtcacaaccctactatttattttggtctaagaataatatgattcaattcatattattttcaaaattcggtttgagattatccttatagcttgaaatcgatgaattatgtggtgcatgcgttaattgcaatagggtcttcattagagattattttttgttttgattataagataatgtactacttttcttgattgtacgttaatgtagttccaagtgtaataatgcatttgctctagcacttctcaatttctctagaatataaaatattaattgtcccaattctatagagccaacatataaaccccaccatgcaacagatgtattattacgtgtatataactaacaattagctttggtattcaacattctcatattcacgaaagcattccattccaaattagagaatcataatttcaaaaacgttgaatcattttctttctcgttcagagctctagattagtcaataatggagattgaatcggtgacgtgcgagtgttgcggcttaatggaagattgtacacaacactacattagtaaagtcaaagctaacttcgccgggaaatggctttgtgggctttgctccgaggcggtaagcgacgaattcagccgtagttcgaagacggtggaggaagctgttaatgcacacatgtcgttttgtggcaagtttaacgctaaccccgcagaactcgtcgccgacggcatgagacagatgctacgaaggaggtccggtgagttatcaccgaagatgtccaagaagttcggaagatctaacaccacataattcatgtagtcatctttttctcacttttgccttaaagttttggctaatgtaaagtataataaaagttacaaaattaatactttgagcaaaattaatatttatttgttactaaactcaccagtaatctctgcaagaacacagaccgtttttataacagtgaaacctagttcgatctctcactatgatctctcgttcatacactttagagacgagcttgaagaaaaggtgacaatcctcacacacccttagattcttcactattctaataacaccgcacgagtctttctcttcttctttttcctcattcatcagaccgaagcagagcgcgagcttttcgctatgccatagaaccaaatccttcttttcttcctcctctacatccaccaaaacgctaccacagtctggaacgtaaccggctagcttcagtttacttacaacctcgtctagcttcgcataaatctcatttgattgcttatgtctcttgtcaccgatgagaaactcgtgtgatttcccgttttggtcaatccggctaagacctttctccttgaacacattcttttcctccattacacgtcttatgttccttacgtcctcccatctctgttctctagcgtatatattggacattaacacaagagccccgtcatgatcaggctccagctcgaggatacgtttggctgcaaatttgcctaactcaagctcaccatggattctacaagctgacatcagtgatccccatatgactacattagacgctactggcattgattctataacctcaagagcttctcgtaagagattagctcggccaaagagatccaccatgcatccataatgctcaagttttggagtaatattgtattcatcagtcattgatgcaaagatctttttaccttcttcaactagtcctgagtggctacaaccatagagaactcctacaaaagtgacttcattgggctcgacattttcctgtttcattcgggcaaataagctaagtgcatcactggcttctccatgcatagataacgcattgatcatagagctccacgacactacattcctccttggcatcttctcaaacacgtctcttgttgcatccaaacctccacatttcgcatacatgttaatgagggcattatttattgacaactctgattccaacccgttaacatgtatgcaactgtgaacccatttcgctttatccagaataccaaggttagcacaagcagatataacactgaacatgctaaccacatcaggtttgatcccagagcaacacatttcctcaaaaactcttaaagcttcttgaggataatcactttcaacataagccgaaatcattgtggtccaacacaccaaatctttcttttccgtttggtcaaatataacctgagcatcatcgagtctcccacattttgaatacccagaaaccatggcagtcgaaacaaacaagtttctcactgacatcttcctaaaaaactcccttgccatatccatacaaccagctccagcatacatagtaacaagagcagtcaacaaatgagtatccatcctaacatcattttctatcaaaaactcgtaaatagctctgttatatctcatattcccagtacgaccacatgcagagacaatgttacagagaatcatttcatctggcatcacattagaatccttcatctcctcaaaaagcttaaaggcttcatctacaagaccgaatcggcaatacctacaaaaaagttaaagttaacaacttttaaaaaagaaaacactaaacaacatttcactctgtttatgatcctaacctctcaatcatagtattccacgtaacaacatctctatgcgacatttcgtcgaacacattgcgcgcgtagttaattctaccacaagacgcgtacatatccataaaaccagtctcaacaaaagggtcgcacaaagtcgcaatcttgaacgcaacgccgtgaagctccataccctcgaacaaggccgagactttggaaactgctttaagaatcggaaggaagctgaattgatcaagacgaccaccaacatgtctaatcctctgatagaacagaatcgtcgctctaggttcactggaacgagatagatcccggagaaatggattgaagacgatggattcaggcggagagggaatagatgaaaagacattgagagcgtagctgagattgatagaggaagaagagacggagaggttaaagagaaaggagttgagtttgtggttgatcactgtacggaggatgtgagcatggagttgcttgatgtggttgagtgatttgcagaatgagagtttctctagaattgtattcgcggccgttgacgctattggcggcggaagtgtcatcggcgtatacaattgaatttaaaagaatcatcatcacacgtaacacataaatcgatatattcttttaaaaaatattgataccaaagaaaataattgaataagtattactgaaaacagtttatatcatatctgatagactgatacagttgaattgctgataccaaacaaaaaaatgtttaaagaatttctataatatctgatacagttgaattttatcaatttctacatccatattccatattactgatatttaaattatcaaattgagtataggatgattttgacatatacaaaaaaaaattaattttgtcacaagattgctaactttattatatcatacgatttcataagtagttttttttataaagattataaataattcacttttattgtttacatatcatataaaaaagtctaaatttcataataaatcgtcaatacttatattcgaaggtttttgtgcgtagaagtaactattgaagggcaatattcttgcaaatacaacgattatgtttaagaaacataaaagttaggaaagatattgtttagaaatatttaataatgtaaatattaaacggataaataaaagttacgtaaatgtttttttttggaagggaggggggtttccctatgttttgacgaaaaatgtacagtttaaaacctttctctcagtctgttggttggctccattcgcagcttactgttttcgtcaaccaaattttgtttatccatttcttaaatcatcacttaatcattgcctagttctaatcccaaagttggatcagaaatccaaatttcaaagtcgttatacagagccgtagctttctggcaattttgattcccaccaaaaaggtgatcactttatattagattcctcatcttttctcctattaattttgacccattcgcttcttatcactctcacacccaaaaaaaaaagacccatgaaaatccacccattacccagaaacgaaaataacaacaatctgatccatcacgctcgtgatccgacccgagaacccggaaagaagctccgtcgtctcccacatatcttcagccgtgttctagagctgcccttgaagtcagacgctgacgtggctgttgaagagagtcatgactgcttcaggttcgtcgcggaaacagacgggggaggaggaggaggtgtgagggcttacatggttgagattcatcctggtgtgaccaagattcttgtgagaaccaatggttcatcgtctcttggtttgtcgcttgatgagcttgagcttgacgtgtggcgtttcaggctaccggaatcaactaggcctgagctcgttaccgtggattgcgacggcgatggagaattgattgtcactgtgcctaagattgaagacaatggtagagatttgatagtgcttgtacagtaatctaatgtgtttgtgatcaaatgagaaaaatcttgactttttttatctaatggttatcaaagttaagatctttttgtttctttatgaaaatatggatacagagtaggttttgccttatgtaacgtaacatcaattggttttagttttagagataaaatcctttgagaggggcaaatttattgaggatctctgattcacgtttaagagcattgtctttcttcatttcccattcaggtttcttcaagttagctgcttgaacttcttgaaccactttagggattgagttcgctaccatcttctgaccaaagattagatcaaccttctctttccccttgttactgatgcagcgggtaagctcggttcgtttagcttgaagctgagcgatttgctcgtcaatttgacggattgtctctgagtttctatcgacttccgtttggatattgcctagcttgtcctttaagtcgctgtattcgtacttgagagatgcgaccttcgctttgttaagctcgagagcggagaagaacctatctgcttctactatcatgctttggttctcttgaaaaacttcgctgaaagttggaatttcttcgattagcttcaacctcactatttcttcagctgataggcttggatctttcttgagtttagctgccaagcttgccatctccgtagcttcattagacatgaacaaggaagagaaatctttctccagaagcgatgaaagcttcattcgagcttctgtccattcgtaatctctcactggagagcttgcactaacgggaagtgatgatgaagactcctgtcctgcttctgaaggctgttgctgaagaagattctctagagagttcagataactgtcaaactcttctgggtttatatccacaggagggtgagagactgcaatgacaccgttcatagaagaaacatagatatgcggaacaaaagcctcttcttcttcttcttcgtctgcatagttacctctgcgtttcttcatcctcttgctgcctttctttgcatctgattccttgttttcttcagtcaagtcaaacacatcaccttgttgctgtcttgtgtaacgtttcgaggaagattcccgagctgacttatgttcagcagctggtgttgttgtggctgtctttttcctgttgctagctcgcggagttgctttaggttcattagtctgtatctgcacctgttttctcttcctctggctgtaacgcgaagttgatccttctttttttacatcctcagcatcctcatcttgattctgtccttctttggatgtctcttcaaacagagacgcagcatcaactacagaaaaaaagaaacatcattcatgtgttgcagatagagttttatggctgacgcaacagaagagtgttagttgctacctctttctgcaggctgaaacaaagccggaatgttccaggtaaaagatgcaaagaatgcattagcatccatatcagggaaactagtttcgagataacgcgaaagagtgtttttgcttgcaaaagatttgggtacattcttgcccttaagcctctccgggagaatgagtaagcgatccttatggaacccggcattattcactctcctcccaactctccaagtccaaacatcgccggggctcgggaaatcgacaggtgcaaacggcaaaccttgaccactagaagctggcggaatcgccgggagttgattcaaatcagtgaaggagcttctgtcaccattaaccttcacatcatcaccatcaccatcactgttgaatccgttttcccgataatagtcattctcaaccgggactggttcagtctccttgcttctattactcattgacactactgattcaccatcaaatctgtgcagattcataaatgtgattgaatcaaataacataacttaactaattgctttgcagttataatcacatatattcattactctattcccaataacaaaacaaaatcgatcatgactcaaagtttcctagaatcaatgcagagaaacctatacagaagtgtaaacatattgatagttcttaatgaattgaatttacccaggagaattttgacctatctcttgatccatatccatcgaagcagaccaaaaaccctaattcctgcgatagataaacacccaaataaacaaagcaaaggatgaattctaatctataacaatgttaagggaacaaacccacacaaattaaaagttaagttgattagaaatttctccagaatgcagataaagatacgaactttggagagtcaagaacagagtagccgatcttatgcttcaactacaacagattacaaatttatcaaactcattcgtttcttatatatcctcttttcgatcagattagtcctacaaacagaggtggaataacagttatacccttttagtttgtttttgtttacacagatgaagattgaaattacgattataccgttcaatgtttcttcttcaccgacttgaaagctatgacctttccgatcaccggcgttagttatgagcctcctctccgcggacgcacttgggttacttctcaagaatgcaatctccgcgagttccatgcgtttgggtcgcgtcgttcacgcaagaatcgtcaaaaccctcgattcaccaccacctccgtttctcgcgaactatctcatcaacatgtactcaaaactcgaccatccggaatcagcccgactcgttctccgactcactcctgcacgaaacgtcgtctcttggacttcacttatctccggacttgctcagaacggtcatttctccaccgctttggttgaattcttcgagatgcgacgagaaggtgttgttccaaatgacttcactttcccttgtgcttttaaagctgtggcttctctgcgtttacccgttactgggaagcagattcatgcgcttgctgtgaagtgtggtaggatacttgatgtgtttgttgggtgtagtgcttttgatatgtattgcaaaactaggcttagagatgatgcacggaagttgttcgatgaaattcctgagaggaaccttgaaacttggaatgcttttatatctaactctgtgactgatggaaggcctagggaagctattgaagcgtttattgagtttagaaggattgatgggcacccgaattcgataactttttgtgctttccttaatgcttgttcggattggttacacttgaatctaggaatgcagttacacgggcttgtgttacgaagtgggtttgatacagacgtctctgtttgcaatgggttgattgatttctatggaaagtgtaagcagatacgtagcagtgagattatctttactgaaatgggaactaaaaatgctgtttcttggtgttcattggttgctgcatatgtgcagaatcatgaggatgagaaggcgtctgtattatatttacgctcaaggaaggatattgttgagacctctgattttatgatatcaagtgttctgagtgcgtgtgctggtatggctggtcttgagttgggaagatcgatacatgctcacgctgtgaaggcgtgtgttgaaaggactatatttgttggaagtgccctcgttgacatgtatggaaaatgtggatgtatagaagattcagaacaagcgtttgatgagatgcctgagaagaacttagtgactcggaattcattgatcggaggatatgctcatcagggtcaggttgatatggcattggctttatttgaagaaatggcaccacgtggatgtggtccaactccaaattatatgacttttgtgtccttgctttccgcttgtagtagagcaggggctgtggaaaatggtatgaagatatttgattcgatgaggagtacttatggcattgagccaggggctgagcattattcatgcatcgtggacatgctagggcgagcgggaatggtagaacgggcttatgaattcataaagaaaatgccaattcaaccgacaatttcggtttggggtgctcttcagaatgcttgtaggatgcatggtaagccacagctgggattactagcagctgagaaccttttcaaactcgaccctaaggattcaggcaaccacgttctgctttccaatacgtttgcagcggctgggaggtaaatgaaccgcattgattctattcaatttttattcatcttgttaggttgaaatcatattctaatcaattcaaaagaagccacacgatgctttgtaaacaagagccacccaaatgtttagaagaaagactacaaaactaggagtatctgagcattatctgaatcgagttttaaatagatgaaacttgtgttaaacatgaagcaggggagaccaaccatttattttgtcttcagttacttatgatctaactatattataactaatcaatgataggtgggcggaagccaacaccgtaagagaggagctgaaaggcgtagggatcaagaaaggagccggatacagttggatcacagtgaagaaccaagtccatgcctttcaagccaaggacagatcccacatactgaacaaagaaattcaaacaacgctggccaagctaaggaacgaaatggaagctgcagggtacaaacccgacctgaaactctcgctttacgatctggaggaagaagaaaaagcagcagaagtctcgcaccacagtgagaaactggctctagcatttggattgttatctttaccactcagtgtcccaatcagaatcaccaagaaccttagaatctgcggagattgccacagcttcttcaagtttgtctctgggagtgttaaacgagagatcattgtgagagacaataaccggtttcatcggtttaaagatgggatatgttcttgtaaggattattggtaatctttattagtttaggcttaacatttatttatatctttgtactataaacttagtcgattatgatcaaaatcttctaatttcaagacttggtaaaatccgcgttataaaaacatataaaaaaattggatccagctacattatggacattgcattcactacgtgacctcctcttaagtcttaatacacgtatttttgcatgtataaataagcattgcctccttaattacatttgattaaaaactaaacaaaccaaaaatgtctaattttctaaggaagaagctacacctctgtttctcctcttccggtggtctctcaccgtcgattccttcctctccgatcatcgtatcaaatcacaacgctcaatctcatcctcatcacactccctcaatcttcatcaacaacttcaactctctttacgatcagctctctgtttcttctcccctccaccgccgtcacagttccgagaaccccgccggggtgttctccactaaccgccgcgaagaagaagaagaagacgaaaccaccacctccgtttcgaagcttttaagcggcgggacggcgataatgaagcacatagagtcaccggatccgtacagagatttcggaagatcgatgagagagatggtggaagctagagatttaacgagagacgtcgtcgccgatagagaatacttgcacgaactgttattctgttatctctatttgaatccgaaacatactcacagattcatcgtctctgctttcgccgatacgctcctctggttactttctccgtcgccgtcgccagagcattttttatcctaaatttaaattttttcaaataaatatttgggctttataaggcccataataattgtagcaactcttactatactcattgctgtatctgatcatttacttcagtcttcagatatctgaattatccacaaatctaaaattgagaaaacttaaaaaagttcccaatttcgaaaaatgtcactaaccgcacaattctcgccgccggtcaccggaataaccaggagtctccgggatacaaaaccgtcactgtctaatctccgtgtatttccggtttacactgagataagaactatgacgacgagtaatctgaggaaatcggcgtgttttgtggctaaggctatagaacagagacgagatacagctggatctgaatcggaatcagaagcgactccgtcaccggcggaagagagtggaagcggagaagataaggaagtggagattagcgcgataggagcagagataaaagcagcgatggagcagaggaaaacggcggaggaagagaaagggaagaacgagtttcttagtggagttgcggaggaagtgaaggagattgagtggccggcgtttcagaaagttctcggaactaccggcgtcgtgctcggtgttatcgctggctctagcgtcgtcttgctcactgtcaatttccttttggctgaactctctgatcgagtgttcatcggaagaggtgttcaagacttcttcagctgatcctgtgaattgaaaatggtaaaatttgtgtgtacaatttttagtgattgcaatgagaaatcgaaacattgttgatttgtgtagatgatgataaagagaattatcggaatcactccttttgagcattaccttcttcttatcctaatcttatatttagcctgaaatattgacttgggttatgttggtttagttttgatcatgaaacagtatgatacttatgaacaaagttacatagcaaatttaaacttcattaacaagcaagtggttcacaaaagaaacagagaaaatctagtttgacttttattggcacacaagagaagatacagatggaagcaaagacgcaatgtaactaaagatgaagagtctctataggagaaactgaacatctcttttattttggcgtctcttaagaagaaatggagaatgttcaagcctcgaaggtcatggcttccgcttctttccttgtcgcatcgaaaagtaccgttgatagatacctctccccgaaactcgggaatatcgcctgtaaaataattcagttgatttcgtttacatcagaatcagaaagaaatccgggttatgtaatcagagcttattggctttggggtgatgatagaatcaaagagcttaccacaaatagcttcccagcgttttctggcctctgtgcaagtttaattgctgcagcagctgctgcaccggatgatattcccacctacagtatagcttttgtttttagaaacagaacgaagttgtaattctgatggagatagctttttgttgtgaaatgtgaaacacttacaagaagaccttctttaagagcaagctgccttgccatgtcaatggattcatcacttgaaacctgttgaaagcgttacaggaaaatggagagagtcaagtaagaaatgaagctctcttgcattcaattgtgttttgctatcagtcgataatatcgaaaagcagtcttacctgaacaacttcgtcaataagatcaacattcaatacacttggtataaaaccagctcctatcccttgaatcttgtgaggaccttgatattttcagcaaacatcatgtgttaggaaactccgaggataaaaaataagacatgaggcaaaccgagaaacgaggaacatgcatgcatggttatcgtaataaacgcagggggaaccaaaatcacctggcttcccaccggatagaatagcactttcaactggctccactccatacagctaacagaagaggaaacaaaatgagaaaccgtgcaaagacacaccacttagtcacttagataacaaagccagttgttcgaaaagatggagctctcaccttgacgtttgcgttctgttctttaagatacttcccagcacctgtaatggtaccaccagtaccaatcccagaaacaaagccatcgattttgccaccagtgcctttccatatctcaggtcccgtagtctcatagtggatctgcatttgacagtgaaattccatcgacttaatatggttcaaaaacagacaaaaacagatacactaaagcaatagtaaataataagcataccttagggttggcagggttctcaaactgctgaagcatgtaaccattgggtgttttcgccaaaatctcttccgcctttgcgatagctcctttcatgcccttagctgggtcagttaaaaccaactcaactccaaaagctaagagaatgattcttctctcagtactcatagaagctggcattgtaataataagcttgtagcctttggcagctgccgtgaatgctaacccaactccagtgtttccacttgttggctcaatcagcacactctaaagaacaaacaaaaagtcagaaacaatgaaaacaaaaacaaaatagtggtttgaagattcagataatcgaaactgacctctcctggtttgataagacccttcttttctgcatcagaaatcatgctaaaaccaatcctgcagaaataaacaaagtacaaggtcttcacaaaaccgaaactcgaagcgagaaacaacacatagtttctggactagagaagaaacctgtctttgacgctagagcacggttccatcatctcaagcttagcagcaacacgaccaacacatccttcagcaacattgttcaaatacaccaatggagtgttcccaatcaactgccaaatagaatcaatcaatacatgaacatggaacaaagctcactccttcgtgaaatgaacagtgaaagaacttgaaagccttacttcagtcacatctttagcaattctcgaggccatgattcaagcttcactgcttaaattcacaaaaagagaaaagtaagaccaaaggaataaatcatcctcaaaccaaaaacacatcatacaaaatcatcaaacataaatctccagatgtatgagcaccaatccagttatacaacactcttaacaccaaatcaacagatttaacagcgaaataagcttaagcccatacaattatccgatccaaacaaatataatcgaaaccggcagaggaataagcaagtgaatcaaaaagtatgggacgaggaagaagatgatacctgaatgagaaagtcaataaccttgacccgaatcgttttgaagaaaatggagaaaatcggttgtatggaataaaatcttcgaatgatgagatatatgatctctttggtgtcagtcacatggcacacgctatcaatttagaaaaacgcggtggttggtcaccagaattactacttctcggtctgatttggtcatatccgtattaagtccggttaatattttccataactggggtttgaacattcggtttctttttttcagttagtccgatttggagttttgagtatggaaaaataatactgaatttatttgttcaaactgttttggaaaaaatatttcccttaattacgaatataattaaaattttaaaattcattttattagatcttggttaattcggtttaatgcattaatgaatttcggtttaagtcggttttcggtttttatgtcccaccactatctacaaccgatgatcaaccttatctccgtattcaccacaaacagtcatcactctcacttgacacaaaaactcttttgtctccgtctctctgtctctcatggcgactcttcctctcccgactcaaacttctacaatctctctccctaaaccttatctctccaattccttctccttcccactccgtaacgcaacactctcaacaacaacaaaccgccggaactttctcaccaccggaaggatcatagctcgggcatataaagtggtggtagagcacgacggaaagacgactgaattggaagtcgaaccagacgagacgattctatctaaggctcttgactctggccttgacgttccctacgactgcaatctcggtgtttgtatgacttgtccagcgaaactcgtgaccggaacggtggatcaaagtggtgggatgctaagtgatgatgtggttgaacgtggctacacgcttctatgtgcttcgtatccaacttctgattgtcacattaagatgatccctgaggaagaactcttgtctctccagctcgccactgccaacgactaatcatcttcttgatttagactaaagaagtcttttttttggtgtaatacgaacactttgtaacgaatcttgctatgagacttcgaaatcttgatttcaatgagccaatacaaacagtgatacataacataatcacagtgaaacattcctggtttaagatgaatctattaagtactgaactaaattcgttgattgaaacattaggaaagtgaatagatatgtataatttagattaataaacacacaagggtagactaattcagaaccagaaagagtgagagtgttagctacaaatgatacgatataaaaaaagagagattacaacaaaaacgaggtagagacaaaacgtagacaccagagatcagtggttggttacttaccatcttcttttttcctttgtcattgtctaatcagtagtaagcatgctgaatatggtggtggtggtgcgggtgaggatggtaaactggagggggtggagcagccaccggactgcagtaggtaccatatgctgtcggataactgaccggagaggtttggtaagaaccatgaaccgcctcgggtgagtattggtatggagggctcctgttgctgtagatggtaggtggggatgtggtgtatgctggtacaccgtattgaggtgagtgactttgggatctgatgaatgttggtggaggcggtgggaaagaggagacgtaagcgtttgtgatacgccctgctttggctggtggcattggaccgctgtagcttgctcgggttctcttgttggcgggaatcacggctggttttctcttctcggttttggtcttctctagctgatccaacctcttcttgagattctcgggtgggaattcttcctcgagtttgtattcttctatgcattttaagactgctctaagtgctgattgctctttgcgcgccacaagatgctagaaaaatacacacatacattggtaagcgagtgcagaagaaacagatccctgcaaatggatccagcaaagaaaacgagtaacacaaatggaggaaagtaccgcagatcggccagaattgttggaatcatcagtgattaaagctgtagctttctttgcatccctcagataagctttgagcaaaggaacaggagggaacaagtgtacaagaccaacttcaaaagtgaaatgaaccgcatcaagctgttgtcccctgattatcaactcttcaatcatatctgtgtgaagccataacaacccaaaaaccatcattttccatttcagatactactcacagattcccatgacaaaagacaacaacttgtgcttccccaatatatagctaaaaacatctaatggtaatcaaaggtaaagaagaaagattaccaggcatttggtcgcccaaaccaactgaaacagcaagctttggcatctgtttacgccaagctgaaccaaccacaagtttcctataaagagctagatcatccttcttcacaatcccaaaagtcacaagatgttgcagaaacgtatgaacatcaggtgttttcacattctcaatccctcctctctcttccaagctagccttccacgtctcagcaatctctttagctttctccttaacgctaggagttacaagtagccgagacttccccatcactggatcaaccataactggaatcaaactctccagaatcacaacacaagcccatccaaaatcattgctcactttctctccaccacctcttttatccaccggaaaaacctcagatacagcttcaagtactaacttcggcggatccacacaatctaccaacgccacaggaatctgtgaccggagattctccaattccttcttcctcgcaatcacaaacccccaaaatcctcttgcgtccatcttcaaacaaagcgacttcagcgccgataaaagcccgtcgccgtcgtcgacttctccggtatcttcatcaccacagtctctagctttctccagcgaatccaacgccgctctaacgcgttcctcaactttcccctccgcgatctcgacgctgtggtctatagtcacctcacgatgcttgagtaactcaatcgagctctgcgtttgattatctagggtttcaatcatctgtctcagagcttcagatttcttcatcaggttttgctccatggaagtgaaatgctcagagagctctttccatagaagattgcagctcgtcattagagacgcctgcttctgaaactcaaagaaactcggctgagacgacttaatcaactctcctggatcgggagaagactccatctccggttaatcgtacggtgaagaaactcaaaactttagtcgattttgcagagaagaaggtaacaaaagtgaagaagaaggactgatttgtttgttttgcaggaaaacctaaaaatggcaatagtataagaggaggaggatgacgtggattagtcagaagaatgacacgtgtaatggcgtctgtaactatggcgcgattatgacagccatctagagtgcgccttgtgtgcctgcgtacttttatgacggcagcaatagcaccaaactcccgattggttgttgctaacgtgagcggagaacgcgtatttttagaaaagttgtggtaaaccgaaatttgtatcggtttaagtgaaccagaaaaaggaaaaggtaggagaaaatcggtgggtgaccaccacatgcgttgagtcagaagacagtgaagcattgccggcataaatgtatgcaaaattgtactttacgaaattttaattttgtagtaaaacgtatattttgaaaaaaagaaaaaaaaaagagaatgttgttgccaagaaaaaaaatgaaagtacatttgtggagaagaacttgtagatggtgtaatgaaataggcatgcgttggagtgttgggcccaatatttgtgtttgtagacgtgatgattaggtaagcacaaaacctttttacactaattatttgtgtttttacatattacataatttaatcaaatatatgaccaaaagattcagaaccaaattcagactaatactcgtgattttttttgttctcctttcttctcgttgaagcgcaaagacatgcatgttgataatcttacagaagtgttaaaaaactttcttttaaaaagaataggtgaagataattcaatattttaattttatcttttatttttcatcataaattttttcttttttgtgttcatcgtattttgtagaagagtcaagtatttttgtcatctcatctaaaattgccaaccataatttaaatcagagtagaaagatttaaacttcgagcactcaattgataaggtgaacattttaaccacgcactaaccatcattaactataagaacataaagtaacgtacgtattttattttcgacgtaggaatctcattttctatatatagctagttatcgtatacgttaacatttaacaaaacccaaaagaagcacaagataatgttccatatcacagtattggaccacaagtccacaacattgaagatatcctattatggaaaatatatgtttttttttagtcctattatgggaaaatatatgtttttaacgacggatatgtgaggatactgaattatagccttacttacaaagattgtgacaagataaaacaaagcgaatgaaacgaaatatttcactttttggataatagagttgacaaatgacaactacaacaataattgattgtttggagttaacgtgattagttttctccccgcatgttgaaacaggaatgggctaagggaacatgatatttaaaagggataagagagattaggagggttcaaattcacaagggatcataatgatctaaagtcgtgcagagtatgcagtgatttgacatgaatcttggcctaaccttatatagcaacatgattaagacactgcataatctaaagcttttaatcattatgtgtaaaattaatatatccatgtcctaattgtcaatgatgacggttataatctcatatatgataaaagcaaacattcataattcataacacttcttctgtcttttatcttggactactaaatatgaaacaataattataccatttcaggccatgtatttgagaagatatatatatagcaagaacgttgtgagacaatatattatttagcaaaagtgaaacttcaggcaaaagttacttcgtatatatgattatattttcatgttaatccataagactaaatctagagtcaccaacacaaatatatgaaactttgagcgcaaaaaaaaacaatgacctaataaggcatatatagcctatgaccaagatagccaccaattaaccaaatattaaggcaaaccattcccacgagatactcttccctaccactttcgttactctagaaaacaccatagaactctgaatagctctttggcatgtgacttaaagataacaaaaggggatatcattggctggccacaaaatcaatcaccactttgcgagaagggtaaaagaaaagggaaaaaaagcacaaaaggctaaaaacatatcaccagaatctatcaaagttctgagagcatatatcaagcattatcataaatatttcaagaattcttttcaacgagaatcattcagatcaaatgtaagttgtaagttataatatgtgtttttttttacgaagctgactactagactagtatcagcttccgggggtttatcaaattgtctccatgtaaaatatgtcagactggttaaagcatcaagactgttttaggtttcgataaatttgatagaggaatatgctcttattgattctcattctccaaaacataagtttttcaaacagtattcacattgatcgactgcaaaacaatgaaatcaccaaccttaaagatgaatacttcatcaaaaggttaatcaactttacacatcaataaatttatgcaaaatccaaaacatcttccaagattcgctccaagtaccaatctattgtatattagattcagacattttagatgtgcttggtttaatttgtttaatcgacttgtaaacaaagaagtcgtgatacgagagagattcataggtaaagacaattagtaacatttgatcaaacaataaagttgcatagatagagttgtacaagcaataaacaagggcaagaaattgcaaaagtactccgcattcatttagcccaaagatccaaaagataggttctatataccgacatggggacatccaatagtttataagatactacggctactaagttgcttcatctttatcataccaagctgctccaatacttgcgaggtttttcatgtttgaagctgcaacatacaagaacacgatatatgaatgccaagttcgatacaccattaaaactaatatatctcacaagctcgccagtcgaatccacacgtaactaactttatcagatattggttcctgcaaagtcatctgaacgcaatacaatagatataacagcaaaagctcctatcaaatacttgaaacggtaattcatgctccatcacaaaaaccaaggatatttgagtcagaagcatacctttataacacttgtcacgcgggataattaaactgttacagctagagctcgttcaatgatgaaggaatctgtcaaagtaagcacatgattagaccacaagaacttcccactaatatatcctccttcttctgccctctctattgcaatctctgtacgccaaatttctgttggagacttcttaaacagaattgcaagtcgtccaccatgattcaccattctacctgtacaactttgaagcccctcaggtaaaccttcaagaccccagaagactgtccccatccccacaactaaatcgtacgcaagtatttggttcatgcaataaaagccgtacaacacgttatctatagggcaagattcgttgaaccataatcttcccaacgccaagtcttcctcgaatctaccctttttcggatcgtaaacaaacatagtattctgacctattctatagatcttatcattcatcacaaagaagttcatttgctcatccatgtccacattatccagacttaaaacagactcccaagttcgcttcttgaagttgaatacctcgacccaactcaaagacggagcgttacaacctccgacaacatataatttcccgtcgatcaatcccacggcggcgcatttacgtggctccttcatgttagggaggaagcgacaagtgtgagatctacaatcgatgacagacacagtagagactaattctccgtcaatgcatccaccaatgacgtaagtttcagaaccggacgagataatagttgttccatatccaggaattgaagggaatgatggaaccggaactaatctatggctaatctctgttgttccaaagggttttagattgagtgtgtaccagctaagggtttttgtagcttctgatctaattgcaacatagaggatattttcagtgcgacgaattactgaccgttcgatgtagatctccggcgaagccattaaacgcctgaagttcctgcagacgagtgaaatcgccgggtagtaacatctcgggacgcgtgcgaagcaactcacagcgatttcgtcatgaagtattgccagagaagaagaagaagacgccgattgaagcagtttcttctgtggcgattctccggttattgagccaacggaactcgcggcggaacgagacatcaacgacaatggcgaaagagacgggagaagaaatgattttttaaagtattaatttcttcatcaaaatgggcctataaagcccatttctctcaaataggcctcattgtacaagagcaaaagagggcaacacataaaagaaacgacgagcatggaccattgaccagtttttaacatgacaaacaatacagagaaagctccatgaatcacgagcatgacactcgtaaatggtgcacacatgaccaaaacaaaatgattacgagtaactcctgattaaagagctctggcttaaggtgaacaaagtctagaactagagagagcaaaaagatcctggtgaccaacaataatcaattagctagattagatacattgacctttgcaaatgaacaaagatccagcatgtttgacattgtacataagacattcagacaactgacccatgctcatcaagtcctcttatgaacgtgacaagactcctttcgagctgcaaaaatgcccaaaaatctaaagcgtcagacttgttttcttatcacatacaatctttccagccataatttgcttctttccaaattggattttgttatcatgaatctttgcaaataaatagtggatgatgaatgagatgtgtagtgtgtgtcaaagtcaaaccttggtattgtcccaccgcggcgtggatcagactctgttgcttgtcggagagctcttgcaaaggccttaaaggtcgcttctattatgtgatgcgagtttttaccagcaagctgtcataataaatagaaatgaatcaaatcttatcaagaaaggtttgtcaacagatgaaacattaacgttctgttattgtcctcgtatgctttaagaaagattggaatcctaatacctgtcggatgtgaagagtcataccagaagtattcaccaatgactggaagaagtgttccaccaactaaatgggaaaagagtcatttagtgattttaacaaacaaagaaaacactagaaaaaccgaaaaactggatactaaaatactaaatgtgaagaacctgagtgtcgtatgttcctactctctgcgttggaatctctaagttgtatccaagatatggtctaccagatagatcctgccacattttcatccatcaacaaccaaaactgcttccggaaactccaaaccactgaacaaccaaactagatagataaaacagcaagtttacagattgtatcataccagggaaacatgtatgagtgcttcatcaagaggagctgtaaaatcgccaaaacgattaatccctttccgttccccaagtgcctttaacaaagcctaacataaacaaaaaatagcaatcaaaactacaaacttccaaagaatgctactctattaactcactagatagacaaaggaaaggcacttcactacttacagttccaatggcaagagcaacatcttcattagtatgatgatcatcaatgtgagtatcaccagtagctcttacgtgtacatcgaacaagccatgtgaagcaagttgctaatcaaaagaatcacaaacaacacttgataaaatttcaatacaacatatataaaatgaaccgactcataagtgtttaagctctttccaatgtcaaaaataatcaaacatgaggaaattttcaactcccagaaaatcaaattgatacggagaaaggtttagttacatctaacatatgatcaaggaaagggattccagtggagctatctgaaactccatgaccatccaaattaatcttcactgatacatttgtttcctttgtttctctcttcacttcacctattcgagctgattgaaatcaacaaaaactaagaaatcaggaaatgaatagtgaaatgagatttcattctcaggctacatagttaaagaagttaacctgattcgatgggtgaagccgtggtaatcgccggaaaaccgttatctccgggaggaggcgaagcgcaggagatagatggacgatgctgagattgagaattcattaccaggaatcgaggaggaggaggatgagaagaagcgattgatgttcgtggaggaagcaaagccctagagctgagatttggtctcagaagctgagccggtgaagaagagagcaactccatgcgatggttaggaagagtagagaaagaccacttgattttgattttgttacttaaactataacgacgtcgtataacctcaagtgtcgttaaaaaaaatatgagaacaagtgattgcctttgctctagtagcttgatggtctgcgaaggcactgtgaagtgtaacgcgtgacgtgttcgatgcttcgggcaaaggcactgagagagagacagagaagagaacaaagcagtgctacctcttaattgagtattaatttatagaggttttactgtgtataaaaatcatatgaggtattctaaaatacctctctttttttcttcatatagccacagaaaagatggaaatgtaaaatgttgactgcatagtctgcattagttgaaaagggagttgtatattgatatatcatttgggtgagtagcgaagaattggctgaattttttcaaatgaactatttgtttttgaatatagagttgatcaaatatcagtttttttcacaaacttccagcaaattccattagtgacatcagcgtttttcttaataaactcaatttgctacgacactacaaaaatttgaaacgtgacatcgttcgccttctctcgtagcttgtttggtcagcgaggcactgatagtgtaacgcttgacgtgatcgatgctcgagcaaggcattgagagagagagatgaaactaggctttgacgataatcatttgaggtattctaaaatatctctttttttagatagaaaagaaagattaaaaaaagacatatgtaagaaattgtctcgagtcattagatcaatgcttcataaaaacaattagtaagaggaaccaacgagatgataacacagaagatcagcgcaataaagagggcaaaaaagcctcaccgtcgtgaagcttggcggcgagagaaggctcaaggccatgaacatttacatattatgcataaaacatatatatagacattattaacaaattctattcgcaaaaagcgattccggtgtttgaactagacaccaaaatgcttaaaaagacaagatcaacatttcaactctgtttcattgcgtttccggagaatcgtcatcccctgaaccatagacatctctgttttccgttgcaccagtgtctaccggagagcggatgatgtgatctaagaaagccatgtcgctgtttcgttgaggaggagactcaattaaactatcttcctcatcttctccatcaaatcgactataggaagttttgcagtccatgtgcttctccatatctgatgatctcgccatggttgaagttttgaacgcagtctctagcattttggggtaaccatcgtggactagactatcccgggaagcagaacttacatcctcatatggttggtgttcgaccaaataatctgataccggtttatctcttgacggtgatgtggtctccaagacggaaacttcattagtcttgatcgctgaattagtgccttcattgcatgggtcacagtcttcttgacaaacaatggagccaaagtaagaatatcgataggaacgaaaaagaagaagaagaagaagaagaagaagaagaagaagctaaattgttcttaaagtaaaacctgtgtcgacagcagactcggtatgtcgtggtgctaacagctctttctgtaacacatcaatgccagggaaggttagcagattcatggaccgcatttctttcttcagagaatcctcgacttgtcgaaacccgaatttggatatccaaacatggctaaagtcggcagttgcagggataattagtaatttgactttgagatgttgaagagccttcacatcaaaagacacagagaaccagaaaacaaattagcagagttatacagaaagagtcagttaacttcgctacatcagcggttgaacttactgattcaactacgctgaaaagccgccggcacatcccttggtgtctgtagacatgccgagttccaatgaacggcatctcagctagacggttaccatgaaatctaaagagaaaagcaaatatcatcactaagcagtagatcccttaaacaggaaaaaaatgcatcaaagtaaacgaaatcaagtgtataagataagcatgcacagacaaatatatcttgacactagctttatctctgccatattgttgccatctcacatataggattgaaactaaaacaaaggattataaggaggggaataacctaatagatgctgaagcaactatttcgtcgcctctttcaagaagagcagtatagaatccaccaaagttcagccgattgaagttggacctacgaaaagcaatgtataagcaaacgaaccaacacaaagaaataccaaagaaaatcactgtagtaaaattacgcagacaaaattttttgcagtgctgaaaagcttacccacaattgtaaaggacattttgtactatattcaccccactcctcctgtcaataatgggcagaaagcattcatccatgactgtcaaagctaatgcaagcttggaattgttttccacaatatgagggtgtccacttaaggataaatctgaatttgtgcattccctatgaactagagaccatgaaaatccagcttccaactcatgtttgacaccaacatacttcttgacaccttcggagagctgaaatcaacaagaaattatcttaaacagaatgctttggtaaacgacataaatacttgggaatcacacaggacattatactcattgtcttttagaattcagttatgcccgtcaacaagtcactgtatgttgacgcttcataccaggattccggccacaacatgtctaacttgggtaaaaaaaggtacaaggttctaagtggagcatgtaacatccactaatctaatggcaatcataatagacgtctttttttatcagcagaaaatactaggtaacaaaatatggatcagtcacctagaactttttaatggacgttgtgaaggtaaaccacatttttataaattcaaagaaatttgcaagggttaagagacttgaaagaaaagtaccgctttgcacttcttcccacaaaaagaggtgattggttcagtggtatcagctggggtaacatttgccttgggcatgcatgatttgtgatctagaaattgagaacgttaattacatactacaaacaaaactgagtgaaaacaaaaatgcaatattcaaggcagggaaggaataatgacatacattttttctcacacattttgcaggtatttgcacccacagtctgagtaacatcttcaataactgccttacagaatttgcatgtacaattggggcaatgccaatcaccaagaggaaacatctgtaattgaacctcaaaaagatccaatcaggcatcagatgaccctaaaacaaccgttcaaacaaccctggtgtaattaaaagtcaacgacacttcagctcaatagagtttacatatgtattgagtcttgtccgttcatttagctaaaagtattattgttctaaaacctgtttatacagagcaccttataaactattgtacctttgtaaatttgcatagcttagcactgacttctcaaaaataaccaaaataagacatatacacagcaatatcagcatacccgtatgtctaggcatctttggtggaaagttgagggacaaccatcacagcaaactaaatcacctccatctccacaaataccacaagcatcgtcatttggatcatcagcaattacatctactgaacaaaaaccaatgttcccagcacccttttgcttatcccatgcatctatttggcattgaagaagagaaaccccagaattcaaaaatatgttctgaaatggctgccgcaatttgcttccagcatgtatctcaaacttcgaaaccgcaagaattttactacagcaaccacagtgaatcccgtctcttgttatccaaccctcaagcatggcgcgtgtccggcgttggttcatgtacattaccttttcactcaactgtaaggttccactatcaatcagccatgccagtaccgtccgtttttcagatgagggtacaaaaccatcactctctgaattatctcctctgactgaacgccgcaccaacagtgtactcctaccatgtttgctacttttccctccatccacacggtgagaggaggaaccagttgacttttcagtttggtgatgcaaagggctttcactttttgaagttgtaccctgtgaactatctctgctgttgacctcattcttcactgacatgacatttcgctgttgtttatgaacatacctgtcatcgtttcctacttcatttttaatagctaggaaattccttgcaaaagtcgcttttccatcactatcactggcagagtgtagctcccttttcatatctttttcaatcttacttttggttttccttgttaactgactgagtatctcatctgatatcagagaaaatgtggaactatcgtcacaaggcttggcaactttttccccactatttaactgcttcagaagtgcttcataagccttgataatagaccaatacgctgttcccctgggacttatataaactgcatctaggtagtctctattcctcctaggtctgtagtcaatcgtccaccctgcttccagtaacatttccctaattcgctcacgtaatctttgtttttctgtgcctgaaccacgcctaatctttccatctctaattttggaaggcattgacgcttcaggtaatgtcttttctcctccagtgcttgacatctgagagggcttatgaggttgtattattcttttctgcagccggcccgagctatcactatcttcagaatcttggttctgtcccttactcttcatggttaaggacatgggcagttttagcccatttgactgtattctggctgggggaggcagtttcggcaacttttcagtttttaaagtgtttggcaactggatagcaacacgtattttaccagtctcttgaatcgttgagccacattgagtttgttcagctttcgcattttgcagtaaccctcctatcttattctgcttgttcaccatcaccttgaggacaccatttttcccctgcaccctgattggttcatcaaaattcatgtcacgcttgtacttcttctgcaacaacaacgcatgagtagttttagcttcgtttccactcaccttacacctgtttctataaccttgattaccaaaacctatgttccctgatccatctaaatacggttttcttctcttctcaatatctaaacctttacgactagaaccagttccatattccctatcattagcaaagtgagcagaccccaaataagctttcttaccaatatcaacaccacttccatcaaacgacctcctcatcctcattgccatcaattcatcttcactctcctcatcatcatcattgtcatcatcatcatctaatctatgtctcttactctccttccactctctactattccccacaaaacaatcatcccctttcccttcaacacaatctcttttccatccaaaacgactctcttctacattacgatactggcgcatatttcgagggatggtaaatctatcgctagactcagagtcactcgtaatcatcctagacctcttattggactcccaattcggacgactctctgaaaacgaacaaatcctaccaacaccatcgttcttcttcacaattaagcaaccagaagaacttctcttcttaatcaatacccctggagattcaccagatctcctcccacctctatccatctacacagcacctaaaattttccccaatttcagcaaaaattcgaaaatgcaatcaccagagaccatgaatctccagcgtcgatgaaccctaggaacgccagatctaaatcgacgatagatcgatctgcaaatattccctcaatgagagacgaaacgtgacagtaattacagagaataatttccgacgcgacaatggaagactccgccgatcagataacatggattattccgacggcggtgggcggagatgtaatttttccggccaccaacaacgatttaaaatggaagaaagagatgagagtttgtttcacacggcctaattatatgtccactgtaaaaaaaaagaaaaaaaaagactcattactattgtaaatagaattttttgttaaatttaaatttaattgtgttgcttaattatttcttaaacgttgtaggtttgtcacttaccttttctgtttccctccaaatctcgttcgacgatgggaaatcccttagcgttatttcccgatattgaagaataaagtggcaagatctcatccctcgacaaaaggatcataggttatgtcaattatttactactactagactattagtgtaaacaaacatgtccctgagttatatacatgtactgtcccattagtcctagtcaaaatacccaaacataaaataccaaaacgaaaccgaatcctaagtagagaaactgaactaaaccaaaccaactaaattttcgaataaatcataaactctaaaaccgaaatatttccaaaaataatagttattctaaaactgaataatcggaaaaatttaagaatttttgaacgaaaaatacccgaataaaccaaatagatctgaaccaaaataacaaaaaaatattcgaactctgaaaagaaaaatatactcaaaacattttcaattctttgttattcagatatatagaccaaaaccaaaattacttcaaaatttttggttcctaatcggttcttgatctttcaactatcaagaaatgtatataaaaagcaaacaaaattagacttgaattatcgagataagttcaatagtttgggtgaaaaaaaaaaagttcaatagtaaaaaaagttcaatagtttttttttttttttttttttttgatgaaaaaaaaaaaaagttcaatagtttgggtaataaaatctatatctatgtggatgtgatgaaatgactaacatacttcagttgcatgatcatgattatgaatatagattcacccatgatatttatatgcattttgcaagaagagtgcatatcacattacatgtatcaaaagatttataaaaaaatcgttcactacattttctttaaaaatctcaccctcaagtaaaatattatgttaaaattgtcaatcacttgcatagagataattggcgatgaaagcttttttaaaatggcgatgaagtttgataaaggttcacaggaaaaatattacttgcataatgttaattgatttcacttatgaaataaaaagaaaataaggtcgattaagataattatatgaaccgaagaagagaatacaaaggaatgcttcggtaagggttttcggaatcgaataaaggtgacggttcggtctaagtgggttattttaaatgtgggtgatggttcttgtcccttcacgtttgggaatagtggccaaactcggtctctatagctgtccgtagacgctctcttatcgtcggatgtgtttaggtttgcatcaagtcttcagagaaactgtaaacatctttttgttatgaggtttgagggctgatcatgactccgtttttattgttttatctgataattttgtgtaatgtgacataaatataagtccaattttattgtttttggaaaatgatataaaagcgtgcatttagattcttgggcccatcgatgagtggataagtaataaaaattagtatggttttcttatttcccatgacgttttatttttcgatccattatcaagcttaagataggattggcccaactttatcgttgatttgcaagcttctgttttattattagttgtgacgttgctttcaccaaatttttctatgcaagttcaaaatattgaatgggaaaataattaatggtagtattatacattatgtaaaatgactctaatatgttcgaaacaaacttagacaaaacaacaataaaccaccatgaatgtaataacgaataaatcaaaaccaaacccataaagtattaattgacattgacttgttattgcgacttgtgtgaaagtaaataatacaaagttacaaacggtcgattgcggtatgacacgtagtaactagtaagtcatctagaaaacgttttcctctagataggttgatgacaaaattttaaggggacaataatttgatgtatctttcaaccccagttcaaaagagtgtaggaataaatggaaatgttttgtttatacattgaacttgaccactttgttgttgcgtgaaaatgaccacaacctctaacaataaagttcttttatctttatcgttagccgttacataaacatgatgataacacttaaaattattggatgggatgtgtacacgaaacatgtgaaaatggaataagattttttttgaaagttatttttcttttatattcgcattattacaaaaatatattagtgaataataaatgactagattgactgtttcatttatttaaagacaacattgtggtcaagacaacattggaaattacataatttaattcatataaacaattttatgaatatattaaaataaaaatagttattattattatgaaacatataatgtatcactacagacgataaaggatttgattttttcaaatggtaagttcataacttcccaaattactataaataagtgttaaagttagtcattatcaaattaagccactccactaattacaagctccaaaagctttctccttctttttctctctaatctctatttcgtacggatttctctaaccggagcgatggagattgacggtggagatcgtatttccggtgaacgaccgatcattatggtcaccaacgacgacggaatagacgcgcctggccttcgttctcttgttcgtgtcctcgtctccactaacctctacgatgttcgcgtttgcgctcctgattcgtacgttttactctaatttttgtagaaatgtagctcaaatctcctttggtatacgatcgaatcgctcctatatgatggttatgtacgaattgaatttctctagatatcgatttcgagtttctggactcatttagaaatgctaatcgtttgatataatcttctcgaagaaatctatttatgtgtttagttttgtacatcagattctttctcttttcattgtttttgttttgctttgtggaggtacatgtgtaactcttacttgtttatgaaattttccagggagaaatctgctgttagtcacagtataatatggagtagaccactcactgcaaaacgagtagagatcgatggagctactgcttattctgttgatggtttgtttctattgttaatcatatggtgttgaatgatatgatattgtttggcttgtttgttacatttgttggctcttgtcttttatcctttggataacatatggttttgtatgctctgaaggaactcctgcggattgcactggtttgggcttatcggaagcactctttccttctcgtcctgacctggtaaaccatattatttgtgtgtccctgtaaaagccttctgatgtaatgttagttttaaatgatgtgccaatagatctttcgatttgtttttaataacttaaacttctgcttaattttataggaaacatctaagatttgttggtctttgtagtgtttttttttccttctattgtcttttctggagattgtgaatttgtgatgtatgattgttttctccatgcaggttctgagtggtataaacgtgggtagcaactgcggttataacatgtcggtgaacatttcctcctctgtttctctttgttttggtttcctatttccttactatgttatgtttttgtacagattattagggtgcaactgttatttgtccgttttaaaaattgcattttaaactttataaaactaccaaaattgctgaaactttgtttaggattagaacaagattttgagagtatagtaagagaaactctagttagattgtttcactggaaaccagatttcttctatggccaattcaaattgttatagaccatgttatgcttctatggttcctgcctgagtttatcaaactagcacttacctggctgttaattccatcccagcgtctattctggaactgttgctggcgctcgtgaagccttcctttatgatgtgccttctgcctccatatcatatgattttgattggtaagagcttaatgtcttacttgcagagattttgcgtcttacttttaaaaagtttcataacatgtttgttatttcttctatgtttgtgttacactcctaattttttttaagcctccatacggttttattgataccatcttctctttttgccactaaatgtcttctattttattcacccttaatgctataggaaacgtggagagatgaatgctaatgattttgccctttctgcccaagcctgcttgcccattatcaacggcatactcggtgcaatcaagaacaaaactcaccctatgcaatgctttctgaatatcgatttgccgactgatattgctaaccacaaggtaagtctcgtcgcagctttcaacagacattctctaatgcctacacctaactatacctctgagttttatatgactgactcttctttccaaataaaaagggatacaaactaactagacaaggtaaaagcatgggtaaaatgggatggagacaagtggaagaggaagcacaagggccgaagatgttatcaacaatgacaatggatacagagtcaggagtagtctcatcagagaacgacacatctgctcatgcgggaaaagatagccgtttattcaaaagagaggtatatcattaatgattaatcactattgtttctgctcttactttcttttgaattcatgaaattgtgtaccttcttgctctgtttgttgttagttaagggcaagcatcagtgaagaagggagtgattctcattacctaaaagaaggatttgtaagcatatctcccatagttgtctctttaactcatctccactcatccaaacttcaaaaagaaacaaacattcttttaaaatactgcagattacggtgacgccgcttggagctctatctcagactgatgtggattgccaaaactactacaaagaatggcttcccaagattacaaaccagtcatgctcctcctcatccctttgatgctacaacatgagagaaaataaaaactctattaggaaattacccattgtggaccacaatttgtggtagacctattattatatcagtaccagttctttagttttcttaagtcttgacttactattgttgtgagcagcaaaatagttgttgttacaagtccattaattatcgtgagcagcaaaatagatatcgagtccgcgacatatgttgaaatatcaaggattcttaacaaaagcgatcaatccatttgaatataatttgtgcattagagaattgagttaacgtaaacaaagttcaagcgctggcggcagaacctgatattgcagtaacatcatcatgtgtgcaagtgggggattagtaatcttcatcttgcataatccttgttttatacttcaagctatgacctatatatttattatttatacatccgattcgaatattaagtttgctcccgtgaattagaaggaagagtacataatatgtcacgtgataattatttttcatctttacgtttctcatatggttctcattcaacgactttccaagtcggactatatatgtttttaattattaatcatatatagagacgctcctacaaaacacataaacatataggtgcatgcatataaatgtaaatgtattgttgtcgtctacttcaataacaactccatcaatgaacacatcaatacttgccatactttttctcatacaatgtgttttcactcttggtctccatttccacccacttgatcccttaactccccaagaaatcaacaaaacaagctttatcgtcaagaaatctcatctaggcaacctcaaagatctcacatttcattatctcgacctcgaagaaccaaacaagagccacgtcctccaatggctatcaccaaatccctccaagaaaccaccacccccacgtcgtcgctcattcgtcgtggttcgagccggtggtcaaacctacgagctcatcatcgacctaaccacgagcaagattgcatcctcccgcatctacacaggccatggtttcccctcattcacattcatagagcttttcaaagcaagcaagcttcctctaacttacccacctttcaagaaatcgattctcgatcgatccctaaacatctccgaggtttcttgcatccctttcaccgttggttggtacggagaaaccaccacgagacgtgaactcaaagcctcttgcttttacagagacggatcagtcaacgtcttcacaagacccatcgaaggaatcaccgtaactatagacgtcgactcaatgcaagtcatcaagtactccgacagattccgaaagcctatccctgataaagaaggtaacgactttaggactaaacacagacccttcccgttcttttgcaacgtctccgacacaggcttcaagatactcggcaatagagtcaagtgggctaactggaaattccacgtcggatttaccgcaagagcgggagtaactatatcgacggcttcggttcttgacccgagaaccaaaaggtttcgacgagtgatgtatagagggcacgtgtcagagacttttgttccgtacatggacccaacctacgaatggtactaccgtacgttcatggacattggagagtttggtttcgggagatccgccgtgaatctgcagccactcattgactgcccgcaaaacgctgcgtttttagatgggcacgtggccggaccagatgggacagctcagaagatgaccaatgtgatgtgtgtattcgagaaaaacggttacggtgcttcttttagacacaccgagattaatgttccaggacaagtggtaaacttacaaaatacagattactaaatgatttgtttacgtttctaggaactttgattagttactttaattaatttttgcagataacaagtggggaagctgaaataagtttagtggttagaatggtggccacacttggaaactatgattacatagtggattgggaatttaaaaagaatggagccatcagagttggggtactgtttacttcatgttctctttaatatagtatttaactttttggattgatacaattgttttgaaatccagaccaacctggccagttttgacctgtaaagattctttaacatatgttataattttttcaagtgaactcagtttgattttcgtttgagaattttaaaagaaatggagccatcagagctggggtatagtttatatattagcatggtctttcattttttatacataataaagtattcaagtatatcaatcttaatatatatgtaggtggatttgactggagttttagaagtaaaagcgacatcgtacacttcaaacgatcaaataacggagaacgtatacggtacactggtggcgaagaacactatcgccgttaaccacgaccattacctaacgtactacttggacctcgacgttgacggtaacggcaattccttggtgaaagccaaactcaaaacggtaagagtaacggaagttaacaaaacgtcttctcggaggaagagttactggacggtcgttaaagagacggcgaaaacggaagctgacggtagagttcgactcggctcggatccggttgagctgttaatagtaaacccgaacaagaagacgaaaataggaaatacagttggttaccggctgataccggaacatttacaagccacttcgcttttaaccgatgatgattaccccgagttaagagccggttacacgaaatatccggtttgggtgaccgcctatgaccggtccgagagatgggccggtgggttttatagtgatcggagccgtggcgatgacggtttagctgtatggagtagtaggtaattaatttaaagtaaaaataattaatctaaagtttaaaattatttttcatagtaagtaatttttttttttggtttattaaggaataaatttgtggtttgttatatgggaacaggaacagagagatagagaacaaagacatagtgatgtggtacaacgttgggtttcatcacattccataccaagaggattttccggttatgccaactcttcacggtggttttactcttcggccttcaaatttcttcgataacgatcctttgattgggtaaatacggtcttagacaaacaaactgatggcttatgtattgattgacttatgttacgtcaaacatatgatcattgaaaaaacaatttttagccttgtgactaagttattaatttgattttgattattatgtcttgaatgtattaatttcttatgttttgaatggtttagttaattagctttgatgctttttttggttcaatacttgtgattcacttatttctcaattttcaagttggtcgtgccatcggcaaaatcctttcattgtaacaccaaaacgtcgataaatttaatgaaatttggttaaattagaatcgacccacacggttgtatgagtttgttggtatattttattattctaattattattatttcttttttttaaaaaataaataagaagatgatttaattaaactatagtttaaaattttatctataacaatactatataatatatgagttgaaccgattaaatgtgatattggtttttgtaatagtaaaaaataataaaaatgttaaaaatgataatagtagcgataatattatataactaactaaaaatattttctattattttttcctaaaaaaactttttttaactgtaacaaatttttaaatttactcaattttatcgtaaaaatagaaaatggcacgttgtacggatcctaatcaaactatactttgtttttttttgtgtgtatgtgaaaatcatggttttaagttcgttaaattcgcatactttccagatgtccggttcaaccgatctaaccgaaaccaagcaagaacgaaatgggctttaaagcccagtgaaccaatcaatgaatgtagaggaacgagagtttttctgaactctgttaaatttcgtttgcgtcttctttccattctctgaattccttccatatctctctctgtgtgtcttctacaaagaccagatctctcatctgtgttttgttggtttatctcgaccaaagcccacacgtcacgttacgttaggttacaaaacaagttttttcccttataaaaaaaacattgataaaatcgaaaaatcaattcctattttgtttccaaagcaaatctatatatctattacccatctcgaattcgaccgaacccatgttctaatctccttcgcaacattggaaatctattttaaaaatccgttgagatatagttatataagtagtttggtgactcaattaggtttacacacaaagacatgggatcggctggtgtagcgagttcttcttctgatgttgcgatctcaggcaagtttcttctttttgtttttgggttttcgatttttgaccttttatcaattagatttcatctcaattcgttcatatcatggatacaaattatgaattcgagatctgaatcacagcttttgatttgttttgtgttgttttgttgatgtgaatcgattagtgatgttggattagcgatcaatcttatagcttaatttgtattaaggtgatgtaggagaaaggcttaacctttgttgaaataggagggagacccacattgtatgggactaatgtaatctgtgtgttataaaacttgcagctttgcgtgagaagcatgagaaggaagtagagaatctaacattaacgacacaacctttgaatacattgaagttgtttgttgaggctactattcagtacatcaagcgatccatatcgtatctattggctcatggaggttggtttatactgataaccactttgttagtggtatctggtggtttgcttgttactgttgatggacctcatggcaaggtataaatcgtttcgactttcctggattgtattttgatataaagaagggtctaagtctaacacatgtgtatttattgttacagcatgttgaagaagtattagagtatgtccgatatggcttgtggtggatagcacttggtgttgcatcttctattggtcttggttagtcactcaaatagcgtagtgttctttcgcatttacgaagcaattaacattagtcttactacttctatcttcttgtataggatctggtctccatactttcgttctctatttgggtccgcacattgctttgttcactctaaaagcaacgctatgtggtcgagttgatctaaaatctgcaccatatgatacaatacagttgaaaagggttccttcatggcttgataaatcttgttcggaattcggtcctcctttaatgatatcagctgctggatcgcgtgtgcctcttaccagcatattgccacaagtccagttggaggcaatcttatggggtattgggacggctcttggggagcttcctccatatttcatctcaagggcaggtttgtatactgattctctctatatatttctctttgatttgtgtagtcgtccatgcatgtgcataggtctcggttgtttattgtgttgtttgctttttctatttttccagctagtatatctgggagcacagtggatggaatggaagaattagatggttcctccactgaagatagcggatttatggcaactcacctgaaccgtgttaagcgttggttattaacccattcacagcacttgaacttcttcactgtcttggttcttgcttcggttagtatgcatcctccaatttactttaccttctgcagtagcaaatggattatgaccgtatttactgtgtcatataatatcttttgctttctaggattcaatgatcaggaccttaccattactcactgcttcgatttgattgtaggttccaaatcctttgtttgacctcgctggaataatgtgtggacaatttggcattccgttttgggaattcttcctggcgaccttaatcggaaaggcgatcatcaaaactcatatacaggttcagaacctcgtgtctcatagatactagtttaacacccaaatggttttttaactttgtttcttatgtgcttgtttctcctttttcgtaatgtagacgatatttatcatctgcgtttgtaataaccaactgcttgactggatggagaacgaactgatctggatacttagccatgtcccgggattggcttctatgttgcctggactcacagccaaactccacgccatgaaagaaaagtatattgatgcaccatctcctgttccatctcacatcaaggtaaacaacctttcgctatcccgctacattctttataaactttacgcatttcctactttgtaagtacgaagtttttcactatgtaattcaagcttttacaaaagatcaactgaatttgcgttctttttgatcttgagtaggtgaaaaagtgggatttttcgtttgcatcgatctggaacgggatagtatggctcatgctcctcaactttttcgtgaagattgtgacagcaactgcacagagacacttgaagaagaagcaagagaaagaaatggctactttgactcattcagattgataaaatctcccacaatctttcttcctcatgctccaacatcaaaacagacactatccagatttgagttgaagggccaacaaacaaaaaatgtcttctcatcttctcatcttgtcacattgattccggtgggactgttctgtgtaggaaattgggattatgagattgcaggaggtttatttttgttcctgtgattccatagagaaggttctgtaggaacaagtactcagaaaagaaaaacgcattaattgctaatttggtactgttaccaaattaaatctagtgtaagcttattttgttctatgcttagttccaattatttgttattttttttcactgttaatatgagcaaatgagtctaccaaatacagcaaaactacaaagagataaagttatagaaactgagccccaacaaacattacagaggtaatgctacattcagatacaaaaagctcatttaaccaacttggggaacctgacgaaatatatgattgccaaagatcctctctagtcgcacttcgagctatataagaaaagctctccaaacatggccaagcagcaaaacttatgattttattcaagttcaggctcttcatactttccattgcccatttccactctccacaggaataggattgaaacaaaggaacttctgcttctgctatgagttccagttattagttccttctcatattactactgaaataatgtttcagtgccatcttttgtatccagatagttcttagcagcttatgcagatatgataaaggttgactttaggagaagtctagttcaactaacaaaaatacccagctaaaattcagtttttgagattactttatcacatagtaagaaagatattaccagaaacatgagtcaatacacaaacgaactagataatagaaatcaaaccaccagcaagagatagaaatataggtttagaaaaacacacaactaagactcgtaagagtttcgagcccccattcatcacaacacgagataatagagaaaaacccaacacaaaatccaatttttaagaaacattcttcttagtattcctctccttcatcatcctcatcgtcaccaccttcagcaccgacctcttcataatccttctccaatgctgcaagatcctcacgagcctctgagaattctccttcttccataccctcaccaacataccagtgaacgaaagcacgtttggcgtacataagatcaaacttgtgatcaatacgggagaatacctcagcaacactggttgagtttgagatcatacaaacagctctctggactttagcaagatcacctccaggaacaacagttggtggctggtagttgataccacacttgaatccagtaggacaccagtcaacaaactgaatagttcgcttggtcttgatggtgccaaccgctgcgttcacatccttggggactacatcaccacggtacatcaaacagcaagccatgtactttccatgtcgcgggtcacactttgccatcatggaagcaggttcaaaggcactgttcgtgatctcagcaactgagagttgctcatggaaggccttctccgcggagatgactggtgcataggacgaaagcatgaagtggatccttgggtatggaaccaagttggtttggaactcagtaacatcaacattcaaggcaccatcgaacctcagagaagcagtcaaggaagaaataacctgagagacgagacggttgaggttggtgtaggtaggtctctcaatgttaagggagcgtctacagatgtcatagatagcttcattgtcgaggaggatggagacatcagtgtgttccaagagagagtgagtggagaggacactgttgtaaggctcaaccacagaggtagacacctgtggagatgggtaaacagtgaaacccaacttggactttttcccatagtcaacagaaagtctctcaaggagaagagatccaagaccagatccagtcccaccaccaacagcgttgaaaacaaggaatccttgaagaccagtacagttatcagcgagctttctgatccggtccaagcagagatcaacaatctctttcccaatggtgtaatgaccacgggcgaaattgttagcagcgtcttctttaccactgatgagttgttcagggtggaaaagctgacggtaagtaccagtcctgacctcgtcgatcacagttggctcaagatcaacaaagacagcacgtgggacgtgcttacctgcaccggtttcactgaagaaggtgttgaaagcatcatcacctccaccaacagtcttgtcaccaggcatctggccatcaggctgtaacattccagatccaatacaccacatcaatacaaaaatcatatacaatagatctaaacaggttcatcgaaacggatcttacatcaactatataaatcaaacacagatctaagcaattacgtacaatatatctacgaaatccgaagaacaaggtgaaaatatctcagatctgatctataagaggaagagacgaacctgaatgccatgttcaagacagtaaagctcccagcaagcatttccgacttgaataccagcctgaccaatgtggatcgaaatgcactctctcattgtcgtttcgcggaagaaagaaagatctagaaaatagatttgcagggaagaagacgaagggcgtttatgaagacgctcttctttagatctgatattttcgatttctaggttatgaggaaggtgtttgatgctgtattttataagcgaaaattatcccatctgtatgtaacggcaggtatattacacgtgtaatgatgtaattgggttgttgttaaaaccacgatttgttgttattctcgtgagctgtgtattttataattttggaatttttgaaaagcaaaatcccttgaattgcgtggaacttaaccggaattttaactggaattgaaccgtatcagaccattatttaggactgaaccaaagtgtatcagataagtaatttccattgtatgtttgaacttgcaatcaatcttcagggaaatgataaatcgatatacaataaaacctctataaattaataatgttgggaccgcgaaattttattaatttagagaggtattaatttatcgataaattaatatttattaatttatacagacattttcctaatttggtaacttttaaaattgttttataagatttctttcattgtagaaaatatatatttagaaccagttacaagtaaaacataataataatgtttagaaaacaacaccaaaaattttgatacaataaaatatgaaaattatactcaaacaaagaacaaatatgaatttaagcaaaaaaaattttaaaatatattttaaagaaattcttttacatataatatatatatagttaatatatttatacaattattaatttatgatattgatgagaccatacattcacatcaaactttcagaaaaattattatcttattaatttatcgtgttcaaggtcggtcttaaaaaatttatgaaacgcactctgaatatttgaagtatcacagtttagtaccttaacttttgttgtttagttaaaaaagtcatcacatcctaaaaagtggtgtaaaaaattagcaaatttcgcagacacgtgaaatcggatccaatgcgatgattccggcgaggaggtttctcttatctccatttgtcggcgtcacgtttatcgtcgttctcgtctctctctacttcagatcttccttcaagtctccacaacaccaagtaccaactgctcttctttctaactaacttccctgttctgaaaattccaaacagacacgagcttagctggaattcaaaatctctatttagcttctgctactttttgattgaattatacagggtcttctatagccaatgaagtttgtctctgtggttgttatgtatgggtcttgagtttaattagaattgaaatagataaaccaatgttatgatgatgtctcatgtctttgatttgatggtttgtttgtgtttcagtatcaaaagaggttattttctgctgaagaattggcattgtataatggtactgatgaaacattacctatactcttagggattcttgggtgagttcttttccttccttctgctgtcaggtttttgaaagtaaacgcatatgttaacaacttgtgaactgagtattcagatctgtgttcgatgtgacgaaaggaaaatttcattacggtagtggaggagggtacaaccattttgctggaaggtttgttttgttaaaaattatgtggagagattctcatatgttcttctatcttcttcttgttaatctttcatgtttgtagctgatgggaagtgtttttccatgtcattctttcgctcagagacgcttctcgtgcatttgtttctggcaactttacaggtacgaatcgtttgctgcatcctaatcaccatgcctgtttgatccagataaatttgtggaaaattttgtagtatattatggtctttgcttctgttagtacttatggacattggcatgacatcctcgaaaaaaatgagatttcattctcttttcttgctaatgttatgaggaaattttctgtgttcctcccattacacatctttgaatcctcataaacaatattagtcatgcgtgaagaagtcagaattatccaaactttgtagctatttggagaatattatacatcaagtccctgaaatctgtggaaacttctcatttgtgtgctatgattattttcttgtacaggagatggacttacagattcgttacaagggttatctagcagtgaggtaatgtttttttagctccatatatctcatcaatgaaattatagaaacgtctaaagtagtctttgatcttgccattgtgccagatgtgcttatttcttcataactattactttctaagatattgaagtagcatatagtttgttaactgtttgatattctataactccgattatgtttagttacatgtttgatatggcttgacaaagatttcttgtccgcaggtgaagagcattgttgactggcgaggtttctactccaggacctacacgtaatttattacttttatgtttaattcacacaatagaaagctgatgcatagttaaactaagaaggtggtgtatggataatacattgctcaccttaatccttgtattatatggtcctcttggtttggttctcagcttttaatttgtgatcaacagtcctgttgggaagcttgttgggcggtactacgatagccaagggaatccaactaaacaccttaaaggagctgaagcaaaagcctccagaggtgcacaactcatggagaaacagaagactgaagaagccaagcaatcgaattgcaactcacgatggagtcaagatgaaggtggagaggtagaaactcttgttatcttctatcaatccggtttataggggagagaactataacgtattagtgaatacttgatgggactaaaagcataagctattatgcaggtttggtgtgatgttggagtgccaagactggtacaaagacctttggagatagcaataactggctcgatgagcaaacgctgtgcttgctttgaggaagaccaacttgatcagtctggcttggagatctataaagactgtgaacctcttgccaagacttgcagggtttgaatatgattcacgagacttgtcttaacaagtttgcaaattgcaatagctagttctttcgtagccttgtactcttgtataccacatagaattctttatgattttgtatggatgcattgcgtgtagtttatgtgtaactaaattaaaacggcgaatagttctaaatactatgggtattttggttacacaccctgcagtttttgcttttgcgtcaacagattgcggattgcgtagtttgtgtactgaatttaaacggcaatcagttctagaatcttacggagtaatttaataacacagagtgccgtttgaattttcgtcgatagactgcatgtcatgtaatgaggaactctgggcgcttctttgttgaaaatttggcggtagcttcttcagggttactaaattttgaaatctaatttcttcaggaaattagctaatcggagaatcaataggcgaaattaagagtaatctccgtcgccgtcactggaaaaatggtgtttctctctcgcaaaaagcctccaccgcctccgtcgtcatcctcagctgctccgtctctcaaaatcccccagccgcaaaaggaatccgttgagcccgacgcggtggagaagatgactgccattctagccgaagttggatgcacactgatgaatccgtacggtccgccgtgtcttccttccgatctacacgctttccgccgcaatctcactggtcgcttatcgtctttctccgccaattccggcgagagagataacgtcggtgctctttgctcagttttcgtagctggattttcattgtatattcaatctccgagtaatcttcgaaggtcagtaaattccaactcgagttttccaaattaaacctgagatttcatcactttgtaatcggatttgttcatatatcgttgtagaatgctttcttcttcttcaacaactaagagagacgagagtttagttcgaaatctcctgcttgtatctccgattcaactcgatattcaggaaatgctactcgagaagcttccggagtactttgatgtagttacaggatgttctttggaggaagatgttgctcgccttatcatcaaccattttcgttggctcgatttcattgttaatccccatgtgttcaccgataagttaatgcaagttctatctatttgtcctttgcacttaaagaaggaaattattggatcgttgccagagattattggggatcacaactgtcaagctgtggttgattctttagaaaagatgcttcaggaagattctgctgttgttgttgcagtgcttgattctttctccaaccttaatttagatgatcaattgcaagaacaggtgaggttttgcttcattattggtttaaggttctgtattatacattgtgttgatggaatgccattattttttttttactttcttaaaggcgattacagtagcgatatcatgtattagaacaatcgacggagagcatatgccgtatctacttaggtttttgcttcttgctgcaactcctgtaaatgttagaaggataatctcccagataagggaacagttgaaattcaccggaatgtcacaaccttgtgcttctcaaaataaactcaaaggaaaagtacctgcatataatgcagaaggttctattctccatgctttaagatcaagccttcgatttaagaatgtaagtttgtttcattacagttgcttaagaatgtttgtcattttgtggcatcactttcattttctgtatatagatactctgtcaagaaattataaaggagctgaatagtctggagaaacctcgagatttcaaggtaatcgatgtatggctgcttattctcatgtacatgaatggggatcctgtccggaagagcatcgagaagatatttaagaagaaagtggttgatgaatgcatacaagaggccttgcttgatcaatgtataggtggtaataaagagtttgtgaaggtgatcttcataacaaattttgaaaagtgtctgatacatgtactatgtgggaatgttcttttgtagaattaacccgactcactcattgttctaggataattttgcgtcatttgtttctttggctgaacacctcttgtcatccaaagaagaaaaggcaagggaaattggctctcatatctatagtcgtctttttgaagagtttactgacaattattcaagacaagaggtaagaacataattaacatttcatctcttagtataataaattttgcataactagtccacttttgttctaattcgaattggttgcagattctaggtgccctagtgacacatgtgggatctgataacaaatttgaggtcagttctgtcttggagatgatgacagctctggtgaaaaaatatgcacagcaactcctccccttttcttcccacataaatggtatctctggaacttgtttggatatattactcactaatgctgatccatttactgttcttcttctaatattctggctgttttatgtcgtataggtattttggactacttagagggatttactattgataatttgcataaggtgggcatttatctttgcaatctgcttggtatgacaatctattgtatataaagtagacatactcgcaggtctatgaggttttcagcctcctcgcactatcagctcgtgcaagtggtgattcttttcgatcttcaatctcaaatgaacttatgatgatagtaaggaagcaggtaatatgaatgatcttgccttcgatttggtttcttaagtgatggcagctcactcccagttgtttggttttatattggcaggttagtcatccagacctcaagtacaaaaagatgggcttagttggaagtcttaggattgtttcgtcacttggggatgcaaagagtgttcctgacttttcatcatcgcaggtaacattcagcaattcttagttgttgattaaaattattttcgtacctcttttgtttcctatgggaagtatggggaatcactcttatgcccattaaaattttcatttagcaggtttcagattgtggggagattttggagctcttaaagacatctgttgaatcttgcagacagtcgaacttagccctaattatgttctatgatgaattcgctaccattcttagccataaattacttcaaccagaaattatggagtggtgaagatttcagtaacagtttattgctagcttgtttagtagtttttaaggctacacagtaatcttaagctttatccagagtaaattttatactgcttttcaggattgggaagcatctgggagaatttgagtcgctttttctagccgatcttgaaaacgaaaagatggccgaaaagggttcatattctggactagaaggtatctcttgatcctacttaaattaattgaatctcttctgagcattgcatggatttgatctccgtttcttttcttctcatcgcttaggggatctttggatgaacttggatggtagtatatcaccaatctgtttgaatattttggccctggcatcttcatcctcagagttggttctctgagattatccctgctttcagttactgttgaagatttctctctgacaactgtgacttaattaagagaatcatatttcccgcaggtcctgttgtctgcagattcttccttcaaattttcttttgctatcaactgtaagactttctttcacttgaaactgggaggttattcaagatatcataactaacctgaattgttttttgtttacattcaggttgagaggttgacaaatgatggatcccttgccggggttgatgctctgctcggatgccctttgcaccttccttcttcaaaggtgagggactatattgtcttcaagaaacatattgctatgtttccagtaaatgacaagtgtagatctgcactccaatctctgcacgatggcagaacaaaggcttcttatttttatttcgaatttattactttcgtttgaaaggaccactgaaggggaatggttaggcatatttagaaaagttgaaattctaaacatgaaccctgaaagtaatagtgataagaaaatacattctccaaaattatatctatttgtactgtgactgtttgctgatgtttgacttttcttgtccaatgtttaagtactttgctgcagctggttggcagtctctggcaaagaagcagaaagaaatcctctccctctcgttatattatgctgcaaactggatacgagaactcgttagtaacattaccttgtatattctgcgaccttgttataccataatttcttttatttatgtttttgctttctgttgcagctgaacgccttcagttcccaaattgatgaaaaaattggttgcattagtcaggctactgtaaaggatgtaacaacaaagcttctaaaacgcctcagaaatttagtgtatgttcattctactctgattcaatctaagctttgtaatgtgctgctgtgttttacgctcttgtttcagatgtttttggtcgtcataaagcgtattcgtgatgaaattctgataaaaataatacttggtaaaacagattcttggaaagcttattgagtaatttgattacactatctcctcagtctctaccggagctccacccttattctgaatctcatgtagaacatccgaggaagaagaacgagaagaggaagctggacgatgatgcctcccaacgcaaggtaagcatgaaaaataacttgaaaaaatcaaagcactcagatgtgaatgaaaagctgcgacagccaactattatggacgcattcaagaaagcaggagcagtgatgagtcatagtcaaacacagttacgtggaaccccttcccttccatctatggatggcagcacagcagcggggtcaatggacgaaaattgttctgataatgaatctctaattgtgaagattcctcaagtttcctcggcacttgaagctcaaagatttaagttcaggcctcttcttcctcaatgcctttccatcttaaattttccaaaggtcggccaattcaaacctctttatctggttgaatattagtatctactactcttttgaatgattgtcatagatactctatataaatatcacatgaattcacattgaattttagcctgagtttgtattacattattcttggaatgccatcaaaggcagcactacctgtcgtacatagcttaaatgtcatcacgaagcttataggaatgattaacatttttggctttcacatataggttctaagccaagacatgggcagccctgagtatagagctgaggtaccaagacaaataccaacatattctgttaaacttaattttgtagatatgagaagtgctacttaacgtcttattattttctttgctagctgcctttgtatttgtatctcttacatgatcttcacaccaagctggattgtcttgttcctcctggtaaacaacatccttttaaacgtggaagcgctccaggttatttcgggagattcaaattggttgaacttctcaaccaaattaaaagactttttccaagcctcaggatacatttgaatatagctatttccttgctaataagaggtaagataactggagatgatcaacctgttgcgagctaaagatattgatttagcttgttctaatgttgcctaaataatcataggtgatgaaacttctcaaactacttggagagatgagtttgctttgtccggaaatccgaacacatccagtattgtggtttctgaatctctggtttacacaatggtgtgcaaagaagtattatactgtttcagcaaggtaatttattcttatccgatgccaattttgtgatgttatatggtgaccacattcctaacttgaccagttgtatattggttgcatgtagttccttttagtcttaacttatatacaagtatatatatgctaatctcaattcccaaattcttaatttctttcttcctggtcacagatattgaccctccccgagtttgaaacagacaagtcactgttgctgaatcttcttgaagccttccagccaactgaaataccagtagctaactttccggactttcaaccttttccgtcaccggggacaaaggagtacttgtatattggcgtttcttatttctttgaagatattttgaataaaggtaactatttttgttcgtttactgatgatttcccctatcgtatgctatcttattctaactcccattgcaattgtataatgttactgcagcatgttccttctcctttgatctggcctttgaatgtcttctcactctacagttagtggtgacctctgtacaaaaatatcttggtaaggtatctgaagaagctaacagaaagagaaacccaggtcattttcatggtcttgtacccaatctacatgccaaactgggaacttctgctgagaaacttctcaggcataaatgggtcgatgaaagtactgataataagggcttaaagaacaaagtatgtccatttgtgtcaaatttgcggatagtacaatttacagtagtgctcaatcttctgaatgtgtatagctttgggtctgtgcagggtgaaatggttcagaccatattgcgaatatacctggaagccagtggatccacatctgatttgcttgatgagcttgcttgtaccattttacctcaggtacatggaaaaatatttctctgggttctactttcatagattttgatatcttatgataacacaaaacgtccacttgggttatggttcatggaaactaaacccatcttctcatgttgcgttgattaagtgttacatcctgaaatggaaaatctgcaaatagttaaatacctataacttatttcatatggagaagtatattatataatttaactcatttcacgtctctgaaatttgtttgcattaggcctctctatccaagtcaacaggagaagatgatgatgcccgtgatcatgaattcccaaccctatgcgcagctacttttagaggatggtacaagacattggtaaggcaaattcttagctatctcatatttatttcagtgagtaattgcgtcagagactaatagcctaattttcgctggtgctacatgcagcttgaagagaatcttgcaattctcaacaaactggtaagtaatccatcttagtttgtccgattctcttcacttattattacaatcttctttgctatacaattacagttctcacctttgtgttctatcatctgtatcctaatcaggtgaagacggttagctcagagaaacgacaaaactgtcaaccgaaaactactgaggcacacttgaaaaacattcagaaaactgtaaatgtggtagtatctttagtcaacttgtgccgatctcatgaaaaggtaaccaattttgttgctacgtatcatgagtataacacattgcgcattaaacctgtcagatatattgtaatattgatggtattataatgacttaaacaggtcacaattcatggcatggctatcaagtatggtgggaagtatgtggactcatttcttaaaggtataaatttttccaacttcttatcagacaagagttcgatatatacctgattagctggcttattaatttgaaaacttgatattggaaaaacaaaaaacatgtgcagtttttgatttcttggaagcacattttcaagatcataaagaactagtcatccagttggtaagttgtattgtactacgccgtttcttttactatatctctctccctcagtccactgaaattattacaactgaaatgtgaattaggtgaaagatctccagaaggcgacaagaacattacagactctatgttctgaagccaaggttagtttcagataccagtgtgttttatttcttctcaaagacagaataaatgtgacagtgtggagtattgtgttttgggggaggttagggtatgaaacaaacagccataaccagcaaaataccagcaacaaagagatctttagagcgttttctgtttcacgttaaggctcttctccatagaacatcaggcggctccaacttctggatgggtaactacacaaaaaacacatagttttgctttcgttttttccctctttcgaaactcatttaattcttctttaaaatctctaccattgagtagcatttgaacactttcattttggaaactgagtttttgaatactaattgaatttgcaggtagcttgaaacacaaggacttgagagggcaaatagtgagttctcaggcttatatagataacgaagccgatgaggttgaagaaaccatgtccggagaagaagagcccatgcaagaggatgaacttccattgacaccttaattagactgctattaacgttccacagtaatcgatttcttagtatcttaaatctatccatctatatatagttcggtgaggttgaatttagagaaacaaacacaaagtgaaatagagagaaaatttagggaaatggttcatgtgttaagcaccaacaatttatgggacatgtaatctaagttaaccaactaaaacattttgaataataactaaaaggcttaaatgccaacaaatatagcttcttgcagcatcttggaaacatatcgaatgccttcacaaatttgtataatactttcatggctaccctattatttatccgcttttgggaatacacagttaatcgaacaaacgtagccagtaaagtctcctacagctccccacatgatgaagggaaacttgcaacgaacttcacaaacgccgcaaaaaagtcgagtaaccccattgttggcaaatactttcggctgatcaggaattaccttaacataataaaaatcaccaagaacacaattaagatggagactaagcccacattcttcacatgtatagtaacatacatttggatctgtcttggtctcacaaatatcacaccacaagttgccgcttgcgtttcccacaccttgacatagtgacagaaaatgatcatcacacctatgttttacctttcttggtaaagtggcacacttcatgcataatgcgtaatcatcacaaaccgtacaatttaagagattatcatcagtttccgtgccacaagcttgacatcgtttggaactttccaatgtccaatataagggatgtggatgcagatcatgctgaaatggttccgatacggaactacaccgaacatcatacacaacatcatcttcgcaaccttcgaaacacttgtacctgaaaccattagaatacgttctacaagctgtacacacaaaatctgaagatgcagcctcgtcaacctgtagagtgagtttatgattatgcaacaaatgtcgcttcttccgaggaagactagcacatgctttgtgaagaatataatcacattccacgcatttgtagcaggaatcaccgttgatggcaagaacgcaacctctgcaacgcatgttaacattatccgtaacataattctcatccaatctgagaacatgttcttcatgactaaaatgaatgatctctttttcattaattaccacaaatggttcttcgacttcttcctcctcctcgggtacatcttcaagttcgatcccatcccacacttcctttttcgttgcacatcttgaatgaacggcgtaattaggacaacgagagcatttaaaagctccatatacccaatcaaccgtcttccgacaaactccacactcccaatgttcttctcgttgaccaagatggaaagtatgaaagatgcgatgatcgtgccgattgatgcatatgactcgcggtagattctcaatacagtctttgtggaccatcagattgcattgaagacatacataaggattgcggtcgccttccacaccacatgcattacaagtaaagatgactaaccttaccaagagggtgaggctatgcttgtggtgctttgggttacaaatagtgagtggtggttgctttaccatacaaagtggactaatgtttatgttgcacaccgtgcaacgagcaaacggagtcttaagcttgcacagacaaaaatggcatcggtcatttgcatattgaggtgatttgttgggcatggagatcttgagagagtgaccgcacggagatggatagctgagaaagccctggatacatctttgtgcagccgatagccgcactccgtgcactgataggcaatgccatttcgactattacaaaaatcgcaagaatagataaattcttctgtacatgataaaggatgttcatgcaacggcaccaaaagattaggcctggtctctatttcagattcagtagaaagcatttttatttcaaccgagaaaagaaagaaagataggtgttgagtttcaatttttgttttgctaaggttcctctttatgtagaattgtagatcttggaactcataaattcatttttatttttattttcttagtctttgtactatatatttttatatcaccaatgataatggttttgccaacacagacagctaattcaaacaaaaataatacacaagtatacatataaatagtagtagttgtccaaaccatccttgaaacaatggggagaagaagtttgcccataggaaaaactgagaagtattaaacaataattgaatagatctagtgactattagtatatcaaaatcacatttctctcggaattaacccatgtgcaaacaatatttttaattcgagtttgtatgaacaaataagggtgggtttgaataggcatactatttatttaattcgaaaccatacctataattgtattagttaactttattagaacaaaaatagacaccttaattagactgctaataactttctatttcaacagtaatcaatttctttatatcttacatttatccttctatactagattttgacccgcggtataccgcatgactaggtttataataaaatttgttatataaaatgtatatgtaaatatttgttttattaatattgtttgctttgtttagtgtttaagagaatgtatatatagattttaattgttatatataggatttcatccgtagtatatcgtttcgtattattatcgatcaaaacccgtcataccatctaatcctgcacagtgaaattaaacatatctaatggatttcacttgtggtatatcgtctcgtaatactatcgaccaaacccgtcctaccactaaccccgttcagtaaaattagacattattttattatttttgttttaataatactttaatttaaaaaatatttaattcaaatcaatttaaaagttttttttcaaatagttatttaattgttataaaatttatatattataatattataaacacatcctaccatctagtcctactatctaatcatgttcggtgaaattatttttttatttttttaataatatttttattaaaagatttataatttaaatcaatttaaagttttctttcaaatgattatttaatttttaaatattttaactattttagcaaaaataattaggctatggaataagagcatattcttttgaataagatttgctttgatttggtagttaattttcgcattgaataagccagtggcagccattgtaaataagttccaaatccaggatttatttcacaaaatggctctaaaaatgtatatatacatagtttggtgaggttgaatcttagaaacaaaatttgtgattgtttttcgtagcgtaactatttaattaatatcaaataaatatagttatttagttggttcaatttttgaaaacaaaaattctatttttagctagaagtctactagttctgttctatttgctgaattttgaagcccaagttttttgcaaaaaaattacaaagcaatattgtagatcccaggattagtctagtctttgaccaatgaggatccaaaaacatgcttcacgtgtcattggtaataatagacaagagatagacatatagtaaaaggagtcgtcgtcgccgtcaaaacaagaatgcaaaaaaagtaaaagaagtcggttatgtataaagtacaatgtagactttgttatggcataagtaacttaaaaacactaagtaaaaagaaatcagacaaacatgaagacctcatatctcggcttgggtagtcactcatgtctttttcttgcattaaaagaagataaaaggaaaaggagacagctaaagtgcacgtggcatgtgagcagttccaaacttgaaaaagacatgcctctcgtgtcttaattcctaccactttctctaacctttttgtactacgtatttccaatccgcatctgttttaccaacaacaaattccaaaacattcatattttgtgtttcaaaaacacatccttttaagcttaaaatgttgacactatcaactgcgtaaacgtaatacatttcaagtttatcaacttcttacaaataacagaagtaatacatttgagacatgatttaatagaaacaactttttaaaaactttgcgttccttattattacaatgcccacattttaaacaaaccccacaggaagctaagacaccaaaatacctcttagctaccgcaccattcaccatcacgtcatcaccatcaccatcacattaccattaccatccaccgttcacccattcaccatcagtctatacagagtcacaaacactaatctccttccaaactcctaaaaccctaaatgagtcctacaaataggagttttcatgacagagcaaccaaaaatacagctcccccggaaaaattcacttgttttttttttccagttttaccaaactcccactttcaatttactgtttctcctgctttcaaccaccataacgaggaatctaccaagttttaagagaaatctaaaagaacaacatttgtcacctgagccctgtgtgaaccagctactcactttgatccacaaacaaaccgtggcaccgcttcttaatctcacagtttgtttcctatatggttaaacttaacccctcacaaattcagagttaatctgaccaccacttgcacttgcacgggttgttgtcgactcgctaactggcgatgcactacgaccaacgttaagtaagaagttccgctggtcttcattagtatgacgaagactcgcacgtaaaagctcggcaggcatttccctctttatagctaactccaacacatcagctgcattgtcgtggttctgaccatggattgtctcgtacttgctcctgcaatatttagtaagaagagagaagaactcatcaaacgaggctctccagagtccatcattcggattcccgtggttgctgacacgcggtggaaccaccgccactattacttcagcagctctctcaagaagagataccaagacaaccgatgctccgtccccggaagaacttcctattggacggagaggtggctgttctgacgagcaaacaacagctgcaagacaagcactcaatgctcggaggtccattgcttgaacacaaaccgtaactgctttagcaagattagctatcgtctctgctgcaaggctatctgacggtaggccaccgaatagaaacctcaggtggcggaatacagccatacagacaacccgcgcgatctcagtacccggaacaagaagctgtagatactttgtcagcaatttccgacccttaggaagagtcgttatgcggagaaacacgatatcatcctttgtggtcaatccggttttctgaccagttttgctaaaaggatcaacaagttgaagtgaagttgctaatccttcaagaaggatctgccgttttctcctgagctgtgcaccaccgtcttgtggccggttgaattgaagagtcctatcaatgtcaactatatcgataagaactccgaaagcatcttcaattgtgactctagctgcaacaagaggctcatcttcaagatgcttatgaccagagctaggaggagagtcaacctcgagtagagctcgtggtctgcaaatagaaggaagtgtaatctttccaagagcatcaacatgaacttgtggttgctgatcagaactattccgcgaccgagattggtgatccttcaaatgagaaggatacaactgaggctttgttcttgatccggatgactttttcgcaagccgagcttggtggtaataatcattgacataagggtcactactgtgtgaattagaatgctgcatcttgagaatactctctatctcttctgaagtcatgtactttgatctaaactgcaatccgctttcgcttttctggctagctaaatctgatgtctgttgagagataccacctctgttctttcgacttcgatgagacgacttatgtttgtgttcccttacttcaccaaccccgaaaagagctttatgtgatggagaaggataagaactatatagctgaggttgtaatgcagcaagatgagctaaagattgtctctgctgaagagatatcaactgttgtgaagtaaaaccattccgaggaggcagttgttggagatgttgctgttgcattagactgtgtaacaacgcggaatgatcaccgtggagaaggccggggtcggtaacccaatgaggaggttgttgcaccatgttaccaagagtaggaccacatgaggcatatctagccaaattattaccataatgcgacggtccatgtgacaatcccgagagatggaaagtagaattcgacaacggagaggcgtttggagctgaaaagttcgactgactaccaccaggaagagaaggagcacgatgaatatggctcggggaagactgttgagatctttttccaggcgaaggaaaagatgtaaacgtcgattctggtacgataatcggttcgctactgtaatgttgtagctgtgtttgctgctgaggatatgaggatgtcctatacagagaatttgaattaggagatgattgtggctgtgaagaccaactagcttcctgaacttgttcttcaactgtgtgctgatccaaccagcttgtgaactcattatcctgagtccaatctgtagcagtagaacctggacataaaaactactgttagaaaaaaagctgataatggattttttttttgttgacttgtaattatatttccaactaccacaacttaatactccaatcattcacctccagaagtggatatctaaaagtacaagctcacagtttttacctttagttgcatagttcaagaagaagaaaaagtaacatagaagaacaagaatagtaaacagtaaacaaaactcactttctcttgaaaaggaccctgatcctctgtcaccaattactccaaggtgtttgggcccggtaacatttctgttcagctgcacaagataagaccaaataataagataagttaaagtagagaacaagtaataataagaagctgagaaagacagatcatttgtctcaagagagacgatgaaaaatggtaacaaaatgatattagtagaaacagaattatttaaagtcataattcggaatttacaatatgctaacctttgcaaaagttgtggcaagatcatccatgtcagataatgatcctaaaccagcaccctgaaaccagaagtaaatgttttgttttatcttccatttatctcatatataattagcatcaaatattgccaagaacagactcagtccaaattacctctcttttatcaaacaagtgatactcttcatcatcaacatgtccacgaacagtaccatcatcatcaagaccacccaattcgacttcttcaagactttgaccaaagaactcatattgagatgcgtcaaagagtgcactattgttatctgcacaaagacaataagatccagtttcatcaaacacatgaggtaagtgacaatcagttgaccagaaaatttaagtaaaactaaagcttttgtaaacaaatctgtgacatttcaatcatttcatacaacttcaaaaatcaaattagtaaatcttataggttactacaaaacttaaaaaaaaaacgaatcaaatactgtaacaaggaagataaatcaaacataacaagcatgaaacaaaaagtatgtttctcttaaagttttcacaaatcagaagcaaatcaaatcattcacatctcagatcaaagaaagaagctttagcaaactgatgaatcacaaaataaaaacacttttattagatttgaaaacaaaaagagctgaacaagaaagagaactgaccagaagaagtcttagcgaagttgtagaaatctctagaatcagatctctccatgatcaaacacaaagtagcagagacacgaagacagctaaaacacaaaaaaaaaaaacagcgaatacgatcgaatctccaaaagggtattgctacttcttgtcagaactaaagaaaaggtaagtaaagattagctgaaatcgctagaggttcccgattttccgggattcatattgagaaagaagaaagtcgaaggaggaaacttctcttcctaaagaagagatttttgattagattagattagagaagagagagagagagagagagaaagaaagagagagcctttttttattatctctgccctgtgctatgcgtaacattgacacatctcgaacaaatcctcatttctctgtctgaaataagcatttcaccttttttttttttttggttcgttaagttaaaataaaagagaataaattaaaaatgttttcttttgtcgtcaaggaaaaattctcttctgttgacaaaaaatcaaaagtaaaaatattccactttccgaacttttttttcttttaattaaaattatacagtatgttactaaaattagtgatagtgattacaaaagataagaataacctttttttagtgctgtctgcttttttattttattattctctctattttaatattatttattacatattgctgtgtctactaatattagtgatcataaacattttcttatcatagaaatataatttcctgcggcatttgaaaaacatcgaccgatttcgtgtaatccacactacattcacgattaaaaaaaattatttttttaacatatgagaccactataaacaattatacatgtaaaccatacataatttcataatttgcatttctaggcttcagattttatatgaaaacattaaataaattattggataactacgagaattcgtcttatttctgtaattattttggataactacgaaaaacaatttaattgatatagccatataggttataccacatccactaactactagtatatgattctaattagtaagacgatccttctaaatatatgattccacctattttctccttttaagtttatgcttttacttgtttgaaactcctcaaccaaaccaaataagttagttatgaaaacttaattgcatagagattaacaaaattaaatacacatcgacgaaataaaataaaataactggagggacaagttatatggtccatgtgaacggatttcatccggtcggttcaatttgatctcatttgctaatttattatacacaaattcaaatggtctattttttataaaatatgacacctatatacttacttgcgtagacacgatataaccggccaagcaaagttttctaaaatatataataatctgcaaatatgatgttaacagtccataattatagactatagtctcgcagtggctagaaaagtcaagcatgcaatttttaattataaatatttgacacattttagtagaattataaacaaatatattgattgctgcgagaagaagtttccaactttgttcgtatgatgaaaggtaaattttgtgatcgaaaacgaaagtagacatgtttgaaagtcttaaaatattggtagaaaggttttcgaaattttcgtgacaattaaattgataattttgagtatggaacttgatcgaaaaattagaagattttgagaaaaagacagcatgtttttatgcgatacaatgtatagtttcacaaacaattccaataataatatgataaatgtataattttgtagatagtataagtgtaattttgtaaaagttagtcactatacatagtggtagtgctatgagcaagccaaaaaacatatatgagtaactaaaattagcagtcaaatatagagttggatagcttcaacaccaatcataaaagttttatcaaaaccgttactaaaagttttacttttttttttttttacagctctctcgtataattcttttgtaaattttgcactatttcaaaaatacttacaactccagctaacaacttaattctttttacagttttgtattatcaatgggatccataacagttgtataattttatatatgtctttgttagttcaaaaaaaaaagtttttgtaataataactcttttgaagtttgtacgaacgtaagaaaaaaaaaaaaggaaaactagaattagtatgacccaataactgaagctaggtttaccaggccgtgtgataagaatataaagcccaaattaaaaatgggtctaacctaaaggcccaataactgaaactaggttctctccgcatccattttctgcattactattaaagccgcatttctcatagaatccgccacttagggttcatagcagccagagagagagacaagtgagagggatctaccaaacgaagcaacaatggtgaagttcttgaagcagaacaaggccgtgatccttcttcaaggacgttacgccggaaagaaagccgtcatcatcaaatccttcgacgacggtaaccgtgatcgtccttacggacactgcctcgtcgccggactcaagaagtacccgagcaaagtcatccgcaaagactcagctaagaagacagctaagaaatctagggttaagtgtttcatcaagcttgttaattaccagcatctgatgcctactcgttacacactcgacgtggatctcaaggaagtggcgactcttgatgctcttcagagtaaggataagaaggttgctgctcttaaggaagctaaggctaagcttgaggagaggttcaaaaccggtaagaacagatggttctttaccaagctcaggttctgaagaaattttctatttcgtgaggaattcattttgagcgttttgttatcgtgttttttagtttctagggttcatttcccatggtgaaaaatgtggatcctgttttggattgtggaagatgttttgttgaagtttggattatggatttgatcttttattttgattctctaatgcattcttatttactcttttgtttccgttgaattatatttgcttaggcttgaggaaatgatgaatttagtaacgtctttaggctgatattggttaaaatctggaggtccattgcaaagaattcttgttcatagccttagttagaaaattatagatgttcaagtttcgtaatcttcgaaattgaatttggtgttactaattgtcttaatcacggttttgaattagcaaaatatcaatagctaattgttttttgagcaaggttctgatacaatggctatatctcctttgtttataagcttctctggcattaagttttgatagaatcgggaaatgtatttaccaaaagttgaatcttgtatcgtttttgttagattctgaatatcccattgcaagtagcttattcctaaactcgtcgtaaaatacagcaaattttcgagtttcatttgtctaggaaattgataatttgtaatcatcaaacttacagatacagccaatgatgttaattatttatttcagagtattgagaaaaactcacatatgatttctctgttaactgtataacaaaacgcaggctactaaaaaacaatcactattgcggtatcgttaatctgatctaaagacagatttgtaggcttatgtgattgtttgttttctcacttgggaaccaataaatcgacagctaagtaatagcttcctacgatcacagtcgatgcaacagagcttcgagccatcctcatcccaatacctcggaacaagagatttctgtctgtaggatggattcctgtccatctctctaatctcttccctggtttattccattttagaaacttcctctcctttgctgtatactgtaagtaaaacaatagaaacccaacagagaaaatgagtttcatatctctttgtaagataaagtggaaagccatgagtagagtttctttaaacctttggcaatattacacactgtgcacgtgttcttgctgtgtcaaagctatgtgatgctgcagctgcaacggcaccagatatcccagcagcaaggctaatggctaccggagataaaggtccaacttcttcttcagaactgaattcatcaagtttccgcataatcattttaacaatcaacaatccaagttcaagtgaattgagaattcagtgtcgattgagagttttaagtacctgggcagaggattcatcccaacagctttccaaccgaccattgcctcgtgaagaaactgccatgttgaaaagaatactccaccgtaaatacaatctcttataagacctgaacgtagattcctccataaagctctatatccttcaagtgatgcaacatcgagcggtctcttaacatccatggctgatggtgggtttcctgttccagtcatcatccaagggtactcttgcaaagcagctgtcatgtttgggtgtttgtgatttaagacggataagagactgactgtttgtgtcaatgactttacatcaagagtgtatcttcttagcagttttgtgatcatgggtgagaccggtgcggtctctgcaacagcggaagcatttggagcccgtgatgcagcagtcacttgttttcggactttgattagctcaaatggagaagtcatcactgtttctgctgcacctcccaccagaccagccagaaaagcttcaccaacactcacgtagttatcatgtcgaccatctggagcgaaatgaattcatattcagattcttcaagacaaaggtattgcccaaaaaggaaccaaatttgcgtataaatgacatgaatgtatgtgaacactgttgcatattctaacataatccatgaacaaatgattgctgtattgactaattaactgatgttattgagctaattgacagaggagctagacacaaagaaacctaatcttgaatcatcgaaatcagacacaacaaaggagacatggacctgtgtaatacctttgtagaaagctgttagaatctcatagacaccaaaccttgcaccaaaaccagaaattcttcctaaagttaacgatccaagaccactgtacagacctgcatttgaagaacatgtcattatgcctgatgcagaatcagaaaatgattggaatctaaaagagtagtttgcgaacctgaatagccagagaatcgaagaactctattaaaaacttgaaaggagcttaatttcttattgggtcctgaaccaacctgtagttcaatgctattcttaatccccagatgaatctaagtgataaaaagaacaatttggtgaagaagagggaaaaaacctggataatggttttgatggtatctaaaggataagcgagagcagttcctaacgagacagaggccgaggcagcgatggcatgtgtcgcaaactgatgattctcaagaagcttatccatctttagcctcagcgaaaacaaatgtacatatacctatacgtttttgtcagcaacactacagactacagtatcagtattcaaacatactatgtcctttactcttatcatagtctccaaaattaagaggtttagaagtagatcaacaagttcttatcatccatttgatccaacacaaaataaacaataattagagtattatcatacctcaagtcaagaagagttttctctcacaggatattaagtaaacagaaacctcatcatcaacctcaaagatgtttcacgttgaagcaaaacccagatcagcgacagagagaagacgaagaagacgaccgacgctaatcggagaagaaaagacgacgtcgttcaatcagaaaatgccctaaaggaaatgacgtcgttttagttatcaagggtaaacaaaaaaaagttaaaaaacggaaaacaaattttagcaaaattgggttggtgacgtcacgatacagatttgccgatttataggtcataaaccagaaaaagctgccaaacctattttcttcgaaccctaaaaacgggccgggtcgatttctccgccatcgcaatcctccaccctcctctgattctctccgccgttcgtcggaaatctccatctccggctgattccagcttcctcttctccagaaccgaagctactgtaccggaattttatcactttccccgaaaccgattcaccgtaaccggccacaaaccaaatcaggtcttttctcttcatctccttgtacaaattttttacgggtttgttttgtttgtatcgaaattgtttattccggctaagaatttggtgcatgaggtctgcgaaatttcaaatcttttttctcgaattgttcattagaggatctaggcttatttacccattaacaaagtctttaccttttcttatatcttcttcctcttgaatgaattagatggatgcggaattagaacctgtagctcttacacctcagaaacaagacaatgcatggaagcattgtgaaatttacaaatatggtgatagacttcagatgcgttgtctctactgtcggaaaatgttcaaaggtggtggtataactagggttaaggacatcttgctggtaaaaagggacaaggtactatctgtgaccaagttcctgaagatgttaggctctttttgcagcagtgtattgatggaactgtgagacgtcagaggaagagacataaatctagttcagagcctttgtctgttgcttctttacctcctattgaaggagatatgatggtcgttcaacctgatgtaaatgacgggtttaagtcgccgggtagttcggatgtcgttgtgcaaaacgagagcttgttgagtggcagaacaaagcaaaggacttacaggagtaaaaagaatgcttttgagaatggtagtgcgagtaacaatgttgatttgattggtagagatatggataatttgattccggttgcgattagtagtgtgaagaacattgtgcatccttcctttagagatagggagaatacaattcatatggcgattggaaggtttttgtttggtattggagctgattttgatgcagtgaattctgttaatttccaaccgatgatcgatgccattgcctctggaggattcggggtatctgctcccacgcatgatgaccttcgagggtggatactgaagaattgtgttgaggagatggcgaaagagattgatgaatgcaaagcgatgtggaagaggactggctgttctattttggttgaggaactgaactctgataaaggctttaaagttcttaactttttggtttattgccctgaaaaggtagtgtttctgaaatctgtggacgcatctgaggttttatcttctgctgataaattgtttgagctacttagcgaactggttgaagaagttggcagtaccaatgttgttcaagtgattacaaaatgtgatgattactacgttgatgctgggaaaaggttgatgcttgtgtatccttctctatattgggttccttgcgctgcacattgcatagaccagatgctcgaggagtttgggaaacttggctggataagtgagactattgaacaggctcaagctatcacaagatttgtttataaccatagtggtgttttaatctgatgtggaaatttacttctggtaatgatattctgctaccagcatttagctcttctgccacaaattttgctacattgggaagaatagccgagctcaaatccaatctgcaggctatggttacttcggccgagtggaatgaatgttcatattcggaagaaccaagtggattggtgatgaatgctctcactgatgaagccttttggaaggcagtagctttggtaaaccatttaactagtcctcttttgcgggctttgagaatagtttgttctgaaaagagacctgcaatggggtatgtctatgcagcattgtaccgagcaaaggatgcaatcaagacacatctggttaatagggaggattacataatatactggaaaattatagatcatggtgggagcaacaacagcatattcctttgcttgctgctgggtttctttcttaatccaaaactcttttataataccaacgaagaaaatccgtagttagcttattctatcggtgcccgattgcatttgagagattggttcctgacgacaagattcaagataaaatcatcaaggagttaacctcccacaaaactgctggtggagtttttggaaaaaacttggcaataagagctcgggatacaatgcctcctggtatggttaattttcctgattttcttgtataaatcttttcgcttgtacttctcttacttgactctcgttacattcttgtttcttagctgagtggtggtctacgtatggagaaagctgcttgacctctcacgttttgcgatacgcattcttagtcagacgtgcagttctcagttagctgcaggagaaaccagatacctgtcgaacacatataccaatcaaagaactccattgagcaaaaacgactcagcgatcttgtatttgttcagtacaacatgcgcctcagacaactgtaagtcttagatcttgtcccatctcagccaactgcattgtttccaaggaataagaaagtatagaaataatggttctatgtcttctctaggggtcctggaagcggagatgacacactagacccgttgtcacacaacaggatagatgttctgaaagaatgggtttctggagaccaagcttgtgtagaaggaaatggaagcgcggactggaagtcgcttgagtctattcataggaaccaagtagcaccaatcattgatgatactgaagacttgggttcaggtaaaaagatttagcatcctcggacaactttttttgtgtgtttcgaagattttagattttaaaagttgaaatgaatgtgtacaggtttcgatgatattgagatattcaaggtagaaaaagaagtgagagatgaaggttattatacaaacacatcggagaagttattcacgtaagattgatcatggttggtttaagcttcttcgtcgatgctttctgacttacatgaagctgttgtagtcataggtgtcgatttgtaacattagagtcttccctttagaattatctcttctacaagacgtttcagtattcttattcttcttactctgcattgtcctattaggtttccatagagtttgggttttataatcaggttctgtccagatttttaagttgtttgacaaatatatttaatatggtcatgaaatctaaatgcctattttctttcatatatatatttgatggctttgttagaccatctgttttattactagcataattactccttaattcttgtcaagtttttgaccgatatctaagcatacacaacagaaggacctctcacaatgtatgatccattcgaccaaaccatagaaactggaaggtcattgtcagagattgtaatggtgagaccttgaatttcatcagtttagaaaccaaagacatttcagtggcccatattatatgcccatacggcccagcccattaagaaacaattggagcaatcggagaaaaaagagccagagataagctaaaaggtctacgatagttccatcggacatcggcggcgacatgacttcttcggcggcgatcagatctgacatctacgacagagaagaacgcaagcagttaatcttccttctttcgattcttcttcttcttcattctcttgttcactgtgttcgaattctgtcttctttctcttgattgctcagtcgtgtgtgcaggcaataccaagcacatattcgtggcctgaatgcttacgagcggcataagaagttcttgaaagactacggtactacacgtctttcaatctccttgtaaatgtctttggatttgttagctcgataattaggttttaataatggacaaaaagtttgggaaatagggtaaataagtggctttctatttatccaaaatccatattgtcccaaatcaaaactggttgatgaacagtcttctcctctgagctaggaaggagggctatagtcagccttacatgtcttatttgtggttccattagaaagagtattctttaccctggagttagctactatttgaggagctgttggtgttcttgtttaagattttgtagtttcattctttgttttgcaactttacagttcgattttatgggaaggataagcctgcagaagttaagtttaccggttaaaactgatcaggacacactacgagaaggatacaggtatggtgcaattgtcaatatgtttttgtgttttggaaagttataagttttaagatgcatgctttgttgatgaatttacaagtcttattgttgaatcttactttgtattcgccctattactacatcgcctttgtatgtttttacttaattttgggcttgtcttgcaaggtttatacgttctgaagaagatgatttggatccttcttgggagcaaagactggtgaaacgatactatgataagctttttaaagagtatccttcaaaacatagtgctgcttcagatacactaacatccgttagattactttaagttatgggattgtggataagtgcatgtctgttctccttgactgtttgaagatactgtatagctgacatgtcaaagtacaagactggtaaggtaaagtctagagtgtgagtaccacatctcattttagattcctgtaatcttttgttcagttgacttattttgaatttttttgtagatgggtttaagatggagaacagaaaaggaagtaatgactgggaaaggttagtggtacttcaaactctttgtccatgatttcttttgaaggagttgtgataagagttttgagtgtaaatgcaattgctttctgtcagggcagtttatgtgtgggagcaaacattgtgatgaaaaggaagggttagcaagctatgaggcatgtatcattagagagtttctcaattactgttttgatgtttgtgttggattttttcactgagcttgttgattttgcaggtgaatttttcttatcatgaagctggagaagataaacaagctcttgtaaaactcgtagcttgtgagaggtaggcactcattgtacaccttgcttatctctatgcttgtatcctggattgtttctatgcttttgtttaaaactttcttggtctaatatcaaacatttttggcattagatgtgctgagaagttatactacaaaaaaagaaaggagggtgaaagatcagagagtaaagaaaagaaaaaacagaaacgaaaacggtatggagaaagagatcgttatttgataactaagggtcacagttttgttttggattacattaagctaaacacacattaattttcaaattcaggagtaaatcacacagtgaagatgacacagacgaagaggagaaaagaaaagagggtgaaagatcagagagtaatgaaaagaaaaaacagaaacgaaatcggtatggagaaagagattcactcattttacaactaagggtcagagttttgttttggattacattaagctaaacacattaattttgaaattcaggagtcaatctcacagtgaatatgacactgacgaagaggataggagaaaaggtatgatatttgcaaacttcaatatattggtgtctattctatatagaaaaggttatggattattataattctgggaaggagttaatagagtcattcatattgcagggaaaacaagaaagtccaagttggaaagtgctgatagagaaggcaaggatgatgaaaacttcgatgaatacatggaggggatgttcccgggtaatgggtgatattcgagactttcaagtttcaaaaggtgaccatctacatcgcaagaatatcttttatatcataggctagattgagtttgaaccctgaaatgtaaacacttacatagccccttattcactgaaagaaattgaattttaatatcgagaccataacatcaaatacttttattatctcgagtttggtgttgatacctaagtatacacaacaataggacttctcacattgtgtgaaccatccgaccaaatcagagatgccgacacaatattagaaatacccgcaagactctttccagagactgtaacggtgaaagacttcttctcccctggcgccttgaaagagagtgtagctggctcaaccttgatgctgagtttgggattcccagacaattttgccttgtaagtggatcccttttccccaacgttggtgactgttcttgaaaaagtgatatctgaagacgatgaagctgacactttggctgacattgaagggtagtttagatttctcatagtaagctttgattgttcagaacaagtaaaggttccacccgcaatggtactaattccttgagaagagtagtccaaagagcaaagcatgttcaagtaatcctctttggctatttcgtaaacaagccctggatcaactgccactgtagggttaacaaatcctgatccgtatgcaaactcagcttctgcatttttcgaagcgttcattgcccaagctgcattaaaaacaaaaaggattgattcggatctcacttaacttaaactctttcttcagagaatagttcgatttgatgttgaaaattaccggtagtcatgatagcagatttgatggcagaagcagaccaatcaggacgtagtgtcttgacataagcagctacacctgcgacatgagggcaagccatagatgttcccgtcatgaaatagtaatccacgctttgtccaggaacgcggtttgagccagtggtgaatatgctgctaatatattgactcctgggctgttatatcaggctacatatatatacatctcaagacatcagtcaatccaagtaccaacaaatataagttataatcacataggtcggttatttcgttttgagtgttcgttactcaaaatgtcactaaagagagtgtttggaccgcgagaagagaaggcaggaacgactggagcaccattgtctttaactgtattggtcttcaatatagtcccttgcgggtttctgttcatttagaatgccattaacatcttaagagaatctaatcaaagatttgtttatgtaacatattcttacggtgaggagagaacgtaggatcttaattcttcataattggtatcatctaaggttgcaacggcaataggaccaagaccgggagtatcaacatcagttacatgaaggatagttccaaccgcacccgctgctttctgttccataacattatttggaacatcgcacacaacaatctttccttccaccgtgttcaggcaaccgctagcgcaacccctaccagagaatgaataccaataaataaagatatatccatacaagtgaaatgcttgacgcacaagttagtcattgtggattccttgaatcacaaattaccttgctagctcctctgtacagttatttgaagcagtttttccatacgccaaaggatacttctttccctctaagtcaaagtcattgatcgatcttccctgcatataaaactttaattagtcaccatgatgacgacaacaagcacattcatatatcaactgaacaagggaaagacttctaacaggtaacatcttgtcatctccattaaccacattagtaacaaattttctgtcagtagagccagcagccacggatatgagccatggtgcaaggttatccgcttttgcgagtgcagtgccggcatttccaaccgctaccgtggtaacaatccctttggtcatcgcgtgaaatgatccaatagcgatagggtcaatgtcaactttagtaacaccgcctccaagagaaatggttaaaacatctaccccatccgctatagcatcgtcgaacgcagccaaaattcgttcaccattgcaacccaatggctcgcacactttgtaaacagcaattctacctaaaggcacaccacctcttgcagttccttctgccacaccgttcacactcactccttttactttgtttcctgctgctgttgaagccgtgtgtgacccgtgagcgtcactgtctcttgcggagtcgtgcacatagtgtcgggctccaatcacctttctgcagtagaatttggattagggccgggtagttaatctttatcttttgctcttttcttgtcacgcaagaaactttgagaataaaaataaaaatgttactaacctattgcaggtgaaattagttcctcctgcgcaagttcctttccatttctttggtattgggccaatgccttcatctgaaaaacttttggattcaggccagattccgccgtctattacacctactattacattgctctcgacctcagggacattgttgctcttgtcaccaagtcccatgaactcataagaccttgtcgtaaaaagcttataaacggtgcttgggaataccgaaaccacaccttccatgcctacaaattacacaagacatcatcaaataaaccatcatgatcacgagtttcattatcttctataattatataactcaccaataagtttatctttttcagattcagtaagtttggctgcaaaaccattgaaacttcttccatagcttctgaccaaataatcttcaacggaactgccgatcaaaaagagaaaacgtaaacaacaagcaacaagatttgggttagtgagatttgagagtcttatattaaaaccttgattcgatgacttcttgaaggatattctgatggtgagacataggagagtaagaaatttttgatggaagagctcccatgtaagctatatacacctgcgtcatgacacaacgaatgaaataggccaatacaaattaagaacgtcgatagattttgttctttttctttttttgtttaagagaggaacttgatagttgttattatatatgtttacgaaacaaaacagaaatgacttgcttttctttcatcttcaatagctgtaggaacttgacaaaggctcatgagaagaaccgaggaaagacataggaacaagccaagggaagccattatcgagatgtttaattgttgataagaattctcaatatgtgaagttgctagttacatggttatatatatacgtctgcaagagagaaattaacaatgcatttatgttttagagatttatttatttattaggctttaaatatatttccttaagcttttttttgtgtgtgtgtgtggagatttatgtatttgaatctggtttgattgtgtccattatgattgatatctttaacagtgtatatatgggaagcgaactccataaatcataaatgtttactcttagttactttgattctttatatatcagatcttataagatgtccccaaaaaaaaaaatcaagatcttataatagtattagatacaaatttcgaaattcaaaaacatgaaagaccttattttaattctaattttcaattcttgggttcaccctttcttattcaaccctcttaactagccaattaatgtttttatttaatctaattaactaaaccaaaacacgctcacctattatctaaataaattaaattaattcattaaaaaatgttagattgaattaaattttaaatcttaaaccctaagcatttaattttatttaattgtaaaatcttccaaaaccaatcaatatataaactcaaactgacttaataattttggtttaattgtaaaatataaaccttaaatctcatttataaacccaaatttgacatatcattttgtttaattataaaatctaaaacctaatcactcttttattaatccaaaccgacatataatttggtaattataaaatttaaccataatccttatttataaacccaaaccgacatattttttaatttggatttattttaaaatatagtattacatggaaaattgttctattttgattggctaatcaaaagtgggtgaataagagagatttgctcctatgggtgaactgaagaactttttttgatcaaaactattttcaaaactgatatatatatataacacaagaaacatctcggtttcaggaaacatgtggtgcatgaggagagcttgaaaaaataattttgccacttatgttaccaaagtaaacttatctttttggttaaacgtattgagaaaaactctaccgttaaatgtgtttaagcaaaatgtttttaagatggtgacatatcgagaagtgattgtcgattttgtgcgagagaacacaaaacaaaaagaaatctcatatggtgatttagagtcgttaaacaaatctttaactcctccaaaaataacggtcacgccatcggataagagtcgacccatggccgagagacaatgtgggcacaaagttggcattcttagcgttaaaataaattagtgaaaaatccattcaataaattctttgagttatttatatgcacacacatatgtatatatatatatatatatatatatatatatatatatacaccaaagatttagatttctaggaaaaatctatttatttcaatttatagtcatttatgaatcatatcaaaatatttcacgtaacaaacaaacgaagctcactgatgcatctcaagtcatcaacatcagtttttctattaagccctctcaagattccatgtcatcttactctaaattctcaaaattaaaaccatcaatttattctaaatcgatgctacatcagctttggcaaataccttttcctctcctcctcaaagaaaagttcaggacaagccctaataaatcaaagttttaacaatatgtatagtcacaagcattgataagtcactataatttgcatttgtttaaggatggctttcttctaaggaccacggggttctgagcacccgtgaagtgaaatgctattctcataaatatcacttgcaacttatgttagatatctctttttgttcagtagtcacatgaatgtgtcttaatggtttgtaatttgatcatttgggaatgaaagatcttaatcttgtgtatgatgcatcttgagcctatggcttggttggactttcctttacctgaagagaaaagcaacgttgatggtaagttttcgtttcatatattcgttgggcatgtaaatttgtttctggtttttgaatttagaattcttattccttatatacactagatatttgttctaatcactgagattttggtgtataatattgattttgttggagtccagaaaagccatgaaataagcaaaaaatgtactattaagattcggatttcctgccggatatggttttcaatgtgtgaggtttttgtccatatgaagcaaacaagtattttaagggtatgcattttgtgatacctggtaatcatagcctatatagaaaacaatataccaagtagtgggtatatatagagagtaagcaatcttcaagccggagcaatataatggtttcataattagtattggttgctacccaagaatgtcatatcagaatctgaaaataaaaaagtatcactaatatagttatatagacaaagaaatgtatatatataacaacatttttactttcacaactacaaatctaaaatcataataaaaattctcaatccaactgttaatttgtaaatacgacaaaaataatggtaaaggattatagtttttaaaagtataggtattgtgtgtgagagttaaagatgcaaacatttaaatttattacaaataattaatataacgaatagggtgttagtggttatgaaatcaagatatatggattttgaaataatttgaaactatataaaatttgaaaatctctattaattatgaaatcaagatatatggatttcgaaatgtgtttactcatggatttgaatcattctatttttctctttcaaatccattcaattctatttaaaacataaatttggattctcaaatccaaaaacagatgactaaacgaataacaaatgatttaactagtatttataaatcatcgaatcaataacacatgattttaattagaatttcaaaatcaatgattgaataacaaatgatttttgtttgaattttcaatttcttattaaatctataaaccaataacccctcctaaacaattaataataccatctatgctttagaaaatgttaattctatcacatgatattttaacatgtatactttaaaatttataatactaaattaactaattatccctaatcaaatttataccagggggtagtccagattgtcccctagtaaaattaaaagaattaggtattagcttttttttttaactttttaaaatagcttttgattttgactatacacattttctatgttgatataaaactttcataattatgaactttggtggatgatgtatatcccccttagaactttcatatagcaccagttcaatcgagacttttgctctcgatctatatatttccatccaaaattgaaggcttaaacctatttacacacaccacgcataattatactgtgaaacatcaaacattttctaataccaaaacacttatggcaaaccttctactctatttggaagtttcaatcatttttaaaaagctgcatccaatttcttcacgggagtatttttcttcatcgtcactgtagtagcaaatgttttcgccacacacaaggccattcctatattttatgtgttccaaagcatattttataaaaccgtgcttctatatttattaacatttatctcattagaaaactatttttatttttaccttatttttaaattataaatttttattataaaatttttaattcgattgagtacatctcttattagttaaatattgttacattttctggttcaatttatattgtctaaaatattggttcatgtttttgtgactgcaatttaaatcaaattcaagatataaaaagtgattaacgaaagaatggagaagaaaaagaatagtaaacaaaaaaacgtagacaacaaaatattcacagttataacttggcgagtgttggaatgataccaaagttactaagcaattttagattgttcaccctattcttaatcttgttttgttttcaggaatcaattatcatcagcgaggatctagttcgaaatatttttttagtacaaacatatataatcttaagatccaaaagaaacgcataatggtgatatttattgtataatcaagtcaatgtaatgttttattaattttcatttcacagagatgtaattaaccatattcagagattccccggaccaccgtaaaacattatatgaccgagtattgagtatccgggaatattgtatttgtctataacttggtagccacgagtgtcgtccacaaatttttcggtatatgccactttgcggtcaatcttattaaaaccgtcgattacagatatccgtttgatatatgcatcgtagcgcatttgaccatcaacaaaatacccaaatcccatttgaggactcggcagtgatgcgctgtacacttctccaccccactccaccaaatttccagagctttgatgaaacctactcgacggccaaaatccaatttcctctgcagcattaccaaattgcaaccaccaatttccatttatttggtcctgttacccgaaaataataggtgaattttgtccttagtttaagaaacacacaaatatgtaagcataaaattttgaatgctttgtcatactcttaattattcaaaccttaattagaccgaagactccataatgagttgtcctagcaccacgaacagacactggcgataatgccataccaagtggaatatcttgacgaacaagtatcattccaacgtcgcagtagctattgtaacatgatttttcacctgactgttccatcaatatatacatttacttactaatatgtatacaaaatataaaaattaaaagaaattttttactaatagcgtgactcacttttgtatagacgaaagtccgaggttggctgtccttgtacaatgttggatttacctgaattagtacatataatatgtgtttattaaacaatataatacatattttgttagttactaaataaattaagtaactaagagcttgttgatcggtgcttttatctagatggcaaacaaattaaatcaaataacttacagtaaagccggtttggaggaaatcatttccaatctgaatgtgaagtcgagaagcactgtattggtttagcctaaccttaggagcggttaaacaaagatccattgttgctccattgaacctcttgtctgagccaaccgtccgagccaccgcaaactaatagcgttcattttcattcagtaaccaattcttattatcagtaatcagtataaatatatcaaaacatttttaattaaaagaagcaacgtacatgtttctggttgttactattagaatcatcagtggtataattccaagagccacgaggtttataattatcgccaaatgagtctaatctcaatagatcttctttagtgactctttgcatggggacggtaccaatgggacaacccacaccattctcccataggtaaccaaaattggtattgtttgtctttctttctctcattcctttccatattggacgcatctaaaacatgtcgaacaccataaatattttttatttttatgtttctaaaagaatataagtatatagaactgatatatcaaaattataccttgtaatggtatgtgtgattcttcattgaagggtgatcaaatgctggttgcttgaagaaatccacacatccgtatctttctccatctatactctatcattacaccaatatataaagaagttaacatttattactaaattgtataatatatagagaacaataacatggttatgaagatatattaaaaccttgatgatcttgacagcaggtttgttgatagtccttagtctcttctcgatttctaaatcttcaactttagaaaggctcttagcttcgacaaagtcattgctatgacttataattatgataccaaagatgcaacagattaagaacatccatatcacttccattttaatcaacaatagagagagacgagagagtttattgattttgaagcatcgaagataaacctttaatatataagagtggaggaggaacaaaacatttttcaattaattcaagaccattgaccaaaatatttggggaaagagttttatggtaaattaatcaattagtgtttggtcaacaattcctgagataatatatgttaatattatgaattaacatataataccattgatttaaatcaatttggtagattttacaatagggctaataagtatgtctactttttctacttttaatgaattccatatcattttagtccatatcattgtatttctaccaaatcaattttattatttatttttttaatatagaaaattttgaaagggaaaaattagtgaagtgttcatatgtatagatgtaaaccttgttgccattgaagttattgaattgctttctctgtatttatgagaaagatgactatataataacagccacccacagtttgttacaacttagtctttcccacctctgttgcattacataattcacagtagacttggtcctttgaaacgtcccatgtggttattttaatgaaggcacatcacacattatttttttctcccttgttgaatcttataaatgagaccttaatgccaaattgtcacttcattcgatgtgacttcacatttctcttgaattcatctatgttgccggacttcacagacaaatttcctaagacgctttatgtaccagcttgaaactcatatcttaatcaaacttgagtatcaaaacttgtaacaatgtactatggtgactatcgagtctgatgatttgaagtttttaaggtgaagacaacatttcatctgagtccataaaataaacagtatctttcaagaatattgagataagcttgaaataaaacttgagatataagttatttagtttaaaaggattatgttaaatctttgagagatatccaaagatatattctaggagttatctagtattaatccttatgtgtttaggttttgcaagtctctatatatatgagtcccaaggtgtggttgaccatatgagttgagagagattaagagtttgtaagatcttaggttttgagtaagttttctaaagaataaaagaagagtcttttataatcttgcatctctaagttgaagtcttaattctattttcgagaatgtaccaacttgaaactcatatctttcgagaatgtgatagcgtacgaagtaaagtacagtaaacggtaaaatcaagtttgcgatataagcatatgccttgtaatcaaatggaaccttgttaacaaaacggacttagaagctataaaccgataagcatatgctctttaggaagacagtttttttcattttgaataccccaaatggtttcttatttaatttagctaatgtagatgccattttgtatctcttatgcacatatatataattattgtaccaattttctgtttaatttattaagtccttgttttaaagaacataataaaaccgatacttatgtaaaatcaagtcgatgcaatgttttaattttatattataaagatcctatcgtttctagatatttcctggaccaccataaaagattatatgaccggccctatgtataggatctcgggtgtctatcacttgatagcctcgattatcgtctgaatagtcttcgagatagtccacattgcggtctatgttataataacggtcgcgtatggatatgtgttggatatatgcatcataatttttatcctgaattggaaaatatccatatcccatttgaggactcggcagtgatgccctgtacacttctccaccccactcgacataatttccatagctttgttgaaacctatgccccggccaaaatccaatatttactggctcataattaccacccatttgcaaccaccaatttccattttttctctcctattaccagaaaattaagacattacttttatgtttgtcgaacttttgaatggttagtcgcactcaaacccgatttttttttaaataataaataggatacaatttgtcaggaaatagtattttataagagaaaaccttgactagaccgatctttgtatagtattttggccaatcaccacgagtagacactggcaccaatgacataccaagtgcaatgtcatgacgaataagtactattccaacgttgcagttggtattgtaacatgagtttccatttgactgttccatccatgttaattctttcatatatatatatatatattcaaaaaaaatattagaaaaagaattgactagaataatgtgactgactcacatctgtatagacaaaagttcgaggttgcttgtccttgtacaatactggatttacctgaatagtaaacaatatttgttttatttgaaatcattaatttattaaaaagtataattaacacatgttttttaaagttattaagtaaacagaagtcgtagctcaatgcaaaataaataaactaagcgacttacagtcaaaccggcttggaggaaatcccttcccatctgaatgtgaagtcttgaagcactgaattgggttggcttaaccttaggagcggttatacaaagttccatcgttgctccattgaacctccttcctatgttcttcgttcgagctaccgcaaactgtgaattgaatgcccaggaatattatcaatatatatcaaaatgtgaattgataatcttgttttattaataaaaagaagtgacttacacgatgttggttgtaatgaacaacattattaggatcataagtggtagtgttccaagaaccacagggtttatgattatcaccaaatgagtctaatcttaaaagatcgtctttggtgactctttgcatagggactgtaccaatgggacaacccacaccattctcccataagtaaccaaaagcagtattgtttgtctcctctttctcccatttctttccagattagacgcatctaagacatgtcgaacacaaacatatcactgtccttttctttttatgtttataaaagaatatacgtagataaagctgatcagcagttattttataccttgtaatggtatgtgtgattcttcatagaaggatgatcaaatgctggttgcttgaagaaatccacacatccgtatatttctccatctatggtctatcatttaatgccatatatatatatatatatatatatatagaggttaagatatttattgtattattaatatatagagaacaacagaaagattgtgaagatagaaagaaaccttgatgttcttgacggcgggtttgttgatagtctgtagtctcttctcgatttccaaatcttcagattttgaaaagcttttggcttccactaagtcattcttatgacttacaattaagtgaccaaatatgcaacacattaagaacatccatatcactgggcctctcacttccattttttcaacaatagagacaaaaagagagtttactgatttgaagcatggacgatacatgtttaatatataagggtcgaggaggctgaggaaggaacataatagtttgttctccttaattcaagacagttgaccaaaaatgcttttttggaaagacttttatgctgataatcaatcaaatagattcagtcaacttatatacatataataatacagttgatttttttagcaattgacaaaaagaatatgtttttcttttccaattatagcaccacaattacaaagttccacaaataacactttagactttaattaaattttaaatgtaaattaataatttaactaaaatgatgaataaatacaaaaaaaaaaattaaggcaaaaaaagaacatgaaattcaagaaaggattccttgaaagattccatgagtttcaaaaaatattctaaataattcaggaaaaactcttcaaacttccgaaaatgattcttttctgaagttaataggatccttccctaacttcatagaattcttttggcagttcaaggaatcattcctgaattttgtgacttttgtaggcggaaagattttgatgacaatttgttttgacggaaaaatgtttttggcggaaaagtttatacagaattgttttggtcgggttaatagcacgtaatcatgttttgacggaaattcctttttgtcttcaaataaatatactttctgttttttatttaacttaacgaacgctcgtacatctctgtaattgagcgtcttgtcagaaattattcatctcagctttctttatcacttcttgtactactttcttgattacctcatgtaccactttgcgactaatacaaaacactcaaacgactacatcaacaatgtcttttagacatgataattgctttcttacgtttacttacttaatcagcctcctcaatcctatattaaaagctttcatctttcttccttcgatatttctcaattctctctttctttcgctttcttatctttgcactctcatgttgataaaaatggaaccgataatcctagtagtatggattttttgatgtgttacatctttgctcacaacaatggatttttagaagctaatgtaagtacatgatatgtgaaaacacagttacattcaaaaattatatatcataggattatatgttgcacaattaggcgtataattgatggttgtggttttttatgttaagatgatttcttatttgatattttataatgatagatatcatgttaggtagttgatacatgattatgataatgatgagttttaatattatatgatgttaaaaatgttatataaaaaagaaatatcgcccaagaggtgatgaaattgtattattgtcttaggatgatgcgtgtaccacccttcgatgatgaactgcagaacctggtttgcaatgggctgacaagatcattgtagctcattaacttgctgacaaacccaatgaaactggatatcctccccaccggatttatagaaaatacacactttaagtggtttttgttatagcgaatatgacaaggatatcaagattagttaagtagttataaacacttcaatgaatatgttttaaatcattaatagatcacttctgtgtgacattttgaaagttcctttagcttgttcactgccccgtctatctgtgccacttctatctctaatcgttacgaagaagaagagaagaagaagaagaagggagatcgccaagccgattctctattaattttattaagaccttgtttaaaagaaacactagacaataatccgcattttgtgcggtacaaaacaattattaaattattttaatgtattaatgatattgaaaatgttcgacttttatatcattggacaaacggttgtatattaataattatcaagattagcgaaatttttatttttgtataaatgtttctgtttatcatggtttatgatatatatcttgttatactaatagatacacaaaatactatatactctatcatattttatttgaaattttgtttaataattgataaaaaagcatatattaatttgaaaaataaacataagtaaaattaatggcaaaatctgtaaatattctaataaatattggatatttattattgaaacctgaattttcttattctcatataataaatagtatattatttgtcagtgactagtattaagaaagaggaaaaccttgtatacattgaactttgcatagttacttgtctcagcaccacgaatagacgctggcagcgccataccaagtggatagtcatgacgaatgactatcattccagcgtcacagtagttattgaaacatgatcttccacctgactgttccatcaatgttaattcgttcaaaaaaaaaaaaagtcgaaaaagaatttactagcattatgtgattgactcacatttgtataaacgaaagtccgaggttgcttgtcctcgtacaacattggatttacctgaattagtacataatatttgtgttatttgaaattattattaaaaagtacaattaatacatgtattaaaatgttattaagtaaatagaaccaacttgaaggaaattgtaattgatacatgttttttaaagttattaagtaaacaaaactcgtagctcagtgaaaaataaataaactaagagacttaccgtcaaaccaacttgaaggaaaccaacttgaaggaaaccatttccaatctgaaagtgaagtcttgaagaactccattgggctggcttaacctttggagcggttacacaaacttccatcgatactccattgaacctctttcctatgttcttcttcgttcgagctaccgcaaacttatcccattcatttttattgaatggccaggaatattatcaatatataaatatatataacaaaatgtgaattgatatcttgttttactaataaaaagaagtgacttacgtgatgtttatgaggaacaacattaggatcataagtggtagtgttccaagaaccacggggtttatgattatcaccaaatgagtctaatctcaaaagatcttctttggtgactctttgtatagggaccataccaatgggacacccacaccattctcccataaataaccaaaagcggtattgtttgtctctctttctctcattcctttccagattgaaagcatctaagacatgtcgaacacaaacatatcaatgtccttctctttttatgtttgtaaaagaatatacgtagataaagttgaccggaagttattataccttgtaatggtatgtgtgattcttcatagaagtatgatcaaatgctggttgcttgaagaaatccacacatccgtatatttctccatctatggtctatcatttaatgccatatatatatagagaggttaagatattaattgtataatatatagagaacaacaacaagattgtgaagatatacaaaaaccttgatgactttgactgcgggtttgttgatagtctttagtctcttctcgatttctaaatctttagatttagaaaagctcttggcttccacaaaatcattgttatgacttccaattatgttaccaaagatgcaacacattaacaacatccatatcactgggcctctcacttccattttgatcaacaatagagagaaaggaagagtttattgattttgaagcatggaagataaaggtttaatatataagggtcgagaaagcaacaaaataatttgctctcctgaattcaataatattgaccaaaatgctttttggaaagacatatatcaatgacatcttcttattatataaagtacggttttgaaagttactaactcacgagatcataacacatggttatttgaacgatctaagattttgacatgtgtttgatttttttttaactttttcctaaaaaaataggaaactaaaaaaagaaatatatatacatatactaatttatatgtttatatctaaaaaaataacttataatttttttaactaaaatagaaaactaacaataagatagagtgtatataattaaattatattttttattatggtaaaatagatatttaaactgtattgcaaaattaaatttgtaagattgaaatttggtttaaggaaatactaaattacatactaaaaaagtatgtgagttacgttactatttaaaattcaaatatcatcaataagatggaatgtgtaaggactgcatagtacgggttactcatgtgtatagtaaagttaatctcatagtgaatggattagcaaactatgtgttttagttaccgctcgatatgcatttatttgatgtttgtccgacagttgtaagtccgacattattagagaatacaaacggaatgtcgtttccacggagtgtgcgaatgaggtttttgtgttatgaataaatgataggggacttttatcccctacaactctacaagatagtttattataatgaaacagataattaaaatgtaagtaaaattgaatgtgtatgattgaaattttatttaatacaaaagttattagattaaatatcagatacattactatttactatttaaaatttaaatattattgaatttaaatattattgataaatatttgaataaatttatatcatacacccgcctatttaggcgggtcttatctagtttaatataaaattggttgaacagtcaacaattatttacctcctactttttttttcaaaaaaaaaaacagtcaataattacacatattaatagaaatatatttatacaattgattttaatagctcaacatttcctgagagacttatatgttaacatattaataaataaagttatatataaatatatattcaatatcaattaaagttaaatgctatatagcattaaacctctttaacttaaaatcataaattaataatcattatcaaataatatttttctcttctttccagtcggactagtataatatttgagataattcaaaaaaaaaaaaaaacatttgacatccatgtttaaatgtatagtttcattgatatttttgaaattaataagtgtataaacttaagagattgagtgtaaatgccccgtctttgctgagactaaccctaaagatatcaagaggttctgagtttgatgagcttgtgatagacactccttctttgaagtatttcgaagttacagattataagggtgaatatgaaactgatggtgctgatgatagctactccttcgattttaaagatatgcccaacttggaggaggcagatattagttcgacataccctgatatctacaagtttgtcagatcagtcacatccgtcaagcggctttcattatgcataagagtcaatgccgaagaggtaacctgtttccatctatctatcaatctcattttagaacactaaaccaggttttcttgagcttcattccttcatcatcatgtgcaggctttatatcctgatggtattgtcttcaaccagcttgagaatctaaagctatgtccatgcgattcaaattggtcaaagctatttgtccggttgctcaaatattctcctaatttacgagagctcgaagtctccctcaatgaagtaagtttcttcgatatagacctattcttttggtttgatatactaaataatatttaagccaagcttttatgtttgacctcagggtcatacaaaatgttgtgtggatccacaagtttccttggagaatcaactgaattttgttcctgaatgtttgttgtcgagtctccaaactttcaagtggacagggatacatggatcgctgaaagtgatggatttggcaaaatatatcttgagaaatgctcgttgcttaaagactgcgacaattttatttcagccagctctagagacagaacgtgagacaatgatccaggagttgttactttcttttcgaggttcaacaactcgtactactataatgttttcatttatatgaaacttgatagtattagtttggaagtttcttctcaacttttagatcttggcttcgacaaagccattttttaagacttataattatgtgataaaaaacagtttgcaacaataagagtgtgaaattattctttattttgttttttatttgtttattatttcattgtagatacctattaaaaacatatatatactgcattatatgttctttggtcgtggtgtttttgcagtctgcaactctcactctacgttgagctatttctaattctttataatctagattcttacgttgagctatttctacgttaatttggcctaagtttactaaattgattctgcaaaagagttagaaagagattagggcttcatgggatttcctattagaaaatagaaatataaggcccaaatcatgtcggctaggcatcatatatatcagagcatactcgacaatgaatattttattaggtttttttcggttcctcttattttattattccttgcctctgttcttcttgaaggttactaagatagatcagtgttttgtattttaagagtcggtgtttatgtcaacagtaagagaatcttggttaaaaccaaaaaagaatatacaaacgaaccttggagattatgaagatatggacaagattagtaggttgcctgatgacttgctcgtgaaggtactgctgtttcttccaactaaaattgctgtaagcacaagtattttatcaaagcgatgggagtttctttggatgtggttgcctaaacttgagtaccataataccaattattcagcttctgaagaacagcggttaaggagtttcatcaatttgaatctgcaattacatagagctcccatcatagaaagcttgcgtctcaagtttagcctggggagatcaattaagcctcaaaatatcaaacaatggattataattgcagttttccgctgcgtccgtgagttaagcatcaacctttttcctctttattgtattgagaatcctgctaaattgccgagtagtttgtatatcagcaaatcgttagtgatcttgaaactgaaagaccagattctcgtggatgttcctcgtatggcttatctcccctccttaaaatatttgctcctaaagcgggtgacttacaaagattcaaattctcttcatcaacttctttccagttgccccgttctcaagaatctagtcgtggaacgggatgaatataaccatgatgaaacattaagtataacagtctcgtccttgcagagactaaccctaaagatatcaagaggtggatcgtttgatgagcttgtgataaacactccttctttgaaatatttcaaacttacagattatttgggtgaatgtgaaactgagcttgatgatgatagctactcctacgtctttaaagatatgcctaagttagaggaggcgcatattgattcgacataccctgatatcggaaagtttgttagatcaatcacatctgtcaagcggctttcattatgcgtaaaagttaacgccgaagaggtaatttatttcagtccatctatcaatctcattttacaacactaattactaaaccatgaggatgaatttttcgttatcggttgcaggctttatatcgtgagggcatttgtttcaaacaacttgaacatttgaagctatgtccatgtgattcaaactggtcaaagttacttgctcggttactcaaggattctcctaatttacgtgagctcgagatcaaactaaataaggtatatttttcgatagagtccttttcttttggttgattttactgtagttagcactcatgcctaactctcatgtttgatctcaggatcataaagctagttttgacgatccagcttgcttggagaatcaactaaattatgttgttcaatcttcaataccgagtcttgaaaggttcacatggacatggatatatggatcgcaaaacgagatagattatcttgaaaaacttaagaaacgcttgttgcttactaactggcaaaatcttgtttaagactgctccagggatggagggtaagcgtgagatgtacgaagagtttatgttttcttttcgaccttcaacatcatggtaattggtatttggttgtggattggagtcactagatgttttcatttatctttgattcaacttccatttttatcaaccttgatgatcttgacaatgggtttgctgatggttttcaagtttattctcaatttcaatagagccattgaacacaccgttttatacccatcaaagtacaatgtcatgtattctataactctagaatacaccgttactacggtataatcgttgagtacacccgtcttgcacatcctgtaccccacggagtacaacgtatgtactctacggagtacaccgtctcataccacgtaaagtacatcgtcacgtatcccgcgaaatacaccttcatgatattttaagtttatatcaaatattgagtcatagatatgtcatacatatatagtaaccatattatcaaattaatgtgatcaaattgtggaaaaagactgaaaagtgaaaacaacgcatcaaggtttgtgtggtcgcagatctagactaccgttaaccttttactcgactcctaggccaagagacatttattccaatggaatgacttatacttatttatacagttaaaatatattaaagataaaatatatctttaaaacagttagttagttacatcaaatattaatttaatgttttaaattaaattaatagatttttcaggttatatataaaaagtagcttttgacagaaaaaagtattctcaaacaaaaactcataaaggaggcatttttccaaatctactcttaaagaaaataattttgtaaatttataagatactaagataataatttttataagatctaagataacaaaaaattataagatactacgataaaaaaaattagaattaattatagagaaatataaacccaataatatcataaatgaataatgattaatattaagatatacaattaagaaatttagtacattctagtgtttttttaatcttttttaaatttgaagttataatctcgatagaactcctctataatttttcttattgcgccagaaaacagagttttaaacagatcaaatgagcccttgtcaaaaaaaaaagaaaaaaacagatcaagtgagaaaagaagcaaaatgaggaaccgtggaaatgatgaaaaatgtctttcttctttaatcactaaacaacgaatctgaacttaaagaaaagttctaatgttaaaatcaaattatgttttaagcgattacagactggatttattcaaaaaaaaaaagattatagactgaatataatatttttcaattttttttattgaatgaaaataattccataaagtaatatcatgtaaatttataaactttcaaagtcccaatatattaatatatagaggttttactgtatacttttacatattttgatataacataataaaatttaattaacacgagcgatgtcaatcaaaatacttggtcatctctctagactccttaacacgaatacaagaagttgaacaagatattaatccaaaacattggaaaactattttgtgttgacaacgcttctcacaaaatgagcaaataggtcttgacatatgatgattgttgggtagaacgcctaccttgctactgcggtagaaccaaaatgaaccaggcttcatataataagtccactccaagcatacattctatgtgaagggtgacacaacaatactcatcacacatataaaaccgctcctttgattttatttttttctcgcaaacttcacaccaatttggtatggtacttgtttcctctccataagaaagagtaagcatatgcttatcatgcttatacctcaccttatgaggtaaagtagcacacttgaaacacaaagcaaagtcgcactcaatgcaattgaatgtttcatttgtggaacaatgtcctaactctttgcaaacacaacatcttctttcctctcctggtttcgatgttaagaacaaaggatccatatgactttcatggactaatggctcataaattgtggcacactgcacgtgtaccttaaaacgacattctctttccctgcactcatagaagaaaccagttgtgcacttccaaggacaaactgaacatgatttcgtagcatccataatgtcagattttcccactagagtaagtagatgtggatgtactgggtgatgtgttttgcgagacagttttgcacattcttcgtgaagactgaaatcacattgcatacatgagtagacgttaccaaaatatatcggagtgatgcatgcttggcacaacttattctcgttgtaatctctactcgtgttctcatcaagtttcaaacgatgatgttcatgactgaaatgtcgtatgcttccatctcttagcgtcacaaacggctcaatttcattgatgtcttcttctggctcaccctcaagttctttaccatcccacacattgctctgtgtggcacattttgaatgtgctacatacgaacaaccatcctttttgcaagaataacccccataatcattgtcgatctttctacgacaaacaccacaacatcgaactccttggtcaaaagaaagagtaaaatagatacgatggaaatggcgagatatccttatgacacgtggtaagctgagacacttttggtgaaccacaaagtcgcaagggggacatatataaaaaggacagcttgaatatgccaaggaacaaacgttgcaagttacagaagtctttcttggaaattgagtaagtgtatgctcatgccactttggttggtccaaagacaagactcttggtttctctacacaagcaatattcatagcataatcgcaagctgagcaataataaaatacctcttccagatcattatcgcaacagtaacattccctggttgtgtccccattcaacaagacaagttggagagaatggtttggatgaagagcgtgtttgatcataactggagccttttcatattccccatggttgtcgacattgcaagtttgacagtgaatatggcaaaggccttcttctgttatccggattctcttccagtctagagggagacacttccacttgcccttgctgctccacgagacttcttcaatgacatgaaatttccctttttccaattttacttgtacttgagggtatagaaaaataagcctcttccacactgaattcatagagatgacgagtgagaatatttgatagatgagtgatatgaacttcggctcgggctcgagtctcaatgtttcaccaacgagagacataagataggaatcgagactcattgttttacaatagaggtccaaatctgtgtccgagtttgaatccggctccaaaggctttatgtgcacatatctgtccgagttcgaatccagctccaaaagctttgtgtcagaatctgtgctcgagttcgaattccgccacaaaaactttgttcccgaatctgtttcaggattgaaatgtcgtgcgagtatcattggctcgagtgtcgttcgccctaatttcaatttcaggtcctggttccgcttcaaaacgcggatagatttggcatgagtaatttcttcagaaatgagagatatgagattccttaacggatccggctgggaatccaaatccatagacttgaagagcgagactgcttgattagtgagcgacacaaattccgtctccggctgcaaatcaaaatccattttactgaccattgagattatttgaggaatgagatatatcttcagagataaagttataggttgagagattagttgagtaatgagagatatgagattcatctccagatcaatctccggctccgactctggctctgaatctggctccggctctagctccgcctccaaatcaggcattgactccgactgtcgctgccgaaagacgacgtgggaaattatttgattgatgagtgatataagctctggctccggtgttagactaaatgattcttgaatgagtaacatgaaaatctccaagtctggcgctgaatccgtgtcctgctccgaaataagatccgtagagttgacgagtgagaccttttgagaaatgagagatataagcttcattaacggatctggctgggaatccaaatccatagagttgaagacatagactgcttcattagtgagtgacatgagcttcgactccggctgggaatcgaaatcaattgagctgaccagagagattgtttgagtaatagttgatatcatcttagatatagaatcccattctggatcgaaacctaaatacggattccaactctcgctgaaactactgatttgaaggatgaatgatttgagctttgactcgggattcgagtttgaatccataagagatgctgagagattttttgagcaacgagagatatgagaatgagatgattattttgactatgtttctaattgctaatttgttaacgagacattgacaaacttaggggctgtcgcgactacaaagtcaacgatcaatttggagtattacaagagtttagtattcgtgtttatgcactacacgattgtcttcgtaaacaaaatttgtttaaataatcttccactattttgtttctcatttcccaaaagcattgaacggtcgactttgaatggcgccatggacattaatcatgtgtagctggcggatcttgtctctctctttttgttttttgacaacttgctaatcttttcctcttcttttataatataacttgcggatctttcctcattctatttatatagatttgaaaaagtttacagccgtacaatgttaaaatttataggtcatctgaacgcaaagtcaatgatcagttaagatataacagatggctatataatcgacatctatacatggttatgtatcccaactaaaataatgttttttttttacttatactaataaaaaattgattggtgagatgtactaactaataacaggctatgtaattaacaccataaccatcaatctgatcattatttcgatgaagtcttttttatcaaggggagattgcttggggaagctgagaaagagaaatcagaagaagagagaaagcggcagtttcaaagaaataatggcaacgactagttttgacgtagtgcccactttcgtataatcgaaggataaataaatagttagtacagaaacaaaaataaataaatatataaataaaatgaaatgaaaaatattcctaaataaaatcttaaccaaaaattcacagggcactcgtttattggtccacggcaacaacgtcaacttgtgatccacgtgttttttcctagaaaatatactgcaagtgtttaacaaacgcaatagtatatgtacggaatgaaccacaaagaccaagtgaatacgatataaattatgaatctatgatggtttagattaagctagaatgctaaagagttttggccaaaaattcagaaattaacaagaaaaaaaaaacgaaaaaaaaacgattgtaaatcaataggtaaaagacatcgggtaaagggaatcctcagggttcatggcaaaagaatagacaattaaataagattgcattaaaagccattcttgaactcaaaacacgaaaattgcatccgctcttggagtgttgattatctaagcaatgaattttccagacactaaactttcgtttgaatctaagaaaacgagcaaccattaacgtccagtttgatatgttcacaaagtaaattaacctcaactctcgtcggctaaggacactttgctcacctatattgtttcaaacaattcaacaacactttttggtgtcaaaatgtattaaatctaaaatcaaaatctaagggaccaatctgaattaaacaataagaacacccactaatgaagaaccaaaatatcaatccaaatataacaacctaacaatcaatctatcttgaaagtccctataaaaattctaaacccagttggaagcctagtcaaccataaacactcctttgaagtacttcaagttacttacagatagagatagctactcctacgattttaaagatatgcctaagttaggggaggcggatatcgaaacgacataccccgatatcaacaagtttgtaacatcaatcacatctgtcaaccggctttcattatgtgtaagagtcaactctgcggaagaggtaatttatttccatccatctatatatatactctcatctatgaacactttcatattgagcttaaatcattatttattctaggatttttattgtgagggaatttcttcaaccagcttgagaatctgaagctttgtccatgtgatgcaaattggtcaaagttacttgtccgttttctcgaaaattcgcataatttactagagctagagatcgatctgaacgatgtaagtattttcgatatagtcttttacttttggtttaatttactgcattcaaactttaaggaaaactctcatgtttgatcatctcaggatcatatagatagttgtgtggtcgatccactggtttgcttggagaatcagttgaactatgttcctgaatgtttgaggtcgaatctcgaaactaagtggacagggatgcatggatcacagaaagagatagatatgcttaaatatattttgagaaatgcttgttgcttaaagactgcgacaatcttgtttaagtctactccagatacagaggataaacataagacgatgatccaggagttgttactttcttcaacaacatgccaactcgtatttgattgaagattttaatcaatgaatgtttttcatatactacaatttatagggttttcacttatgatcgttttgaagtttcttcttacatttcttacattttcgaattagaaaaaccttggtttcgagtcttttgacaaagccattgttgtgtcttacaattatgtcaccaaagacgtaacacatcagttgttaaaaggtatctggatcacaatattttacgcttagaaatagcagacatgaatgtaatgatcataaaagaaagaggttagagagattcatagagtcatacaacaaatactagttctttagagcgaattgtgaagagtcatcatatctggctaagaatatcgaacccgtggaagaaattatcacaaaggattctactttctacctcatcaacttatccccaaatctctcgatcacaaatccaagagattcatacaatggtatcaatccttgatactttcctgcaactgttgagcaaactctgaccctcaactctcaagaagctacctgtccttgtcatgtcagtcttagatctgcgagatcaaagccttcaaagactgatggtttacttgcgggtacctacaggagcaaacactggaagttggtttgaggtagtgtctcttttgaatctagcttcccgaggcagtgttaatgtcattcggtcttgtccctctcttcccgagtctccatcgtgtcttaggccatctctatttgggatatttactagggggcctccaaagaatattgattcacctgtatacatcagtctctctccttgctgctgctgcgtaggaggtggagcccttccagatgaagaatcttgaggcggatgaccaacgggtcttggattctgagtgttacccatgtgtgagctaggaattggctggttctgtgaggagaatctggttcttggctcagatgttgttgcaggaactgatatatatctacctgcttcttggtcccaaacaactgatgttcttctcacatctctcagaagagaagcagcaggagcagggagaagcagtggatctgcatggtttcctttctgcattatcttttcatcaaaggttgagtggatcatgtgattagttgcttgattaagaggtggccgggaagaattcgacgcggccgctgcagtgaagcggtggccagctgtatgatgctgagggagaggactaagtgtgacggtctcatgaacatgacttggactgctgagactgctcatactatgggtccctgtgtcgtactcgtcccgactaccttggcttggagcataagagtttctacaatgagacaacattggatcattgtttcttatctctctactcagcgtagctccatttgcttctgtgcttacactgcttacaacactgatggtgccacttctggaactaagttcatcatcatgtaaatgacgattttctattggtcttaggacagatgaggatgctctggctctggctgctgctcttgtagcttcatttgaattcagttttgcaagcttccaagcactaattttgacaggtctctttggaatcttgttgcccctctctgctgtttcagctgcatctggatctacggttgatggaaccatccgaggatccaaatgaggaatcacttcgtcctgtaacatagataacaagtatcaagcggacatatcaataactaaacagagacccagtggaagctctacgaaaattgttctatttagggttcatggaaagcaaataatacctgataatcaacaaacactctaggaggagtgcaccatgctcctttgtatggtagaccgagggagcttccaccactaaagccggtcgtggcagatccagagggagaatacagcacgttaggaatttcctcatcaatcgaagctccagctggtgcctcgctcattgctctcattgccacaacatattcataagttgtaatgccctattagtgttaaacaggaaaaaaaatgagttcacgttgctttgaacatgcgatcagcccaattacaaacgaagtagaggacatttattatatacaacatcctctaagcagtgagacggtttagacgaatgtaacatatggtctcaatcatgattcatgaagggaaaccaaattctattctcacaaagagcatgcgttttcatgtgctactcaattattttgggaataatgttgactataagattaaaataacaatgaatgttttgtataccgtcttagtaccagtaaagcgaatacattacaaacatataaaagcatattgacttcttccatactcacctttttaatgaggagcatgtggaaaaagaaaagttcacctaatggaaacaatgccagcatggaaacagcagtacagagaccctgcataaattgtaagaaaacatcaggattcaggaaaatcaacaatagatgctcacccttacactaagaatacttacaacaactgtggcaaaaggtgcccgagaaaatccatttccaagtctattgacgatttctgtttccatgtccttcttattaacaaatacacgcactataactgcaattccaactcctgcttctataaggagctgagaaagagaaagatttattgattactggtaagcaaaaagtgagcttgagaaaaggcatatcaggagaatatacgtacccagagaagactgacagccatcagcgatataaaagtcatataattcttgcgaccaacacaattgttaagccactgttgcatttaaatacagctatgtcatttgatcacacccataaaactctagtcaatcaactccaagaaacagttaattatcataacagtaagaaatttacccggcaatgatgatcgaaacaatctacacatttgtcgcaacttcgacaatgcttgctaaacttacggacctgtcacaaaaccaaggtgaacaaaggatttagtagttgcttcttactcttcaagcataaaccaatattaacacattacctcagcattgcacaacgtgcaaaacagagcttcttccctatccccttgctgctcatccgtctcttctttgctacgacaatcttcataaacaaacacgccacagcatattgccaacggattaaagcaagattttcttttagcagcttccactctttgagcatctccaacagaacctttcacactagagtttggtaaagtagaagtcctggaagcaaccgaaggggaagactgcaggtggctgcccgtttcatcaaattttctcgagatatctttggcagtaggtaagtcaccacctctactcgcacctctttcgaatttcgacatgattcctggatcagcaggattgattgcagtacaacgaacataaagaacgaaaacaataagagcctgcaaaacaaacacatgacacaagaagcaaaagggtatcagatatgcaaaactaccatgtacctacctagctcttatcaattccttatcattctctaaagcgattctagtacataccacaggagagtaaacaccgagaagaatatactcccagatgcgtcctccaacaaaaggagcgaaaaacgcatagtatgctacactcaataagcagaacaccgtaatcgcaaccacctgtttcatgaccaaacgaaacaaatgaactaaaacccaaatgttagaaattggagaaaatcagagaaaggttgaaataaaagacctgaaatttgtgagcaggaagttgccaaccatgtttcctcaccatttttgcttcctcccaaagcttgaacacactcacgaatcacaaaatctaaacgaaaccctaacgccgccgcaaatcgtaaaaagagacaattttgcttgcagttttgcgaaacccagaaggatataagagaaaccaagctgagaaaatatcttcttggtcttcgtatctctccctatctaactaactatggtaggtcagtcatagtcaagtgacgaaagaggaaagtaaactcctgtaatatattaaattgaaaataaaagaaaaataacgaatgtgaaattagagatgacctaagcgaattcaaagttagcaaatttagagtcgaatagcgaagaaaaagcttactgtgtagccatggcggagaccaaagtaactggagaaggaagaagagagagagaaatggaagaaggaataaaagagagaatttttagaagaaagaaaaaagacaaaatagaaaagcgttgacaggctaaaagagcgagacggacaaatgaaagtggttactggttactattagtaccaacgctggatttttagcttacgtgtctatttcacctctttgatattttctttttttccgtagcaaattttaattatttttaaattatataaccattattaatgataatatggtagcttaaagtattaattaaataatataatttttatataatattaaaaagttctcagtaatacttaaatatatatatattagaaagttatttaatgtctaaatttcagatttttagaagaatttagccaaattaaatcaaatattaaaagattttgctgtttaaaaaggaattaaatcaaaaaatattaaatgaattaaaaacaattatcttccactccacataaaaaaaaagatatgtgagtagaaaagaaaaaaaatattaaaagataagatgcaaaccctgcatttgtaactccataactaaatctaaaagcaagtgactcagagcacaactctcgtacaatttgccctacagttttatttatatttggtggcaaatgtcagctctgttttgatgtgaaagccatcaacatcatgtaattgattagcatattacatatagaatatgagatacccacatatatatagaaaaaatgacggtaaagattaaaaaaaaaagtatacttgatttgtcataataagaataagcatgtatctcatatgtacaaaaatagatttaatgttatttattttaatattcttgtattttttgttttatttgaacttataataaaaaaaaaactgtagatattaatagttatgtaaaaatcataaaaatagatgtaaaaatcatattaaaagttatgataaatttagtttactacataactcttttgaaaaatgtggaaaaattatagtaaactgtatgaaaagaagattatcatacagttaaaattaaaatcttttagaacatgtgtagtggtggtttctaaccaaagtttttaatttactaaagtaataataataaaaaaaatatttaatttgaagagttttttaaaatagttttttcaaatcttttaaattaaaaactttctcatattttcttagaaattgttttaattaaaaaaatattgtttattattttattattattaatgtaggcgagagattttggtaaaaaatcacaatgctgatgcttttaaaataatcaatttttctaagaatacataaatcagcaatgcttctcacacgccaaacgtaaatatagacgcgattatgaaaaaaaatcgcgtcgaaaacaaacgtcattatgtcattacacgtgttaccaatcaaaaagcctttatgtttaattagtaaaggctagtaagagatttacaacaaatgaaaaaaataaaaataaaaacataatccaagatccctaaaaattcccaaaaagaaccctagattttctcctctcacgctccttggttcctcactcgcttttgcttccccactcgcctgcttcgtgttcttctttgctttgctcttttcacgtcagaattttgccttccctccctttgtctctctctgggtggccgagaaaatacagtaaaaagccctcaccaatccaaaagtttgacatttcctgaattttgtagtctcttcatttgaattctcaggttttctcttaagatacattaaagtctctgtcttttatgctgatactaatgaaagttcagttctttcactgaaattttagaaccagaacttttctactactagaagtatgttgtctctgactctcttagtttgagttctcaggtctccttctcttatttgtgtgaaattttactcttttttggctttagaaacagaacttttctactattagaagttatgttgttgaaagttcttcactttcatttgattccattgatttcatattgctttgtgtgtttcaagtttgatgtttttaggtagaagatgtcgcgctggttcttatgaagtttggttgtgacatttttcaggtgctaaggtggattatctagtagaaagatttcagtttccaatttcatggaagcccatagtggggtagttgcttttgagtgtgttagtgaatccatatgtggctaaggttaggatggatttgcaagagaatctggttagtgatgcaggggatgaccatatggttgacattgtagttgaaccgcatagtaacagagatataggaattgttgatgagttcaatataggtggagatgttggatttagtggtgatctggatcttgagccacgaaatggtatagactttgatacccatgaggcagcgtatatcttttatcaggaatatgcaaaatctatgggtttttactacgtcgattaaaaacagtagacgttccaagaaaactaaagacttcattgatgctaagtttgcttgttccagatatggtgtgactcctgagtctgagagtagtggtagtagtagtcgaaggtcaactgtgaaaaaaacagattgcaaggctagtatgcatgtgaagagaagaccagatgggaaatggatcattcatgagtttgtaaaggatcacaatcacgaacttttacctgcccttgcttatcatttccggattcagaggaatgtcaagttagctgagaagaataatatcgacattctgcatgcggttagtgaacggaccaaaaaaatgtatgttgaaatgtcgagacaatctggcggatataagaatatcgggtctcttcttcagaccgatgtcagcagtcaggttgataagggtaggtatctagctttggaagaaggagattctcaagtactgcttgagtacttcaagcgtatcaagaaagaaaaccctaaattcttttatgctatagacctgaacgaggaccaacgtttaagaaatctgttttgggctgatgccaagagcagagatgactatttgagtttcaatgatgttgtatcctttgatactacttatgtcaagtttaacgataagttgccactagctttatttattggggtgaaccatcactcccaacctatgttactaggctgtgcattggttgctgatgagtctatggagacttttgtgtggctgataaaaacatggctacgagcaatgggtggtcgagctcctaaagttatactcactgaccaagataaattcttgatgtctgctgtttcagagctcctaccaaacactcgtcattgctttgcgttatggcatgttttagaaaagattcctgaatatttctcacatgtgatgaaacggcacgagaatttcttactgaaattcaacaaatgcattttcagatcttggacagatgatgagtttgatatgaggtggtggaaaatggtcagccagtttggacttgagaatgatgaatggctgctatggttgcatgaacatcgccaaaagtgggtgcccacatttatgagcgatgtgtttctggcaggcatgtcgacatctcaacgttcagaaagtgtgaactctttcttcgataagtacatccataagaaaatcacgctgaaagagttcttgaggcaatacggtgtgattctgcagaataggtacgaagaggaatctgttgcagatttcgatacttgccacaagcaacctgcattgaagtccccctcgccctgggagaagcaaatggcaacaacttacacccacacaatatttaagaaatttcaagtcgaggtcttgggggttgtcgcttgccatcctagaaaggaaaaagaagatgaaaatatggcgacgtttagagttcaagactgtgaaaaagacgatgactttcttgtaacgtggagcaaaactaagtcagaactttgctgcttctgtcgtatgtttgaatacaaagggtttctttgtcggcatgctttgatgattctgcagatgtgtggtttcgccagcatcccgcctcagtatatattgaaaaggtggacaaaagatgctaagagtggagtattagctggtgaaggagcagaccagatacagacccgagttcagcgctataacgatttgtgtagtcgagccactgaattgagtgaggaaggttgtgtgtcagaagaaaactacaacatcgcattgcgcacactagtcgagaccctgaaaaattgtgttgatatgaataatgctagaaacaacatcactgagtctaatagccagcttaataatggtactcacgaagaagaaaaccaggtaatggctggggtaaaagcaacaaaaaagaagactgtatataggaaaagaaaggtatgcttttactgaagcttctcgccaatctaaacctacgtacattttcttagcttcaaaggttaaaaagaagatactcaaattgatcttatgcagggacaacaagaggctagccaaatgcttgaatctcaacagagcttgcaaccaatggtttgtgctttgatttgatcttctctaattagtttgatcattgtaactgcacattgctttatgagattaagagtaggatgtcttggatatatggccttatagttttaacattttgtgcaggaaactataagttcagaggcgatggacatgaatggttactatggtcctcaacagaacgttcaaggactggtatgctatgttagttgattaatacaaacctggttaagccattcgacatctattataaaccctaatactaaacctgtttaaactgtggatatagttaaatttaatggagccacctcatgaaggctactatgtagatcaacgaaccatccaaggcctggtaggttacatatagtttaaatgcttgaatctcccaaatctgtgctagagtataagtcaacgacatgaattttggttcttttgactcttcagggacaactgaattcgatagcaccggcgcaggatagcttcttcacgaatcagcaagccatgtctgggatggtggtacattataaaatccttcaaactgattttaaaaactgtgttatgaatgatcgtgttgttaacatcttttgtttattgtccggtccagggtcaaatcgatttcagacctcctcccaatttcacttacactttacaggtctcagctgcctggataaagtctttactttagtatcattttgtactcgaaccacacgtgttgatatcgttaaatcttttcgttattccaggaagagcatttgagttctgcccaattacctggtagttcatcaaggcagctatagtagcaacacgttttgattactttggagagaagttttgtctcaggaaacatttgcaagaagctgttccaaacatgagaaaaacacaagatctttcatggagctgagttgcaatgacaagatgtaatcttttcttaaattggtttctgtatattatgggattgccttatgatgtattaatgtgggatgaaatattgtgttatctgattgaatgtcttgagatttaatagatgcacttgtaacaacatctttatctaaacacatagaaatctatcctctgtgtattagtcaaacaagtaattttgagatcacattaaatcaaaattgttaaaacaggtttcaacttatttagtagaaacaaaaagttatttttagattaaatgtggttaatttggttaaatacacattccctggtcgttgtcgtatgtaggtgtgtcccttttgacaaaacaaacaaacagaaaaggtttctttattcagacaacatcaaaactggggaagaaccaaaactaatagagttggtcaaaagaaacatttgcaaaaaaaaaaaaagagaggcaaagatctcgagagatttcaattttcaatggagaaagtgaatcaaaccttcttcttatctcatggatctccaactttgagcatagatgattccttggaagcgagacaattcttcaaatcatggactcaaaaagttcttcctcaaaaacccaaatcgattttagtcatctctgctcattgggacaccaaattcccatctgtcaacactgttcttcgcaataacacgatccacgatttctctggcttccctgatcctatgtacaaggtaaaaccaaaaaaaatataactttttgtctcaacagatttttagggctcttagatcgttgaaggatgcataaagttttgatttttaaatgtttaaatcatctctcttgggtttgatttgatatttttgtctgtagttgaaatatgaagcaccaggagcaattgaattagggaaaagggttaaagagttgttaatgaaagaaggaggaatgaaacgtgttgatgaagatacaaagagaggacttgatcatggagcttgggttcctcttatgttgatgtatccagaagctgatatacccatttgtcaactctctgttcaatcaaatcaaaatgggagttatcattacaacatgggtaaagcattggcttcattgaaagatgaaggtgttcttatcattggctctggaagtgctactcataacttgaggaagcttgactttaatatcactgatggctcacccgttccttgggccttggagtttgatcattggcttagagattctctacttcaaggaaggttagaaagttttaacctttttgctgcttggttatatgataagatcattgatttgtttcatgtgtttttttaggtatggagatgtgaatgagtgggaagagaaagctccgaatgcgaaaatggcgcatccgtggcccgagcatttgtatccgttacatgttgtgatgggtgcagcaggtggagatgcaaaggcagagcaaatccatacaagttggcaacttggtaccttgtcttattcttcttatagcttcacttcttctctttgaaacatttcaatcttcatctcctatacttgtctttgattaagcttttgtgtgtgtgtgttcatgtctctttaattaataatccaaatcctgtcttgtatacgaatacaaatcctctatgtactataatatatgaatgtcatgtgaatttcaataaattgtgttgtttgtaatgtacgtagaaccatttgtcatatctctgtgttagctttgtgatatctacgtttttaacataaacccttaaatcatcaacctccatggccgaacaaatcatatttccatcagatgttttgaatactatcttgtatcgacaccatcgttggcatttgttgcaaataggtcgactgagacgattgttaggaatactcaaccgtatggacacagtcttcgataattgttcttgattttatgtagggatcctttcctagtatacatttaatatggaatgtgactccacactcatagcatgcatagtagccttttcttcggatctgttgttttctcacaaacttggcaccaataaagaccagtagaccacttgcatttttctcataacaaagggtgagaatatggtcatcatcgtcatgcttaactttgtaaggaagagtggcacaacgaaagcataaagaaaaatcacattccgcataacttaaacttctaatataacataattttgtttgacatattgaacacgcttgcgcagttactcgttcatagattaatgatataggaaactaggcattgatatatggttagatacgtggaatacatgagtggagacagtagctgtgagacgtggcaagagaagattggtcgatgggagtgttagaggaagaatcgagatgcagagatatatagctaatgaagatcatttgcagaagataagaagattttggatttgttgtttatagtttccttttggattctctctgagaatcgttcctcatcgttcgccggagtttcatgttgaactcttgtagatgagaagttgatatcgcgtttcatgaacgttgtatcaatctgtcattttcattaatcgaagcattctatttcgttactctgttttccgttatcactggtatcagagccaatcgtgtcctcggtggagatcaaagctacttgcacgatgaagagtcgtcggcgcatatcgtgggaagagataaacgagagctggttgaatggcttatgtgtgttttgcaaagagccagaagctcctgatcaccacctgaaacacaagaacttagggcttcttatgatctatggtaatgacgatcatctctctaatggtggaattggtgaatcaattgatcatcgttcaatgaatttggtacatgaggaacgagaggagcactccaagttggataatcacaaagatttagtacagagaactatcatggaggaacgagaggagcactccaattctgagattctgaaaagtgttgaacctagggaagtaaatttcgggttggaaaatcttgattctgtggtgatgaacgagtatcaggagcaagattgggttaaacagaacatgaataagaggtttgaggttgaagatgatgttgataggggtcagaaattgttgagtattacagaaaattgcagtgcacaccaagtgttcggtaaaacgtctcaacatgaagaaaagctggaaataaagaagaaagcgaaaggattcaaatcatggatgttcaaattcaaacttgctaagaaaacaataaggaaacgagacaataagggttggttccacacttggagcagaaaagtgggttggaggaagaacaagcctatgaaattgcagttagtttcacatcaggtgaaagaatcatcacatagggataaagactcttttgcgggaaaaaagtcaattaagcaagagatgtgtgttgaagtggagagcttgttgcagcaacaggatttaagacgcattaaagagacacaagcggatcagggagattcttatgttgttgtccggaaactgttgccgcatcttgaatcggtttgtgctacaaaatcgtttttggacaatgattcaatgtccgaacttgaagcggagttaactgactcaaagatgaggacggctggtgttacacaacatcaggtctcaatttttgtcatggaaactagccatcatcatcaagtgttagaggattttgatatgcatatggtcattgaggatcaacaacctatcgtgacagaagctttgcgtctaatctctaatgatttccactcggacgtggctgagttgtgtgagcagttaacatgtgacgagtctcataaaccgaagcaaagactagctccaaagtcttggatgtttaagtatagaagggaccataagatactacagagccctactatgtctaggaatgtgagaatggttgttttcagaaaaatggaagcagcagaaaggagtcaacatttggttacacacaggtttcatgtgggtccactagaaatggatactcaagactctgaaattggtatcatagaggttttaagaagagtgatgatgctgttccaaaacagtattgtacaagccaagatgatggtgacaaagagaaagaaaacgttttacaagtctaggagattcaagttcaaacatagagttgtaccaagagctttacaatatggttttgaagtcaaaatgaagcaaaaggtttctacagagtatccatgtttgttcttgatcggcaaggaggcagaacttgttcatattttgcttgggtatagggacatgatgtttaacttgaagaaaaaggggagatttagactctttcagtcattttctagacaacttctcttatggctgcgacatgatgcattgctaataaaaccgtttctgcttagtgatgagaggttccaaataaagcatacatggagaactaagttcatacactccgtttcatcaattggtgttgggcattatgaatattctatttggacacagagtgacaaagggacgcagctcttttacagcaggagattggttgtttacaagcttggaagtgaggccaagaatgttgtagaggtgtctcaacgtgtgtatcagcttgttaaactgaaatttgccaaagacgaacgaaagcttgaagtcatacagagccaaacctttgaccctgggattggaattgaatcacaagagctacttgagaatacctattcgaactgaaccttgtggtcaaggttcttccaacaggggagttttgatataggaaactaggcattgatatatggttagatacgtggaatacatgagtggagacagtagctgtgagacgtggcaagagaagattggtcgatgggagtgttagaggaagaatcgagatgcagagatatatagctaatgaagatcatttgcagaagataagaagattttggatttgttgtttatagtttccttttggattctctctgagaatcgttcctcatcgttcgccggagttttatgttgaactcttgtagatgagaagttgatatcgcgtttcatgaacgttgtatcaatctgtcattttcattaatcgaagcattctatttcgttactctgttttccgttatcaattaagaacaaatgatgtcgatgagatggaggtatatcatgaaagtagacgtgtatcaactatccatgatcgcaaaattaacatacagtaaatatatcataccaaccaaaagtgttttattttggaggtcatgtatatacatgatcacatgatggatctaattaccggttatcaagattatttattagacggttagtttcttgattattcttatcctttttttgtatgaaattgatgattcttatattacaataataaaacaatatgtaagtgggtgggttcaagaatacgaaggtctaacatttgctacatttagaggagctggacatgcagtgcataacttcaaaccaagcagctcgtgcgcagtagagacgtaaaaaaaaagaattaaaaatatgatttggtaaattaatattaattaagtctctaagttttcagaaagttttgtagtttgggtttggttacgttaacttgtcagaaggattgtataagtctataagagaagatgtatgttaatatgtcactttctatgttatgatcataatggtcgtggaagtttcaacacttgaagattataaatcgccaaaaagacttttgaaatactacaaattgaagattataacgtgaaaaccatcatcttcaataaacatcatgtccaataaacaacatgattatactcgcagatacttgtttcttagagcagtaaatactcgtataaaccaaaatttaatctcccaactaatctcaatgtttccgcctttccggtaacttaaatgagatcggaaaatatgtaattatactaacaacacgtctcaagttcgggactttgtggtctagtgataaagagatgggtttgaggcatcaacacttctcaagttgtgtgaaactccaacacattgtttctggataaccatatggatctgaagccttgcttacggccatttgaatatctgaaaagagggtatatccatagtgttctactgttctctatagacgtaggacttaccttgagttatccaaaaaaaaactatagtaacaacacaaaaattacctaaaataaaccttattttatcattatgatttaatgtaaaatcagaatcaaattactttcggcatcagagaccagctttttatcacccactgaattttacgaatcaagacttatatggtagactattaaacacaaatatatccaatgagagcatagaagatccgaaaatcatgacttccctctcactcatcaaacaaagttggagtctatgtcataacccataatcagttttcttttttcttttttttttcgaacatcttctaaacatgttttcaaattattgccgagactaacagctgtcaagggaactacgcaagagtaaaatgtgtgcatatttacgattagtcaaatgaactaaagcgtaggcattaagtgaaatatatatattttagttttgaccaacgtggttttaaatcactcagttatttaattattccatgcgttagtggtatatcaattcgttgtttggtaaagttcctacacactcactactcagttgaatagttaccaaaaaaaaactacaattcacaatctatacatagaatttatatggtcagtatgtattaactcaaaagtgggaaaacatgtcttctttttaattatctcttatgtgcataatttttctttgttttcctctcgtactttctgctttcgatcatttcagaaaaattatacaagctccgctattttactaaaaagtattaaatttataccgtacttgttacgttttaaattttgttaaaacgaacacaaatgtttggagacatgtatatgtgattttaaatggaaaacatcaagttatattatatagaaagtaaaatatcgttttttatttctgatttatcaatataatcatatagaaaaattagaatgtactactatcaaaattatggaaacctactgcatatggagttagagtttactttacaaggaatttaaaattaatattaataaaaaattttaacaattttaagtttcggtttattataaattgagtacagttactcattttgatactcctgcaaataattttgaaaaccctattatgataagtcgatcaatccgcctaatttcttacggattaaagcaatctacagaaaaataaaacaacattactactctaattgcatatgattgctagagagcgcataaggctaagtcgtaaagagaaacaccgattccgaatccacgaaactcaaaatattttgtggaattgtcacataaccaaaaatctggaatcctcatcctacttgccacgaacatatctatccgagacttgtccacaaaaccacgagagagaagccgaaaactaacacaaaaatgcataggcaaccgtggacttcttcactagctcatcgagatagcaatgccactagctaatttcttacgttgtatcttatttgttttactttggggcatgacatggttaaaccccatcaaagagaaagtgtttcatccactagtcaatatacgaattcattcgaatttatccctgtaaatcctagttcttaggatgaactggtgtaataaacagcaaaaaaaaaaaaaaaaaaaaaaatctggaatcattcgaccacctcaataaactaaagctaccaattaccacaatatagtcttccatatccacttagatataaaagataaaagtaaacaaatattaaatttcatatgcacgcataggaaactcatgatcttatcttttaaatagacatctagttttcttaggttataaatagacattttgtcctagaacttcttcactactaaaacctagcctcaaatggataatcacactaagagcttctctagtctattaatttctttgtggtttactgctcttttaatattagtagaaatggtttcatgtgcgagacaacatcgtagaagtttcttggccaaggaggcagatctggtgacaaatttgcccggacagcctgatgtgagtttcaaacattacgccggttatgttcctgtcgataaatccaacggaagagctttgttttattggttctttgaagccatggatctccccaaagagaaacctctagttctctggcttaatggaggtagctgaaaatcattacaaaataaatatcgtattctttgaattttgtaatgttaacatgtgaaaatatagtagactcataacgcggttacatggttatttatctatttatttttggtaaaacaattatggctaaggttgtcttacgtatttttcttttgtttagttgtctgattggtgaatatattcagactttgggttatatacatgtaggtccagggtgttcttctgtgggatatggagcaacacaagagattggtccgtttctcgcggacaccaacgaaaaaggacttatatttaatccatacgcatggaataaaggtaatcttgttttgtagtataaactagaatatacttttctttatgatcatgatttacaataacttaatcataaatcatttgcttgtgcagaggttaacatgttgtttttagaatctcccgtcggcgttggtttttcgtattcaaacacaagtagcgattatctaaatcttgacgatcactttgcaagtaggtctattattcaatttgatgaagattcacttttatagttttctcacatattaaaaaatatttatattgttttgtttataattattttttttgcctaaatatacgctttttcacagtaaatacagattactgtactaattaaatttattaaaatatcctccatcaatattttattaatattcaactgaaaaatacatttaaaaaaaagtatttaaaacaaatcagtgagaaagcccaaaaaaactcaatattcatataacagagtgagagtaatagattgattcgtatacaataaactcttacatatcgcttttttaaataaattttctagttacgctgctgcaggctactacgagaaacaaaaacaggtctaatagattagttgactctaggttttggctcggatgtttaacatggtgtgttttatacccaacgagcaactacaccgcatcattagtcggatagtttagattcggatcactcaagttaattataaaataaagtgtatagatttttatcgtacatacatactttagtttagtaaacaaccaaacataactgtacgttacaacattctgtttcctctctttttctgccatcagaaaaagacgcgtacacgtttctttgcaactggttcgagaaattcccagagcacaaaggaaatgagttctacattgcaggcgaaagttacgcaggttaaataaaaatcatcttgtgttttttttaactaatatgtctaattcggttttataaaaaattttaactaatatgtcatcttctgttaaatcatcttgtgtttagtttttatattgtctaattcggttttataatttttttgggcaacgtgtgtgtgcaggaatatacgtacccgagttagcagaacttgtgtacgataacaatgaaaagaacaatgatttgtcgcttcacatcaatcttaagggttttttggtaagtttgaatctctcgatactagctaactgtaaataaaccaagtagttgtgtacgataacaataaaaacaaacatgttaattatactcgatataaccatatattcaaatcaaatcagtcccatttttttttttcttttggctatctagttggggaatcctgatatatcaaatccagatgattggagaggctgggtggattatgcatggagccatgcagtgatatcggacgagacacatagaaacataaacaggttgtgcaattttagcagcgacgatgtttggaacaacgacaagtgcaatgaagccatagcagaagttgacaagcagtacaacgagatcgatatctatagcctctatacctcagcttgtaaaggagattctgcaaaatcgtcttacttcgcatcagcacaattcaaaacaaattatcacattagctctaagagggtatgtgtacgatataaaacattatatatattcttcctagtttcatcttttacatttccacacatatacaaaacatattgaaactttgttacatcaaacaagttcactattgatatttctaataaggattctttataaaaaaaaaaaaaaaaaaattgaagtcaaaataaataatttgcgtcaaagtttactttgcaatccaaattaatacttattttgaaacaaaaaaaaatgctagaaaaacatttaaattataaaaataagaaaagtaaggagtatattatatatatatatatatagatagatccttaaaattctcttaaaagctatataccaagtgtctttgaaacttaacaaaattatattgttctcatgcttcagatgcctccaaggcgcttggctggatatgacccatgcttagacgattacgtgaaagtatattacaacagagcagatgttcaaaaagctcttcatgcaagtgatggagttaatctcaagaactggagcatttgcaagtatgtgtgttaataagttaattgtttctcttcttttgtatgatatatgcatgatggaacttgtctgaatagtttttggtattcttgtagcatggagatctttcataattggacttatgtagtgcaatcggttttgcctatataccagaaactcatcgcgggaggattaaggatatgggtttacaggtaaattacattcatgaaaaccaaatcaaaatttaatggagaagaataaaacatattggcagtcaagcttaaatgattaataaaaatttgtgttccttcctacgcaagtaacaaattgggagacaaacaaatctcccacatcagaaactcagcaaaataatagtctaatatataagtcaaattcaactccacttagtatggcctttttgggaaggagtagggttgaccactttcccaaaacagacaatatcacaatatcatactaattgggagttaacttggtcgtggagagctcaacgtaaccatacagtttaaagcttttgtactttggttggttacatataatatactgaagaaagttttgttattcatataacggccatcccactaaaccgttggtttgtggtttcgatggcacagcggtgatacagacggatgtattcctgtactcggaactcggtatagcttaaatgcactcggattacccatcaaaacagcttggaggccatggtaccatgagaaacaggtcaatacatgattacatatggatctatttaacgggttattttagattcttatttgagtttgattagtcctatttgatgattcttatatttaaaacaacaggtaagtggatgggttcaagaatacgatggtctaacatttgctacttttagaggagctggacatacagtgcctagctttaaaccaagcagctctctcgcttttatctctgcgtttgtcaaaggtgttcctctgtcgtcatcgagggtagagactaattaaatcaagaattaagaagatgctttggtaatctaatatttgagtgtttaagttttcagaaagtttgtgagattgtgggttttgttacgttaaaaataaggatctcattgtaagagagatgatgtgtgttaactatgttttctcttttcttttctaaaaagtgtgttactatgtcactttctagtaatgatccaacataaccttaaagctgtttggttctatcttccaccagatctgatctatgtttcaccaacagatccaatctctgtattagcttttttgcattttcaaaatctcaagaatgtacgtttagtgaatcataagcatatcatctctcatttacactcagcttccttcaagttaaaattgagtctttttgcctatccataaatttcactttgatcttctctttagtttgcaccacatcccatttttggcatgaatcgttgcgccgctcacgagttcaacagattctggcgttccacgcagctccacatcgaatttctgaaacaacatagctagtgcgacggtcgattccattagtgcaaactggtctccaatgcattttcttggtcctccaccaaatggtaagaatgcaaagtctgctattatctgttgtcatcataaataccaaacagaggcaacttttgttacaagaggaaagattattcatttcttctttgagaaaatgatcacatgctaaggaaaatatttgcaagctttggaaatttcacctcattcggatatagtgccccggggctacgagatggatcaaagccagcccatccttcaattccattgctctcctttgttcttaaaaacctctcaggctcaaaatcgtggggattatcccaaaagtatggagatctatggagattatacacctgaaagcaagcagatacacaatagggtagtcaaagaaaagcgggtcctgatgaggagaagcataaacaaatacaaaaactaccacttacagaaatgaagatatcagtcccttttggaactttatgaccttctttttcccctttgtgtcctcctgttgatacaagcagtagaaagacataggaaaatagacatatatgagctctggactaagtcattctctagttctagtggagatatgatctgttaatgaaagcagatttgtatacgtagtacttagcaagtgcttttgagacataccgggtaatgtttctggtttgagagtgcgtctgatgagcaaaggtggctgaggaaagagacgaaggacttctacaacgatcagtcgtatgtacctacagaagcatgaaacaaagcggtcaacgaattaaatagagaccaaaagaagagatgaaagaagatatctttcgagtaacgtactcgagctttttcattgattcataagtgggtggaccttgaccaagcacagcatcaatctcagcttgagctttcctaattttttcaggattctgcaaatttaaaagagaatcttaagactgtacaatgagcttttaagcagtcatggaaaaaatgttaaagactcttaagtgcatacttgtgacagaaggaaaacagcccaagtaagtactgctgctgttgtctcatgaccagcaattagcatagtcatcaagtcatccctcagctattgaaacaattgtgtgaaaactaatgaatcaaacacaaaagaggaaaataaaattgttaatcagaaagtgataaatcttacctgccggtcatcaatgtcaacaccgcgcatatcgactaagaaccgcaaaagacttgcatcctaagaatccaagagtaaacaatcagtagagtttcagaatgggaataaaaagggaaggatatttttttaacacttgtgcaacataaaccttgagattagtgtagtccctttcctggagcttctcaacatctgtttcctgggagaacaagtaacaaaatgagaagaggagagcggaaccaagaacaaaaaagaaagtgaactacctgtcttgtctctttagcattttgaatgaggccatcaaggcaatcgtttataatcttcagatcgctttggaactttcgttgcctcggaactatccatctagctggaggaaagttccaataagggaagtagaaagtagaccgatgctctgcctcgaaaagagttccataaactgcctgtgatgtaacagaaaatatcaatggaccagtgtacctcagacgactggtggagagccagttcaatagtagaatgattaccttgatcacaggggactcttttgtgacagagccaaaatcgtagttgaacacgctaagacctataatatcaagagccagactcgagaattctgcttccagatccaactcaatggtgtcctccccgcttgaagtttctttctcccttatgagtttctcagatttcaatatcattttctccgaacagtcactaaatactttgaccatggcctctagatacaatttatggaatgcgggagtgatagctacaacagagattaaaaagaaacaatcatcaatggccacggtactgcaatatctgaattctgaaagatagagattacaacgtgcttttacctcttcttcttaacttccacgtatctagatcagccggtattaacccttttcccataatcggctctaagatctcagcaagaactccctagagaaacacaggaagttacttgatgataccaacgaaaacaaaagaaagggttatttcagttaccttgtcataagaaaaagcattttcccggaggacatgccttgcaataatgggatctgagatgacaacaaaggcttttggaccaaacgcaagtttataaattcctccatgctttagataaaaacatcacagaatcaaacaaagataaacttcttcaagtaaagcactgaaataagttgtaatagtatacctccaagaaccagtcgtaaagagataaaaagagaggctttccaaacaaatcagagacagagccttcagcagtaggcattgaccccaaacttccaccacttaaaaaatttgtcaaaaggttgctcgcattgtccaatatgttaccattcgtctttggctccgtagattggcacctaaatatgtcccaccacaaaaatcaaactcaaagtttacttcaattataccatcaccaaagctctaactttatcttatctggttctgaatttcacaatccacattaaaaagctttcgaatttaactaattccacagacatctatagatacgtctagattcagtaaacagtaaacaaaaggccccaactttcatcaaacccagaacctaatcgtaagggtataatcaaaagaagagaaacccacttgatggaaacagaagctctccgagaattcacagaggaaatggtttgagggtagaaaccgaagaggcaatgatcggtcctacccagatgaagagcgccgccttggaaatgggtgggataagtagcagcggcaggaaaagccatggctgctaccatcttcaaatgaaaagagaagctctaaagttagatgaaggagaagaagattgaagaacattcttatctttttgcttgaaaatggccacttcaagcaccaagcataacgacgacacagatgcacttggaccaaagatttttttaattgtgacacgtgtcatacacgttcgcggtttttaaaaaacaaattggcttatttagttgctaagtaaattaaattagtgtcaaaagtttaagaaaatgagaagatgaggtggatagttgcaaagttacgaatgtagaacgggtaaaatgtcaaaaaaaagcacgaacttttaaatttgggatgaaaaaaatatgaatttctaaaacgcaattaaaatcgtaaagtcttttttgacttttgataaaatggtcaagtttcgttgagtttgccatttcgagcatgtcgttaaatttccgttaacaagaaaatcacagggttaactttccgttagcattttctgttataaacgaaatgacgtcgtttataaaaaaaaaaaaacgagcccatggtgattcgaaccattgaacttctgtcttccttacaacaactaaaccacagagccacgataatattttaacaaaatgacaaaccaaaatatatataacatataaatacacaattaattaaaaataaccaaactaaaatatattaacaactaatattgtacaaatatttaatacaccaaaaatatttattccatgtatataaagatttcttgtatattaatgcattgaatttaagttagtctttcttaaatgatataaaaatgaaatttatgaaatatagaaaattaaatatattgcctatgtgcataagtttttaaaatactttccattctatgtgcatgtataaattaatcctatatttatttgagattgattgtgtaaattttaggtaattttctaattcaataagttttagttttttatataagataaaatgaagaaataataaattttcagatgaaaattcggtgcatttagaagaaattgctatatgtaaagttaagtatatgatattcgaaacgtatatttatggtatgtatatttaatatttgtgcatgtttggttattttgttatttttagtttatatgctatatagatatgtttgcactattattgaaatgagattgtggcctaatggttgagtacatgataggaaaataataggtcatgggttcaaagccttgccgggctcccaattgttattttatttttatcaaaacgacgttgtttgcttttaacagaaaatgctaacggaaaattaattccgtgatttttttgttgacgaaaacttaacgacatgcctaaaatggcatagtcaaggaaactttgctattttattgaaagtcaaacaaaactttacgattttaataatattttataagttcatggtttcttatcccaaatttgaaagttcatgtttttttttatatttttcccaaaacaaaaaagttagataaaaaaatcgcattcttgaattactaatttactactgcatgtgagaattgagaaatgcaaatcgacaacatcatccaaacattaggcgacgcatcaacgacaatcttttttagatccacgtgtccctaaaatgtaaaaacaaaccaaaaccaacggctgtgatttgttagatggtcttactttgaccaaatccaaccaattgacaagttttaaaatgctattaaaaaccaaaagatgagagaaagtccataaatactaaacaagggctcctctttgatctctcccataataataagaagaagatggccaactctaacaacgactggtctcaattctacaacaaccaaaccttcttcaccaccgcaacctccaccgtcacaaccaccaccaccaccgccacgtcagctgattctcctctgagtccggataatcgccgtgttgcaaagccaacacgtcggagatctagagcctcacgtcgtacacctactacacttttcaacaccgacacagccaacttcagagccatggtgcaacaattcaccggcggtccatccgccgttgcgttcgggtcttcgccgtcgtctggttttagtctcacctcgtctgatcccactgccggagtatcttcctctccttggcaatacgctaatttgcagaaccaaatggctcataacgagctaatgcaacaacagcgaccgtacatgttttcgtcgtcaaacaacgtgagcactcttagctatcctaacgcagtggctaccgatggttttgtgggggcggaggagagtagagagggtggtggaggaggaggaggaggttatgctccgtcgtcggagaggaatagcaatactacctattccgaggaaaaaacggtatattattcttagaaatgttctttttctagttttttacctattccgaggaaaaaaaacataaaggaagaaatgttaggtatactgactttgtttgtagcagaatgaaaactttgactattgtaattttctttagttgtttattgtttttcatattttgaggacttgtggacggataaattaaataaacttaatagaattatacgattcaattagagataaaatgcggtatggttttaataacgcactacataatgcgattttgtcttcattcagaactttaaatagcatttaccaatttgagatatcgtcatttcgagtttaagaactcatttagaaagggaaacaaaaaatttaagcggctttggaaacaaatatactcaaacgtgatcacatgatatggataaatatgttcataactattcgactacaaaattatgcattttggtgttcatagtttagtattcgaacaacttgttcaaactatcctacataaattcgattataagatcccgtagtcgtattttatatgtatgaatattcgttatggtaatagttcgagtatcatatacttgtacatggaaaggtctaaatgaattttcttttccttttccttccatgtgatgatcaactttagaaaaatcttagttggcttttcaatttaaagaagaattttctctacagaaagagaagtgaagaataaatattttacgtcgccgttgcttttcgttcagaaactaggggaaatgagtcggtgaaggtaggctaccaacatgtgaagaatctcacatgatgcgtttctcttttcttctcctttttcacaaaatgaaaaagtcgtttatatcgcataaaaaacgagtaacaaaaaaagggttagagacgggatgaattaatggcccatatttaacttaatactttttctgaagaaatgaattccgttaatgtgaaaattgtttgcttgcttactaattacttttgtgcttccataccttttttttgttgcatatggttttaaatggtggcaatctggagatcttccgagcttagttatatgtatgatgggtaccattcggatatgttaataatttggttttttgctttcctttagtcggttttgaaagaacccgaactgaattagaactttgaactgaaattcaaattggttcattctatcttggttttaattttcgaacatgttaacattttccttctcgtatgttagtttcagtttttgatcctttttctgacaaaccgactctctgctgtcggattccgacctagcaacacgaccatctcaaatctaacacttttccttcgagatccgacgatcctcatatactttgagcaaagaccacctaagtccggttccgtggaagctaaatcatagcagtctcagaggctgattgttcaatcaaactaccataaactagaatccacgaccgccttctaagaaatctagggattgtccctgtatataaacagttagacagtacatataaccaaaaacgttgttgaagcataaacgaatatctcttaaagtatagtaataaaggcagtccaaactcaatatacatagtccgggttagaacgtcatatatgatatgacatcatggaatgacagataaggtgcaaaactatcggaggctctctatttgaagtgaaacattgtgctctttttatattctattcaaaagttatatataataccaacagctaaacaaccatgaacaatatcagtttagtgagttttatatagttaaaaacttagaaaactctaactgatgtaaaaccaacgacaagatcaacaatttttacctttatttcaaaaaatggtttaaagaaaatctataaaatgttaggctctaattcatgactcatattgtttatgtcattacttattaatctataaaagtttgagagtatggatgacacaatttgacccacaacatatacaacaaccacctgtaggtgtgtgtacatgtacccgggccaacatgttcccatgcgatcgaagagcactagtatcctattcggctcaaatattctttatacgtgacttctttcaaatcattcttatttttgattaatacgtttacgaaaaccattaatatatcaatatatggctgaccaaaataaaaaactatatattaaaaagaaataccaactaatatcagtgttcaaagatggccgacctatgctctcaccatctctcaattactatattttacaaaattgtcgtctatcacttttttggctttaaatgtgaatgtgagataacaatttattttaggttgcaaaaattgaaaagtcttatcggaaagaaaaaaaaaatccaatttagaaaaccgcgcgttggagggaaagccatagaaaactaaaagataacaaacattttaacaaacccaaacccaaaaattctcaaggaggccgaagaagaagaagaagaa

SEQ ID NO: 583 - DNA, 200252 bp, Arabidopsis thaliana
aaatgttctttttctagttttttacctattccgaggaaaaaaaacataaaggaagaaatgttaggtatactgactttgtttgtagcagaatgaaaactttgactattgtaattttctttagttgtttattgtttttcatattttgaggacttgtggacggataaattaaataaacttaatagaattatacgattcaattagagataaaatgcggtatggttttaataacgcactacataatgcgattttgtcttcattcagaactttaaatagcatttaccaatttgagatatcgtcatttcgagtttaagaactcatttagaaagggaaacaaaaaatttaagcggctttggaaacaaatatactcaaacgtgatcacatgatatggataaatatgttcataactattcgactacaaaattatgcattttggtgttcatagtttagtattcgaacaacttgttcaaactatcctacataaattcgattataagatcccgtagtcgtattttatatgtatgaatattcgttatggtaatagttcgagtatcatatacttgtacatggaaaggtctaaatgaattttcttttccttttccttccatgtgatgatcaactttagaaaaatcttagttggcttttcaatttaaagaagaattttctctacagaaagagaagtgaagaataaatattttacgtcgccgttgcttttcgttcagaaactaggggaaatgagtcggtgaaggtaggctaccaacatgtgaagaatctcacatgatgcgtttctcttttcttctcctttttcacaaaatgaaaaagtcgtttatatcgcataaaaaacgagtaacaaaaaaagggttagagacgggatgaattaatggcccatatttaacttaatactttttctgaagaaatgaattccgttaatgtgaaaattgtttgcttgcttactaattacttttgtgcttccataccttttttttgttgcatatggttttaaatggtggcaatctggagatcttccgagcttagttatatgtatgatgggtaccattcggatatgttaataatttggttttttgctttcctttagtcggttttgaaagaacccgaactgaattagaactttgaactgaaattcaaattggttcattctatcttggttttaattttcgaacatgttaacattttccttctcgtatgttagtttcagtttttgatcctttttctgacaaaccgactctctgctgtcggattccgacctagcaacacgaccatctcaaatctaacacttttccttcgagatccgacgatcctcatatactttgagcaaagaccacctaagtccggttccgtggaagctaaatcatagcagtctcagaggctgattgttcaatcaaactaccataaactagaatccacgaccgccttctaagaaatctagggattgtccctgtatataaacagttagacagtacatataaccaaaaacgttgttgaagcataaacgaatatctcttaaagtatagtaataaaggcagtccaaactcaatatacatagtccgggttagaacgtcatatatgatatgacatcatggaatgacagataaggtgcaaaactatcggaggctctctatttgaagtgaaacattgtgctctttttatattctattcaaaagttatatataataccaacagctaaacaaccatgaacaatatcagtttagtgagttttatatagttaaaaacttagaaaactctaactgatgtaaaaccaacgacaagatcaacaatttttacctttatttcaaaaaatggtttaaagaaaatctataaaatgttaggctctaattcatgactcatattgtttatgtcattacttattaatctataaaagtttgagagtatggatgacacaatttgacccacaacatatacaacaaccacctgtaggtgtgtgtacatgtacccgggccaacatgttcccatgcgatcgaagagcactagtatcctattcggctcaaatattctttatacgtgacttctttcaaatcattcttatttttgattaatacgtttacgaaaaccattaatatatcaatatatggctgaccaaaataaaaaactatatattaaaaagaaataccaactaatatcagtgttcaaagatggccgacctatgctctcaccatctctcaattactatattttacaaaattgtcgtctatcacttttttggctttaaatgtgaatgtgagataacaatttattttaggttgcaaaaattgaaaagtcttatcggaaagaaaaaaaaaatccaatttagaaaaccgcgcgttggagggaaagccatagaaaactaaaagataacaaacattttaacaaacccaaacccaaaaattctcaaggaggccgaagaagaagaagaagaaatgagcgttaatggtgagaacaaggtctcaggaggagatagttcatcttcagatcgacctgttagagtctacgccgatgggatcttcgatttgttccatttcggccacgctcgtgccatcgaacaagccaaaaaatcgtcagttaccaatttttgttttctttcgattattttgccagaattgagaaattagggttgtgaatttgtgatttgtgattccaattttgaaaaattaggttcccgaatacgtatctgcttgttggatgttgcaatgacgaaattacgaacaaattcaaggggaaaactgtgatgactgaatctgagcgatacgaatctcttcgacattgcaagtaatgtttcaattttctatggagctattgtagattctctggagtttttttgtttgttataatggtgtttttgttaataggtgggttgatgaagtgattccagatgcaccatgggttcttacaacagagtttcttgataagcataagatagattacgtagctcacgatgctcttccgtaagattcgtttttttgttgttgtgtatttttccattagagagaattagcaatttttaaaacaaggttaatgatttgtgtttgtgtttgtttcaatagctatgcggatactagtggagctggaaatgatgtttatgagtttgtaagtattaacatagagatgttctttcttcttcttatgctgtttcttaaagatttggagtttattttgtgcaggtaaagtcgattgggaagtttaaggagactaaacgaacagaggggatatcgacatctgatataatcatgagaatagtgaaagattataaccagtatgtgttgcgtaatcctggaccgaggtattcaagagaagaactctcgtgtcagctcgaggtacgctctccatttttctctgccttgatgtgggaatggtatattcaacgtgatacactaacttgtttactatacgaacaggagaagaggcttagagtgaatatgagattgaagaaactacaagagaaagttaaagaacaacaagaaaaggtgagaggcgatgaatctattcttatgcgttaatgatgcacggcttgtaaatagtaaatatacagaagaagtgcagtatgtttggctaagaatggagttagagtcagaatcgctcattgtgtaactttctgaatcctgaatctttttccctttgtgcagatacaaaccgtagcaaaaactgctgggatgcaccatgatgagtggcttgaaaatgctgatcgttgggtggctggatttcttgaaatgtttgaggaaggttgtcataaaatggtaagcagcattacaaaaaaaagatcatttgaaatctcaaacatgagtatagtagtgtctccgtcgctaattattgttttatttttctcagggaacagccatcagagatgggattcagcaacggctaatgaggcaagaatcggaagagaaccggcgattgcttcaaaatggactgacgatttccaaagacaatgacgatgaacaaatgtctgatgacaacgagtttgcagaagaaagactgcgtcaatgtgagcaacaaagggattgaaacagtaaagaaatgagagattttgggtcatggttgaagtatttccagatacagaaccaaaatctactagatttcaccagtaatggtattaggcttgtttattcaactgtacatcaaactctgtttcaaaatctctacttgtgtctaaaactcaaatgcatcagaaatcaaaagcagtcatggatatatctatgatcaaacactccaaatgattacatgatgaccataatagaaacagctcaacttcacaattcatcaaaggtctagtaattattgaatacaatgaaaagcaattgaagttgctataatcttagtatttgaagtcgagaagcttggcatcagcgaatgaatctctcttctttttcgatttcttgaaatgttttgaagctgcctttaacacaccattccatccctaaacaattaacaacatctattataaacattgaccaaaacaaaactgagaacattatctatgttatatgatataacataccttgggtagggagagggaaaacagccaattttaggggaagaatcatcattcttcattgaaggtatgtctagtttcagtaatttactcttcttcttgttcttcttcattgacatcatcttcatcttcttcttcttgcctacttgaaactcccttagcttaagattccgacaaacgcaactgtcggagtctagatctgaaggactggcgtaatttcgaggcaagagaggagaccaaagagagctctgtgagtagtcgaatccaaaagcagagttatctggaaatttgcagagaagctctcgacacattactggctgcaaatactcaactactttggttgtaatgagaggataattctccttttcctcttcttcttcttgtagctttctttgattcaccatttttgtttcagatctttttgtttttttgcttttttctgagtttcgtgtttctttttatattttgggtcaaaggatgatgatgaagaaagacgaccgttgggggcggatttagaacacgtgtcatgtaattattggattgtgaatctacttcatgtccgaaaagttaccgttggaagaagactttagattgccatcggggcaggattagattggacattgtacagtgccgcacggccgaatcttgacattttattactattcaagtcttaaccgttacactattcagattcaatctaaatggactaaggagtatggacgtttatttttaatcataacgagttaattaattgatttgaatcatttttttttttgtttttctcggtaattttaaatacagttttttgtctttgaaaaacagtatatatatatatatatatatatatatatatatatatatcaaaacgttttaattttaaaaatcacattaaattcaaaagatatcaaaaacatcacaaacttttagacaattttaaatgataagagaacctcaaaactttccttgtgtgtgtgtatcgtcgttattcagccattgcataccccacttggcagctagatggtgtctcaagtgcggagacccaaacacccgaaccattaaactacttttgaaccttgccatgtctccggcatttcattacaaaagttttatttaaaatcttagaatggtgagagtgaaatttgggagagtgaacaaggcgaattttacgtttacgacaacgaaaataataattatctacacaatcatgacaatgaattgcttaacatgcaccatactccatattgcggaaatttaacatttaaactacttataaaagtttacatactgctaaaatctttaaacctcacataaaaactacctaccaatgaccaaatgccctttcacaatcatcaattatcaataagaaacattataatatatcctagattttactttcaaaaagtgtataattatataatagtaaacgaaatttccagggagcttgaccaaaccactttacctttagaaaccgagtggcgagtgccacctactactcattacaacctcgtcaataatttaaatcaccaaatttggcacgttgatatacttaacaatatcattaaaaagtaaaacatcatatagatgatctataaaaatggaacgagacggatcatatgcaaaccataaaattaaactatctgccaaacacttaaaaaatcaactctagagatgggacttgagacaaaaccaaacctctcctttgtactcatcatcctactactcggcttctttgcagtctcttacgcttccgttcctcggaaactaaatccacatcaacgcatcggtttcttgaagccttcccgaaagtcttaaccttaagccctaccaaaagtcttccccttcaagccctcaccgaaagccttcctccccaagccgatcccggttactccaaaaccagtcccagttaagcgaccacgaccaccaactcctgagttcgatcctccacctgacgtagccccacctcctccccctcctcctccaggcttcttcaagcctcggcctccgccggatactccaacaccaatcaccgtcaagcctccaccagatactccaacgccggtcattgtcaagcccccaccaacacttccaacagtccactaacctctgtcgtagtaaaaggcttctcgtttacaaggctttcctagatcgatctctttgtgtgtgtacaataaaataaaattatatatgtctcgagatctaagtataataattgttcttaactttactttgcaagtatttaagtgtaatagtcttttgtacgttgaatagttgaccaaatatattttacttttaaagctacgtgagtgaaaatcgcttgttcaaaaacatcaaaccagcatcagctcgagttgcttgatctatacccaaatctttgagtgaaaatcgcttgttcaaaatgtcgctgaacttgtctggcatcattatcaatgatgagaaaatcaaccacatagaataaacagtgtcacatccttaagagaattcacatatccagcattgacaacaaagttccaaagctccaattaccacgcatgcacgcataaaagctttgcgccaatttgtagacgttagacgaatgagtggcaacacatagtcctcaacttgggtaatagaaattgaaacaggcttttagaattaagaactaatctacatatatgaagctcacggatcaagttttattcatccgagatataaaacaggcttttagaattcactacaattgaaataaagttacaaattttgaaacaatattattgattacatgcaagttacaagcttttacatgtcttctaatctctactcagttattgtttaattctcccaaggctcaagtgctttttattgatagactccagcttggtttattcttcaatcgtatcctcacttcacctgttttaaattctcagttgtcagttgtatgtttcttgcctagtgaactatactggtaaatactaaatagatgtagaatctataaaagtgtttagggcctttagagggtgctattataacatgggacctcgttgaagcccaaactgttattaggagaaaacccgaattgggtcgtcgcaactcgcaacgttgcgtatccgcatagctgtacaaaggcataaattggtgattggttgaattattagagtagtaattaactttaaatttacggctcaaagtataaaataatgttatcggactagacttaggctgattgatttaatattaaatatgtaccaaactgatgattacgtgaaaagacagtttttgcacatccacaccacatgttcatgcaatgtattagatccatatatatgattaacgaaaattctgagtctcttacggccataggaaatataggagatttaggggggaatgtataggttgtatttgttccgtttacatttacagtttgaataataactatatgccggtcgagttactaatctatgtaaagctcgacttgtgcctcacggaatatggtctcaagtcttcttttcagttcaaagatatatattccatatttggtattcatgaaagaaaaaaaagattgttttttattaaattctttaaagactatttttacatgttttaactaaatctgcaggcaaattagttcaaatattttgaaaaacaaaaaactgaaaatcaaagtaatgtagattccaaaattatcttccctctgtttcttttcattagtttcatagaggattttttttattctttttaaaagtgtcaaacttgtttttttattttctttgtttaatatttactacgtttattttaaaattgtggattttgttttagtgcttctaaatctttgtttagtcaagttttatgctcaatacaagatgatatgttgtgtgatatcgattcaaaatcatttttacacgtttttgttttatttaaagaaaaatcatattagaaaggtatcaaaattcaactttactttaagcccggataaacttgggcacgggtgcacgacactggtgggttgttcatgtctgtactcatttttactggcaaatatacgttcaacaaaatctgagaacaggtatggtttaaattacttcaatcaaaagggacagttctgtcttgaagagtattggagagttgacattgatttagaaatgaagataatcccacaatctggggatttctgtcatgataaagaaaacttataatctggcccgatgtttcagcacaaaatgatatataatggtgtggtcacatgcagagatccatgcatgtggattctgtttcatttttatatatctactcttaacaacgcatgtacgattcattcttacgagttacggtgacattatcccattctcttttttaaaataacaataacaaacaaattctcaatttagaggagacacactcacgggttacactattttgactactcgacaaatctcacccgcaatcttgtacacacctccattgacacatttcttatctaatactaattattaaaaacaaaaatctcttattagtatcttgtattgtatttatatcttaactctgcattaataggcttgagagaactaatttatccttcttagatatactttttcactatatttattcttaatttcttttgtatatacctgtttcaggttttgttataaacgacgactcagacaatgtcataaaaggtcaaatctatgccatacagtcatacagagacaagtataaagaaatttactagataatcatcaatcacggacttgctcaattagttttcgtggataactgaaatattaaaaggtgcgagggaataaaagagtctaaaaaaagcttttttttaaaagagtctaaaaacgaaaaacaaaaatgtttggacccaaaaaaaaaaatggaaaccaaatgtttttatcttaatcaatatataggtttcatataagatctacaagcagtatataaaaaaaaaaaaattgactcccttacaaaaactcgaggaactacgtactatcatctcctgcgaactagtattttaaggtcactccacagttatgtttctatatatttaagtttttttttttgtgaatggtatatttaattttgatcttaattttttttttttaatgatgtatgcatgattttatatgttccagtcttgctttgtgttttgagaacacaaaagagaatatactgggaccattagaaccatactataattagtttcaccgttaaattaatcatattggagtttcatttctttttcaaatcagtgacttgtgaaaaacgttttaccctggtggttaataaaagctactgtaggatatatgtcaaaacttcacaaaacgtatgatacgattaatgatagttgtcagtgtttacttcagtacttgtaaaaaagtcattgatcctgaaatggatggatctatgaatcagttttgtgaagtcaatttttgtttacaagtttaactatttcgtcgctgctaggatacatctgtaattaattcataattaaacactaaccattatcattattttgacattaattatacataaatcatattgtagttttttttttttttttaaacatactatagccttggacctagctatatagaattgattctcttttctctatttgtgcgtttgttctggacaatatctaggctacaatatcaataggtcgagacgaaagaacaatagattccaaattttttgcctaaaatccgcatgaacaagtgtacccaataatcaaaggagcagaaaagaggaaggatctctttatgtctttgtggttttctgaaaattgagatgtctaattcagtcaaatgataatgacaaattccttagttagttgtctcgccacttgccattgttgtttcagaaattgagaggtatcttttcagtcagataataatgacaaattccttcattatttgtcttgccattagcaatacataaaaaaaaaatcaatttgcatatagycccagtctcataacctttttgtttgtacgtggtaaatttacaacatttttaaactaagtacatacgtaccattattatcttgaacaattgaaatttacaacaaaaaaattccggaaagtttttactttttgttttctctttgataaaagaaaacctttttacttcttatgaaaaagtgacctgtatattaatgtacttcatagtatagtccaacttcaataatcttactcgcaatttggcacgttcatatatcatcacggatgatgctaataaggacattattatacaaataaaaataaatatcttagagattactgtggtctataaaaagaggaagacactcaagtacttcatcacttccttgtcacaaaccaaaccctaaaccatctttctcaacatggcgcttcttcacaagcaaaacatttcctttgtgatactcctcctcctcggtctccttgccgtctcttatgcttgtgattgtagtgaccctcctaaaccatcaccacaccctgttaaaccgccaaaacatcccgctaaaccacctaagccccctaccgttaaaccacctactcacaccccaaagcctcccactgtgaagcctccacctccatacattccatgccctcctccgccctatactccaaaacctccaaccgtgaagccaccaccacctccctacgtgaagccaccaccacctcccactgtgaagccaccaccacctccttacgtgaagccaccaccaccccctaccgtgaagccaccaccaccacccacgccgtatactccaccaccacccacgccgtatactcctccaccacccacggtgaagccaccaccaccaccggtcgttaccccaccaccgccaacaccaaccccagaggcgccatgtccgccaccaccaccaacaccatatcctcctccgcctaaaccggaaacttgtccaatcgacgcactgaaactaggcgcatgtgtggacgtgctaggcggtttgattcacatcggactagggaaaagctacgctaaggcaaagtgttgcccacttcttgacgacttagtgggtcttgacgcggcggtttgtctctgcaccaccattagagcgaagcttctcaacattgacctcattatcccaattgctctagaggttcttgtcgactgtggtaagactcctccacctcgtggcttcaagtgtcctactccgctaaaaaggactcctctcttgggttgatctcttttgtatttcatttgatacaacaaaaaagggtttgagacgttaagatctactagattcttatttatgttttgcgaaacaataattaaaagggtctaaatttagtaattgttctaaaaatataaagcaaattttatgtattgtatgatgattatgtacgttgaaataatgttatctgaaatttgatttttaaaggacaaacactacgcagtggtcattgctcaacgtgtactgtgtacatgtggtgtgtcatccttgacccatactaagtcagtcgaatagatatgtgtgtgtttcagtatatgtacgtattaaatttaattatagatacactagtttaaacaatgttcttatatataaactagatctataaaacaacaaaacatttggaaaaaagaaatgaaagagaagataacaactaaagattatggccctcccaagttttaatattccaagcgtacaatatcaaagagttgtgtcacttagaatgtggtgatatatcaatgatcaccatcaccgattttatacgtacccatacgctaccctaacgtaaaagtcgggaaacatttgtggtatataagacaatgttataagaatatgaattgtaactaatatttgtggtggtttagagatttttgttaccaataaatacatcagcctcgtacaattgatatgtcttatttgtatcttttatttatctaactattgtctaccgttctttttctgctattaattttattgttgtatcaatcaattttaatactgatatgtagttttaactgtttaagaagcaaagatatagtatatgcttactttttaaaatttattataaattattattttattatttttaaaaaatgaaatttctttttatattattttattttgcataataattaattaaataaattttgattaaaatactaaatgttatggtttcattaaaaacgaagttgtagtattgttgacaaataacaaacactctattaacattctatcgtactgtagaaaagtgaacatcatattaatgtagtatgaaaaaagtatatacaatatacatttggaacattaatcaataaaacttcaattgatagatatcagggtttaccagtccctaccctagacaaccttggacgagtccataatgtcttatgtgatgatatgtctcacttttaatagaagtgtgaaaggagttaatcacccccatttaatccgtctggtttagtttaattgtcatttttagtgtgttagtttcccaaatttttcgggttctaaattaataactctattccgccatgtaccatgattgaatgtttaccaggtcagttcacatagttaaggaaaatcagaaaaatggaacaccatttcttggtgcgatagtttttacaattttggcatgatcctgaggcctattgacatatatatattttggatacaactactttatatcttaacattgactacatagcattataaatacataaggtacacttattttactaagtttaaatgaccatataaaccaaaaatatatatatttatcagataaaaaattacacaaacaatttcataagaattatatttctggctatatacttggattaggaccaaaaaaaaaagagaggattagcgggtcatacatacgtatattccgaacggtgtaccctttgaaacgagaatatgggcttaacttattagggttggtatctaatgtattcggcccatatttgtgaactgtgaggcccaatctaaaaaaccagcaaaacgactttttttttctttccttttcctttacttttcttgtcaaagaagttcacaagtctcgttcctttaataatcaagcaccaagttctcagcgaaatcaaggaatcgaaaacccagaagaggactcagtgaacaaatttcttcaggttaaatttcctcactattctactgtgtttttgttctcagaatcctcgaaaatcgtaatatggtttttcgtatgctcctaaaatctgggcaattcattagatttcgttgcgtagataaacttaagcttgatgtattctttggtacaatgtaattctgtttagttctataacttggaatcactctaagtgtaatgtatattgatgcgaagtcaaatgttgctgaatttttgctctcctgcattttccccaattttttctgagccagtattgtgaaaaattggagtctgagaaaactgaaaagtttaatggattctcatttaatcagtgttcatagattcactagttgtttgaccagggcttaggcttaatcattcttgtgacacttggttttcttttaaatctgttttgatgttcagttttctttggaagctatatacccataaacttaaaatgaataaagatggaagctttagctgatataatttgggtgtttctttctttcttccttggtgtgaagctgtttcaaaatgtctcggaggtatgatagtcgcaccacgatcttctcaccggaaggtcgtctctaccaggttgaatatgctatggaagctattggcaatgctggttctgccattggaattcttggcaaaagacggagtggtgttggttggtgagaagaaagtcacttctaaacttcttcaaacctcttcatccatggagaaaatgtacaagatcgatgaccatgtggcttgtgcagttgctggtataatgtctgatgccaacattctgattaacactgctcgagttcaagctcagcgttacacctttatgtaccaagagccaatgcccgtttagcagctggttcagtctctttgtgacaccaagcaaggatacacccagtttggtggtctccgcccgtttggagtttcctttctttttgcaggctgggacaggaaccacgggtttcagctgtatatgagtgacccaagtggaaactatggtggatggcaagctgcagctgttggagcaaataatcaagcggctcagtctattcttaagcaagactataaggatgatgcaacgagggaagaagtggttcagctcgctatcaaggttttgagcaagacgatgacagcacgacttgacagctgaaaaactcgagcttgctgagttgtatctgactccttcaaaatgtgttaagtaccatgttcactcgcctgactcgctcactaagctcttggttaagcatggtgtgactcaaccagccgcagaaacttcctaagctagaaactggtgacagttttacctgacccgcctggttactgtagatgtccatttgctttctttccctttggagatatcgtatcagaatcaatttaccactctgattatgtcatgtgattcatttgggttgactatcttttatcttgagattgatcttcttctagtctaaagtaaagttagactttagaggttttattcaataaatgaatgagcaatcaccaacgggcccattagaaagcccataacattcattgattgaggtaacgggttttaatggctcaaattaacgaagaatcagaatctctttaagtttcaccacgtcgatttacggtcaagagtgtctgtttattaacagaacagtaaaaatgttaccgctcaaagcgtatatcttgagcgccaaatggaatttcattggtacaatgcccagaagttctgggccagaactggcctcattgtaagagattttttaggagatttatgcagatctggaaaaacaagtttttctctcttggattatctacaaaatattatttacttaagtagttgtcagttagacaatgccctgaatccaaggaattgtatcgaccgggattgaagagaccattcttgcatcgtctcttctttttgcagcatcgcgattgtatgaaacattgatggccagatctttcttctataagtcaatcaaccggccaccggaattaccctaaaaacatagaaaatatgttgaaatatattgagatattagtcatcgactatgactaagtgtcacaaacttttgtgtgataggattcaatcaatccaatggatcttagtaagaatattttacattctataccagtctagttcacatattttctaccacaaattgttaattcctcacaccttttaaattcattttctagtttgcagtttttttttaagtgtcactttaccagattacctcaaacttaaaaattatcaaattattatcaaaatatacaaatttactaattataaaacaagtatatatctaatatcttatcttaaaaggtaaatatataaatattttctaccttttgtcatgtaatacaatttttttcctatttattaggtatcagaatctcaattaattaaattcagaaaaagtgtgagaaaataatttccagtaagcaaaaaaaaaaagtattaacacgacggcttcttctttcagcaaaaaaaaaaaaacataaacggagaaagagagagagaacgatacagaagagaagccaaggtcgcagagagaaacaatacacacggcgacagatatatttcccggcgaaacgggaacaataatatatacagagagagagagagatttagtgagagagctttctagggttttcttcttctcgatttatcttcctttgacctcgatctattcctcttccttctccataaattttcccttcttctcaccttcattcatatctctcctagctccattctagggttcttgatccgtttctctaccttttcgttttcttcctccgggtataatttcttcttcaattcgtttgttttcgcgtctcttcgtctcttctaatttcatcaatttgggtcttgtagggttttgagattttctccttcgtcgggtgaagaaaaccctacattttgttttgtcactgattgtgttttcggtgtttcaggttgtttaatttactccggcgggtgaccaaattggcggtggcaaagtatgagtattgatttccctgggaaaggggagagttagggaagtttgggctagagagaaattggattgggtttccatgagcgatgggggtgtcgcatgcatgcctctactgaatatcatggaaaagcttccaattgtggagaagacgactctttgtggaggcaatgaaagcaagactgctgctactacggaaaatggtcacacatctatcgcaaccaaggttccggagtctcagccagctaataaaccttcagcgtcgtctcagccagttaagaagaagagaattgttaaggtaattcgtaaagtggttaagaggagaccaaagcagccgcagaaacaagctgatgagcagctgaaagaccagccaccttcccaggtagtgcaactccctgcagaatcacagttgcagattaaagagcaggataagaagagtgagtttaaaggaggaactagtggggttaaagaagtggaaaacggtggagattctgggtttaaggatgaagtggaagagggtgaattaggtacgttaaagcttcatgaggatttggagaacggtgaaatctctccagtaaagtcattgcagaagagtgagattgaaaagggcgagattgttggggagagttggaagaaagatgaacctaccaagggtgagttcagtcatctaaaatatcataaagggtatgtggagagaagggatttttcagcagataagaactggaaaggaggtaaagaagaaagagaattcagatcatggagagatcccagtgatgaaattgaaaagggggaattcatcccagacagatggcaaaaaatggatacaggaaaagatgatcatagttatatcagatctcgtaggaatggagtagacagagagaaaacgtggaaatatgaatatgaatatgaacgtaccccgccaggtggaaggtttgtgaatgaggatatctaccaccagagagagttcagaagtgggcttgacaggactacgaggatcagttctaaaattgttatagaggaaaatttacataagaatgaatacaacaattccagtaattttgtaaaggagtactcttctactgggaacagattgaagcgacatggagctgaaccagatagcattgagcgcaaacattcctatgctgattatggggattatgggagttctaaatgtagaaaactttcagatgattgttcccgctctcttcactcggaccactactcacagcattctgctgagagactgtacagagattcatatccatcaaaaaattcatctctggaaaagtatcctagaaagcatcaagacgcatctttccctgccaaggctttttcagacaaacatggacacagcccttcgcgatctgactggtccccacatgaccggtctaggtaccatgaaaacagggatagaagtccatatgctcgggagagatcaccatacatctttgagaagtcttcacatgctcgtaaaagatctcctcgtgaccgccgtcaccatgattatagaagaagtccaagttactctgagtggtcacctcatgatcgctctaggcctagtgatcgcagggactatattcctaactttatggaagatacccagagcgatcgtaacaggcgcaatgggcatagggaaataagcaggaaaagtggagttagggagaggagggattgtcagactggtacggagcttgagattaagcacaaatataaggaatctaatggaaaagagtcaacctcgtcaagcaaagaattgcaaggtaaaaacattttgtacaacaatagtctgctggttgagaaaaattccgtctgtgattcatccaagattccagttccgtgtgcaacgggaaaagagcctgtgcaagttggtgaagccccaacagaagagttgccatcaatggaggtagatatggacatttgtgacacaccacctcacgagcctatggcgtctgattcatccttggggaagtggttttatcttgattactatggcacagaacatgggcctgcaaggttatccgatctcaaagctcttatggagcaaggcattctgttctccgatcatatgataaagcattcagataataataggtgggtcactattgaaaatgcaacatctctgcggtcaacatgaattttccatcagtcgtgtcagatgcagtgacacagctcgtaaatcctcctgaagctcctggtaatttattagaagacattgcagatactactgaagcagtttgtattgagcaaggagctggagattccttgcctgaattagtgtccgtacggaccctaccagatggtaaagaaatttttgtagagaatcgtgaagatttccagattgatatgagggtcgaaaatctcttggatggtcgtactatcactcctggcagagaatttgaaacacttggaggtaaaagatgtacatatgtttgctttccggccacaaaattgatgcttttccagcccaaaatgatagaacatatcgagagcattttttttaaacatatttagctgattttatcccgacacttctatgccctaagataagcttattttcatcactttgcagaagctctgaaggttaatgttgagtttgaggagaccagaagatgtgtgacatctgaaggtatgtttcgttggcaccatttgcacttttgtagcatgacatgattttatctatctgtttctattcctttctggtagttttcgcccccaacaataccaaattctccccgaagcagaaagcagaaccaaacaaatgtttatatctacttgttatatatgtttgtatctatattagatcgtttctagtgtttgaagtcgtgcaaatctgggcatttggcacgaaagtatagggaagtgtttgatgtttgttaaagatgtaataacctacttgccatatgatggtttgtgcatgagcatgaagattcatttagacgacatcaactttgaatacttcatagcgtcttgcatagctgcattttttgcacaactgtatttagaagttctactctgggatttgcaggtatcacctggcgtcactatccagaggcgaaacaatgggatctgatggttgaggagttgttgggatgttccgccccatgaaaagggcgatcgaagaatttaagtcagacgatgcttatggttccgagagtgatgagataggcagctggttttcaggtcgttggtcttgcaaaggcggggattggataagacaagatgaagcttctcaagatagatattacaaaaagaaaattgttctgaatgatggtttcccgttatgcctgatgcagaaatctggtcatgaggatcctcggtggcatcacaaggatgacttgtattatcctctcagtagctctaggcttgaacttcctctgtgggctttttctgttgtagatgagagaaatcagacgaggggagtaaaagctagtttgctgtccgtagttaggctgaactctttggttgttaatgaccaagttccaccaattcctgatcctcgagcaaaagttcgtagtaaggagaggtgcccttcaaggcctgctcgtccatcccctgcatctagtgattccaagagggaatcagtagaaagtcattcccaatcaacagcttccactggtcaagattcacagggactttggaaaaccgacacatctgtaaacactcctagggatcgtctgtgtacagtcgatgatttgcaattgcatataggtgattggttctacacggatggggctggacaagaacaaggacctctgtcattttcggagctccagaaattggtggagaaaggtttcattaagagccacagcagtgtcttcaggaaatctgataaaatctgggtccctgttacttctatcacaaaatctcctgaaaccattgccatgcttcgggggaaaaccccagctctgccttcagcttgtcaaggccttgttgtctcagagactcaagatttcaagtattctgaaatggacacaagtctaaactcgttccatggtgtgcaccctcagtttcttggttatttccgtgggaaacttcatcaattggttatgaaaacattcaagagtcgggatttttctgctgccataaacgatgttgtagactcttggatccatgcaagacagcctaagaaagagagtgaaaagtacatgtaccaatcatcaggtatgcataactaccagaatttaaacgtgatcctgtccctcctattaactagtactttcttgttggctcagtttcctttaacttattggtttctgaacttgggtggttgtctccttcttttcttcagtccttctaggttaacctatgttcaatttgtgcatcttaatttttttttaacatttttcactcctcggttttgctttggttcataaacatcagaattgaattcttgctatacgaaaagagctcgcttgatggctggtgaaagtggagaagattctgaaatggaagatacccaaatgtttcagaaggatgagttgacatttgaggatttatgtggggacttaaccttcaatatcgaaggaaatagatctgctggcaccgtggggatttactggggtctgttggatggccatgcattagcacgggtgtttcatatgttgagatatgatgtaaaatcacttgcatttgcttccatgacttgtagacattggaaggccactattaattcatacaaagatatttcaagacaagttgacttatcttctttgggtcccagctgcacagattctaggctcaggagtattatggtgaatactctatgctttccgtttacataatttgaggtatattagtattttcattatttgacatgacattctcttgcagaacacttacaacaaggagaagatagactctataattctggttggttgtacaaacgtgactgccagcatgcttgaggaaattcttcgtttacatccccgtatatcttctgtagacatcacaggctgctcccagtttggagatttgacagtgaactataaaaacgtaagttggctcagatgccagaatactcgatcaggtgaattacattccaggataaggagtctgaaacagactacagatgttgctaagtctaagggtttagggggcgatacagatgattttggtaaccttaaggattactttgatcgagtagaaaagcgagactcagccaatcagttattccggagaagcttatacaaacgctcaaaattgtacgatgcaaggagatcatctgccatactatccagggatgctcgtatcaggcgatgggcaattaaaaagtcagaacatgggtataagcgagtggaggaattccttgcttcaagtcttcgaggcataatgaagcagaatacttttgacttctttgcattgaaggtgctttctggtacttgtgtctgctatcttttctttatcacctgttaaaaattgatcctaatgtattgttggtatcaggtttctcagatcgaggaaaaaatgaaaaatggttactacgttagtcatggtttgagatctgtcaaggaggatatcagccggatgtgcagggaagcaattaagtatgatttctttttcctctgtctgagtggcttcttttagtacatgattatgccaataacactcaaatagtttttcttgcaaattatggataagcaatatgctgaatgattgcggatgttctttctgggttattggttatcattaggaaactagtcaatattcgtttttttgccatgtgctctctcggtttcttgccctcagtttgttaggctgtaggattgcttatttctaattgttatgcctttgccgttgaatgattgctttcattgactcctagttgttaagtagaaggtaatcttttgtaaaaaaggtaaaatttaatttttcatttcctgtactactagttttgtaatttttcttctgactctcttatgtatccaggggggaggaatagaggggggctcgaaagacatgaaccgaatcattgcactatttattcaacttgccacacgtttggaagaggtctctatgattacttcttcatatgggagagatgaactaatgaaatcatggcaagatggctctgggctctcatcagccactaagtacaacaagaagttgagtaaaacagtagctgaaaagaagtacatgagcaggactagtgacacatttggtgtaaatggtgcttctgactatggagagtatgcatctgaccgagaaatcaaaaggcgtttgtctaaactgaatcgtaaatcgtttagttcggaaagtgacacatcttctgaactttctgacaatggcaagagtgacaactatagctcagcttcggcttcagaaagtgaatcggacatccgttcagaaggtcgatcacaagacttacgcatcgaaaaatacttcacagcagacgattcttttgattcggtgaccgaagagcgtgaatggggtgcacgcatgaccaaagctagtcttgtgccacctgttactaggaaatatgaagtgattgaaaagtatgcaattgttgcggatgaggaggaagtacaacgaaagatgcgggtttctttgccagaggactatggtgagaagcttaatgcacaaagaaatggcattgaagaattagatatggaactgcctgaagtcaaggagtataaaccaagaaagcttcttggcgatgaggttttagagcaagaggtttatggaatcgatccttacacccataacctcttacttgattcaatgcctggagaattggactggtcactgcaggataaacattcatttatagaagatgtagtcttacggaccctgaacaggcaagttcggctgttcactggatctggaagcacccctatggtattccctttaaggcctgtgattgaagagctcaaagagagtgctcgtgaagagtgtgatatacgaacaatgaagatgtgtcaaggcgtcttaaaggaaatagaaagtcgttctgatgataaatatgtttcttatcggaaggtatagctttcttattctttaacaggaatccatcagtatatttacgatttgtttgttaatctgctctgttactgcttttttgtccaagtagggccttggtgttgtgtgcaacaaagaaggtggttttggagaagaagattttgttgttgaatttcttggagaggtgggtctttagctttgcaattttatgtttgtcagttactcagctgcagcagaaacattttctgaagttcactaggcgcactatgcttaaatattgaacatttctcttaaaggaggctctgaacagagattctgacttgttttggatattttaggtttatcctgtttggaagtggtttgagaagcaagatgggatccgttccttacaggaaaacaaaactgatcctgcaccagagttctacaatatatatcttgagagaccaaaggtatggagaaaatatgatgtttgggcatgtatttaatatcttagaccattttcttactttttatgatgcacggcagggtgatgctgatggatatgatttagtcgttgttgatgccatgcacatggctaactacgcaagtcgaatttgtcactcttgccgacctaattgtgaagctaagtaagttaaattcttccccttcattcagaattttggactcagggagcagaaccaaaacagctgttttaattagttttatacatgatgcatgcataaactagcctgcctaagtacgctcagatcaattacacatattaaatgattatttagaaatatttctattgcttataattgtatcttctctgctcattcatacttggtaagtctcattcatttcttatgcatacatacattttcaaaaatgtggagtgaagaactctctgattcttttgctgttttcatatccgttaaattgtaaacaattcactcattttcccctttgttatctggtgcgtccagggttactgcggtggatggacactaccagattggcatctattcagtacgcgctattgaatatggcgaggagataactttcgattataattctgtaactgaggtctgttctttgctctcccttcttttatgcagttctaccgtaggaaagtattatttcgttgggtcagtctttatgtttccactccactgtctaaagaatgattcttgtgtatacgacagagtaaggaagaatatgaagcgtctgtttgcttgtgtggtagccaagtatgtcgaggcagctacttgaatctcactggtgaaggtgcatttcagaaggtactagtgctgttaacaaatatatgactatatttcttttgtcaaagatacatgagagtaatgatattgactctgtttaatggagtttaaatggctagaggtttgttgtatgcgcttgttcagtaataagctaaacagttccgttgccaaagtttaaaaaatcctttcttttgtcttgtgaatgtcgatttaattttctgaacgatatttgtaacaggtgttgaaggattggcatggtctgctggaacgacacagactgatgctggaagcttgtgtattgaattcagtttcagaagaagattatcttgagttgggaagagctggactgggaagttgtttgcttggtgggttgccagattggatgattgcttattctgctcgtctggttagtcttgaatcattttatgttagtttgtcacatcactaatgatgggattgcaacttctgaccgaatgattcttgtgcataaaggtccggttcatcaatttcgagagaacaaagctacccgaggaaattcttaagcacaatctagaagaaaagagaaaatacttttcagatatacaccttgatgttgagaaaagtgatgctgaggttcaggtgagactatgctcttcttaccgttatactggttctttcaatctctcataccttctgtgcctcagaactgggttttagcttggggtgtagtagaagggggttttcttttttttctccaactctaatatgcttattgtatctctaactttgatgtgacaggctgagggtgtctacaatcagaggcttcagaatttggctgttacacttgacaaggtgactacaatgtctcttcataaattcaaacataatattgctttgctttgccttcacactttttgtgcaattttaaaatgtttttcccaaacgaaggtagtctctgattagtgttatacacaggtgcgatatgttatgagacatgtgtttggggatccaaagaacgctcctcctccgctggagaggcttactcctgaagaaacagtgtcttttgtttggaacggggatggctctttagttgatgagcttcttcagagcctgtcaccgcaccttgaagaaggccctcttaatgaactcagatcaaagattcatggccatgatccatctggatctgctgatgttttaaaggaacttcagagatcgttactttggtgagtgcacctatcatattacttatgcttgaaacactcttatgaaacagtacactcatatcgaatactgtctccccatgaaggttgagagatgagatccgagatctcccatgtacatacaagtgtcggaatgatgctgcagctgatttaattcacatatatgcctataccaagtgctttttcaaagttcgggtaagtcgtttcgtatacttttgagtgacgaaagaatgaatcttgttgaacttcttctgacagatgggtcttgatatgttgcaggaataccagtcctttatctcttctcctgtacacattagtccgttagatttgggggctaagtatgctgacaagttaggtgagagtataaaggagtaccggaagacttatggcgagaactattgtctcgggcagctaatttactggtataaccagacaaatactgatccagatcttacattggtgaaagcaaccagaggttgcttgtctttacccgatgttgcttccttctatgcaaaggcccagaaaccatcgaagcatcgtgtatatggcccaaagacggtgaaaactatggtttcacagatggtaaatttctttctttaacgcacttctagattgtgtttcatctatcttttcactgtccatgacatgtttaatttatctgtacgtacagtctaagcaacctcaaagaccgtggccaaaggataaaatatggacgttcaaaagcaccccaagagtatttggaagcccgatgttcgatgccgtccttaataactcatcatcactagatagagaactgttgcagtggttaagaaatagacggcatgtcttccaagcgacatgggatagttaggtaaaaaatcttctttattatttagcaggttgcccttttgggaaagcgagaagtcggggcaacacacagttactataaatagtctcatatccatgaacaaagccattcactgcaaaggtcctcagctttcccctcattcttgtgtatagctctttgccatatatgtgattttggaacttggtaataactttgggttaggaccattgttattctggttagattaggcttacataattttcagagaggagaatcatttgactaggtttctcttctgtctttttttttttttttttaccttagtaataataataatagttaatgtgttcttgttcctaatctattaaagcttggtaccgagataagaagtgaaatagaataattcagtattttgattcaagcattttttttcaaacttggctccgaaaaccttctcctttgagccaatgatctcactcttacagcttagaagccttggccaacatggtggctctttcacagcttgaatcaaggttttggctctatacatatctatctctcttcacatctcgcaaaatccaacctatatacaacattgagtcgtgtccttgttttatttaagattcagaagacataaaagaaaaacttcttatcaaacactattttttccatcgaaatctaaaaatgcgtatcatcatctatcttttaattcacgaatagggaaatagttttacaaatatacgattatatagattttcaagtaaacagagtaatatcgaacatctttggtcttcaaattagctacaaactcactagtaacgttagtgaaatcaaaagactacgaaggtgaactatcctcttcatcgtctgaatcatccgaactatccattcttcgttcagcaatcgctggaaacaaacgttgtcggaagtccggagacggttgattactgtccgaagttgtcatttcgctttccttcttacctgaatggttcgtcgtctttgtagtttccttaacttctctgcaaactttctccaacattatcaagaaatcgcgcactatagcgaacaaacgtagtccttcgtttttcgcagacttcccatggaaataatcagcagagcttttcaccaaaaccatgattctctcttcttcttccttcaaccatttaaaatcagcatctgcacgttctataaatccagctaatgctcgttcgaaatcgctctcttcatccattgttttcaaaaactccctcgcattcgtaagtgaaccgcttatattcgccaatgttgcagccaaaccatcagcgtctatgatggctgctctcttgacatcttcaagctctgtcgttaaccccgtaaccacttgaagacccgtgctgcggtaacgtccacagattgtggactagaatccgcgtttgaatcatcggttttaacgcttgagaagcttcggctctgaaggcgaagagcacgaacgccttcagaacgaatgatctcaagaacaacaaaatgtaaaagtgtagttttgccatcagttcctttcacgtcagagagcttcaaaagagtatcgagcttgaaagcctgcgcatcaccgcggaaagttccaacattcattcgattccctgtcttgagaactgcctctagtagttttaaaaacagtctgctgtttctaagtttcttgcaagccacctgacataaacaaagacacagtgatattagaatagtgatggtagattcttgttttcaagtatgtttggtcagtgacttacctcgagagttccgagagcttctttgagtccagagacttcttcttgaagtgagatcataaatagaagtgactctatacgtttaaatgcaaaaggtatatcaacaagaattttcaagaaccgctccgcgggccaagtaagtgaagatctcccgagtatagtctaagtttgagttcttcttctgaagttggagccatcttcagcaatgtttgtagaagctccactgggagctcattaccttatgacacagagaagaaagaaactttaagtccttaaacaaaaatggtgaaagagatggtgaatttaccttctttgatggcatcaacgacttcctctgttgttacattcagagctcgaagaagaatagataagttttgagctttcctagtgtcaatgatctgtatatattgtagaggagattcgcgtaacgacgaatcagtactcttctgaccattcttgtttttgttcccatcgttgtaaccgaaaagcgactccatcgcctcttcgttgaacctgaaagcagaacgttaagttaaccaagtccggaaacaattttaaagaagtacaagattcaactccttactggaatgaaccggcgctaatctcatgccaaaccattttttgatcagggttagccattttatcccaaaagaaaggctttagttttgtttttggagctccagtctcagaatcaacatcagatgcatctccagaggaagtgtttccttgacgttttggagccgcacctttaggaggtgcaggtggaggacgagcaattttaggcggtggaggaggttgtggtttaggaggaggaggaggaggtggctgtggaggtggagcagcagcaggaggtggaggaggtgctgatcttcccgggggaagcttcaacggaggaagtccagctgccgatgacgattcagccgttgaaaactcatgaccatttctctttaaagatactctagaaagaaacgacctctttttcgaactagcaacactaaacattttccggctcgtgcttgcgacggtgggagagttctcagtagatcctgaaaacaatgagttacattgtccaatgagtttaccaaaacatgaatccttttaggcaaaatgctaagagaatcataccagttgataaacgtagaagtggtccttcatctctaggtccatctctagaaccaaccgcgttgttgcaattgcgtttgaagcaacacaagaacatcaatgcaacaaaaacaaacgttaagacagcggtagaagcaaccgcgatgataagtttcatcaagatatcatccttcttctcccgttgtggaggaggacgaggaggacccggaacactttgactaggagcaacaacactcggtgtctcctcacttgggctgggactcgattcatccggtgtctcagctggaggttcatttggagaacttgcaggtgctaaccaatcataactacgaggattcggtgcaggacctggcgcaaaacttggcccaggtcctggcgcgaaactcggtgcaggaccgaaagctaaatttggagcagagacactaaacttttttggataactgatcagcttccttctcggattttgatgaatccatgtttgctctgcctatcagaaaatgacatcaaaaccaaaagaagcaaaatgtgaggaaatacaagaatagcttcaaaacgtgttttcttgaagaacaagaaagagaacaacgagaatgaaattaccacatcttcgccataaacagagaatcgtaagagatttagaccgcctcgagagaaaatctcctcggaaacacaaacgaaaacaacgagagagatcgccaaaaacgctaatctcaatctccccatcaacttgcgtttctcatctcgcggaaacaccgaataaagcttccgttcgaatgatttttgtgggaacggcgaaatttgcagagcttgatcttcgccggagacaaaccgccatgcagaaaagctccgaacgcttttctacggcgccgaacaatcgcaaacacaaacggaatattggaaaaaatgtaatttggaagcaaaaaatttgaaaaacgaaagagaaagctctgtttcaggaaatgttttccttttttttttgaaagaaagctttttttagatgttgtgacttgtgagttaacagaaacgaagataatttgtacatgtctgttaaattggttaatctctttagttgtgttgtcctattgaaatttgtttataatgttttttgggataatttcattacgagtctacgaccaataaaaatattttataaaatgatttatttccaaacattttcttggatatttacaaatttcaagtacacttttagttgagttttgtttatttcaataaaaatggctcgacataataagtgagaaatttctggtttctgactaagaaatttatataaaaaacaaattaatatccaacttcaaattagccattaaaaatatataatcttaaattctttacaaccttaaaaagtaatatatatattctggcaatacagtgacaatgatgcattattttactggcaacagttatttatttttactacacatacttttttttattacgcagactaatattcaaccagaaatacacacttcacaaaatacatagcaaccccgtacgttttatttcttatggtacacccaaaacacacaacgaaactcagactcatttaagaaattttaacctcttaaagttgcaaatgcctcttcttattctctttatttattatcttcttattcttacttccttgattctttcccttactttctttgtgattagacgatcgatcatataaaatataactaaccgtcgaccttcaaatcggtttcagagtcccacttaaatgctccacttggctgagccgcgtcggcgatatcctccagcgtcagctgcgaattcgacgttttcaacggcacaatctcatgcccgtacttcgctgcgtctccacaataatccttattcgaaaaaaacatagaagtttttattacataacaaaagagcaaaagaaaacaaaatgtcatttggtttgatgtcttacttgatcagcgtgcattttcctcaccaacttcttaaacagctcaaagttgttttcttgaaagacagtatcggataaccgaaggtaagtaaatccgtacattctaagcttcggcttaccgtttgggttaaccccgttaggcctcgcgttaagaagaatctgattgtaacctttggctccataggtctctaatgcgttctcacccgcaacttctataccttctttccatgccttgctcagtacctatatcaaatgaatgactattgagtaaccttacaaatctcttctcttcggtgcagttcgtttaaattacctcttgaacaagttcttgaggagcacttagggcttcagctgtattgtcggtatctttcatctcaaggcaagtgaagttgagaatgccgtagtgttttgagagcatccgggcgatcggacggtaaccatctctcttgaaaaggttgtaatatccagcagtcaactccgcagcgtggctgtggtggttgtacaaccagtgaatcccagaaacctaccacattcacatactcaatttagactcatctacacaagttaccttgcgagacaagttaacttcaactattgttctagatatcccgtattcagtttagtcttctagtgttatgaagaaaatcagttcactctttagctcaagcatttcgtttgttaggtttcgttttcttttaataattaggtttttttttcctaccctatatgtttatagtaataccttggcagccaagttaactttaagtccagcaaagatcttgttggcttctcctaagatctgatctccatgaaaaattagtttgttcgagtaccatgtcatgaaaaacttccccttctccgagacataagtcccatccttcttgaaaaatccagtctcctccggcttgtcattgtattctccggcgtcctctggcaagtcccactcagggtgccctgctttcgccgccgcttccttgaaatctttcttcaagtacttgtcataacactaaaatcaccaaaacgcaccgtttagtgagggacaaaaatcataaaaacaaaagaagtgtaactaaatttacaaaactaacctggaattctccgatgccgggaaacacccaaccttggctttgggggtaagaaggataacgtagttcaccggccgggccaagtccgacttcgatgtcaacaatcaccccagcttctatcaaatccgccatgttttctttgaagctactcatgtaatcactgtacaactaatggaaaaaacaaaagtagtaatttgtttatttcaactctttttttttttggtcaaaaacatgcaatatgtgtacttttcttgaagtttactacctgaacagcggttcttccggcaaataggggaagattatcaacaccgattgagagatactcgatgtctctagttcctttacggttagtgtagtagatatcgggatcattgtcaccgacatcgcgaacccattgtgggatcgggatagtaacgatgtcgccaacgtttccaccacattggtgaaaagacatgattgcttggattttgagtcccaaacgtgcgatcagctggaacagcgttttgtaggccgtccaatcatattgtttgggacctttggattctatgattccccaccaaacatcgaccataacgccatcaacgccagcttcttctttgagacgtttaagctgcgtttcaagcgtttctgggtccgcaaatacattttccacattcacaactcccaactgtcacattcacaacatattttcattgatagttatgatcaaagacattgttgagaaagaacaaaaaaccaaaaaaacattttgaaccattatatatgcataaatgcgaaaatgcacattatttagcgtgtgaaaagatatatagaattacaaactatgtaattgctaaatcacatatgatggtggctatgtcattcaaagaattagatttatatgttcccttgtctccgtaaattcaagtctcggactgaaagtcataactaaatgataggaaatatttttggcaagatctagtatagtcacttatcctttgtacgtttataatcaaagagttctggccgaagcacatacaaatttcctccaagatctagtatagtcagcttatacttttaatcaacactcagactaatggggccattaaagggtccttgcctttcgccactggtccaaggcgctaggttgttaaaaaaaaaaagttatttgcatacacgtaataaaaaattcatgtattatagttgaactcttgaaacattagccaaaagatgttaactcaaacagtgatcgacagtgagttaccggaagcataacgtaaacgggaacataattaagaagaagcttctcgttgtaattggtagccatttttcttctaaatacaaacaaagaaagaacgtcttttttttttgtttttttgttgagagagtgttgtaggaaaatataagcaatatgagtagtagatgaagctcacatgtctctcttaaagaaagctcacgagctctttatatagaagtagatgatattatgcgagtggttgtgatttttgtgtactgatctaaaacgactggtgctctgttttcagcggtccatttgaggattgtataatgactttattgccctctgtttttggcgtcttccttgtcctctttcgtcatttcctgagattctttggaatgatacctttttctataattgaggttcaccgattttgatttccgacactgattgtgttgtcgccactcgccggccttctttttgtttctccatgtgttgtttttaagcacgtggagtaaatgcaaatgatatttgttcatgtctgtattcaccattcaaatcttgttaccttaataagtaagctcaatgtcaaaatttaccttagtgttgatgtcttacaacttgaatattatagtaggtggattatgtggatgtcaaaaatttggtgtgatggattttataaatcgtgaaaataaactggagtccaaaatctgtaagttactaagttgagctaaatgaagactgaacaaaagggaatcaagagaaaacaacaaagtgaaagagtgatcttattgataatgtgtcaaacaaattacaaagaaagaaaaaagatgtaggtagagtgactttcagaaaaaatagtgaactttacctccttgttatctttgaaattgaatgggcttccgttggattaggttcgtgagggtgtgttttttttgtcgacaattttattagattgactcaaataagccaatgttgagaaatattgtttgcaaatataataatatgtgtttggttcaatatttcgtgccaaataatctgttttaaaatttccacgagttaaagataaatcaaaatctggataataattcggtttgtgttaaatctgaatttttcagaatagttgacttatacttcaagttaatttgagtaattatatatatatatataaaacttaccggggaattgtaaataacatcacacaatacgttttttttaacattaaaatacgattaaactcgacatagatttgttgatctacatgttttctctctcttctctctcctcatctttcagagagagcaaaccagtttcagcttttctggccggcaatgactggctttatcagcagtgtttggtcggcttctactctggcatcgctggcttccttagaagcgttggttggctcagcttccggcatcgaccggctactttcagcggtggtggctggcttatctcccgagagcaagatatcctcttttttgtttcgccgggcttttctccggcgtctttggccggctttctctccggtttcttgaccggatttagatttgttttgttttttttatcttctgcctgtagtttaaagattgatgaacccaagttaaaaagatgttgattgaagaagaagaggaagaaaaagaaaaagaagaagaagaagaatagcacttcgtggagtcaaattctcatccaaggtacaactgaaatttcgccattaatcctttgggcgacgagtgagctatgccagttgaacaagttttccggtgtttcagccggaattgaagcttctgacggcgactcccttctcttccagttcctacgtgtccttcaaaatgttttccactgacacgtgttttctatgcggcgcacaacaatcacttgttctcttccttcagtttagggtttattcatttgagcttttgggaatttttttttttttttgggcttgtttatttcagtttttgtgaattattggcctgttaattttggctctataatattaataaaacacacttgtgatagaaaaaaatacgattaaactcatctgattggactgtttataatattataaaagccaaaaactattttgaaactgttgtcgcgtcatcaattctcacagtgtcggcgtcagcgaataacactgtaaacgcgcgccaacgattcgattgcatatgattcttcctctgtaaattgtaatgcaagctaatctcattaatctctgacatgcatcaagtattttgtgatatctcatcttccagagtacgtgatcttgaagaaattatccatgtgatttctcacccatgcattgtttattcattcgtctacctcactgcagcttcgattcgatcagattcacaaatctcaggaacaaattcgtctaccgaaacagataaaacgcacataaagtgttcgatggaatgcctcacagaaagccaataagttgtgtgtcagtatgaatccgttcgcacattgtgaaatcagttctgacattgtttagtgagttgactattgtctaaaagatctcttcgttgattttatttacttactttaatgaatcaccagttttttcaacgcttacctgatttttcactagtttattcgttcttttgttcagtttttctctctgtacaagaccggattctatggttatgatcacgtggagctcgcgtgatattagtgtatgcgtaagttttgttcaagttatatatataaaactctgacttcattagcttcttcattcatgtggagttttgcttgcttctccttgttgttattagtttctttggctgcttttacctgacaatggctcaaacaggtgaagatgttgacaaggcaaagtccttccaagttgagtttgcttgtggaaatggtgttgatgatgaggagaagcttcggtcgcagtgggcaacagttgagagattaccaacttttaaaagggttactactgctttgttacacacaggagatgactcgtcagatattattgatgttactaaacttgaggatgctgagagacggttgttgattgaaaagctcgtcaaacaaatcgaagctgataacctccgtttactcaggaaaataagaaagagaatcgacgagtaagtcactacataatctctttttttttttgtttctggtgttagtgaccttttaatctgtttgcatgttagtgaccttttaatctgtttataacatatatgattgtagagttggtatagagttaccaacggtggaagtgaggttcaatgacctctctgttgaagcggaatgccaagtagttcatggaaagcctatcccaactctttggaatactatcaagggctcactatctgtaagtactcaaatgtatttgctgcttccatctgattacgagcgcttttctgctttccatgttctttattcacgcttttccgctttccatgttacagaagttcgtttgttcaaagaaagaaaccaagataggcatcttgaaaggagtgagtggaattgtaaggcctggaaggtaattttttcaagaggcatatctttagtcccttaagttgcatggaagaagaaatgaaagatcactggctagtttgtgtagctttttctagaaagtaattttcatttcagagttcaaaagatgtactggttttcttgcagaatgacattgttgcttggtcctcctggttgtggtaaaaccactcttctacaagcactttctggaagactttcccattctgtaaaggtttgactaaaatacataggactgttgaactaacatcgaataatatattaaagatcacaagggttatcttcactctacaggttggaggaaaagtaagttataatggttgcttactttcagagtttattccagaaaaaacgtcaagttatatcagtcaaaatgatctacacattccagagctgagtgtgagagagactctcgacttctctgcgtgttgccaaggcataggaagccgtatgggtgaggacctgatttgtcatattcattcaaaatggagggtatttttgaacttagttcacattaacaagctatggtgtattccacagaaattatgaaagagatcagtagaagggagaaactaaaagaaattgttccagatcctgatatagatgcttacatgaaggtggtttgatgcaagaattattttcttcttaaaacactattaaaaagtaagcaatctcaaattttcctttacctttgctattacaggcaatatctgttgaaggtttgaaaaacagtatgcaaactgactatattctaaaggtattatgctttcagggttgcttttctaatcttctcactaattatcttcacgctgcgtataaaataatttatgaatctatctttcagatcctgggactcgatatctgtgcagatacacgagcaggagatgccacaagacctggaatatctggtggccaaaagaggaggttgacaacaggtactttcactttcttacagcttctcatagttttctgatcagagcttttaaatatctatgtcgactattgtaggtgaaattgttgtgggcccagctactactctgttaatggatgaaatatcgaatggtttggacagctcaactacgttccagatagtgtcgtgcctccaacagttggcacatatagctggagccaccatactgatttcacttcttcagcctgcaccagaaacatttgagctttttgacgatgtgattcttttgggggaaggaaagataatttaccatgctccaagagctgatatctgtaaattctttgaaggttgtggatttaaatgtccagagagaaaaggcgttgctgacttcctccaggaggtatgggaatctatttgatcattttcctatctatttgatggagaaccttatccttcacatgcctctgttccaggttatgtctagaaaagatcaagaacaatattggtgccacagaagcaagccctacagttatatatctgttgattcattcattaagaagtttaacgaatcaaatcttgggtttttgctgaaagaagaactgtcaaagccgtttgataaatcccagactcgcaaggatagtctatgttttagaaaatactcactcagtaaatgggagatgcttaaagcttgctcaaggagagaaattcttttgatgaaacggaattctttcatttacttgttcaaatctggactggtacgttctgttacactggcaaggtttccttatcatgtaccaatgtatgctaacctttttctttatgcagttagtgttcaatgcgttagtcacaatgaccgtttttctacaagctggagctacgagggatgctcgtcatgggaattatcttatgggttctatgttcactgctctctttagacttcttgccgatgggcttccagaactcactttgactatctccagattgggagtgttctgcaaacagaaagatttatacttctatcctgcttgggcatatgcaattccttcgattatcttaaggatacctctttcggttcttgattcatttatttggacagtactgacatattatgtcattggttacagtcccgaagtcggaaggtaaacaacttttacagataacttcaactatgaattcaaatttaatagagctaattacttaatggtaagtgttactttccttcaggttcttccggcacttcattatcttacttacattccacctttcatgtatatcaatgtttcgcgctatagcgtcaatctgtcgcacatttgttgcttgctcaattactggagctatttcggtattgcttctcgcattgtttggaggctttgtgattccaaaatgtaagtttgctgtaactatgtttttatcaagttatgcttctacaaatttgaaatattatttacatctatatgcaatattattatcatacatccaccatgcatgttagcaagttttagtgttgattaaaaccatgcacttgtgaggatatttaggcatgtagtatataggatttgtttacagactatttatgacaatgctcattttcagcatccatgcctacttggctgggttggggattctggctttctcccttgtcatatgctgagattggtttaaccgcaaatgaatttttctctccacggtggagaaaggtaataattcttcagatgactttcacacaagtctcggaactctagtttgctcatctgcttttaattttgctatagttaacctctggcaacattacagccggggaacaagtgttagatgtccgtggattgaattttggtaggcactcttactggacagcttttggtgctttagttgggtttgtcttgttcttcaatgccctctacacgttggccctgacatatcggaatagtaagttcactattgaaatgactttatgaagtgctatccacctaaattattgacaagattatctctttaagttaagatccacaaagatcccgtgctattgtctcgcatgggaagaactctcagtgctcagaagaagattttaaaccctgtcctgaaatcacatcgcgagctaaaacaggtatctctcttcatcatccttttatttttgagcaggtgtggtgagtggtgaccgtatcccttctaaaaatatatcttttcacaggaaaagttatcttgccttttaagccactcactgtcacatttcaaaacgtccagtattatattgagactcctcaggtaaacattgtttaagatcagtatgaatattttgagataataaattctcaaacagaacgcaagtttatatgcgactcactttcctcttaggggaagacacggcaacttctctttgatattacaggcgcgttgaagcccggtgttctcacatctctgatgggtgtcagtggagcagggaaaacgactcttcttgatgtcctttctggaaggaaaacccgcggtatcatcaaaggagagatcagagtaggcgggtatcctaaggttcaagaaacatttgcacgagtatcaggttactgtgaacagtttgatattcattcccctaatataactgtggaagagtctttgaaatattctgcttggcttcgactcccctataacatcgatgcaaagaccaagaacgtaagtattcacactcaaagaatttactacaagaagctggaagcaacttatctaactatatttaggatctggctttaggaactcgtcaaagaagtcctcgagacagttgagcttgaggatatcaaagattccatggtgggacttcctggaataagtggtttatctacagaacaacgcaaaaggctgacaatagccgtggaacttgtttctaacccttccatcatatttctggatgaacctacaacagggctggatgcaagagccgcagccattgttatgagagctgtgaaaaatgttgctgagactgggagaacagttgtttgcacgatccaccagcctagcatagatatctttgagacatttgatgaggtaaaatggctgaaatcattgatttaaccacattaatctaaactttgatccccctagcagcttcttattcccttaattgcagctgatcctgatgaaagatgggggacagcttgtctactatggtcctcttggaaaacattcaagtaaggttatcaaatactttgaggtcagtttgtctacaatactagactagtttcatctcggctgggttcttagaaaaaaaactaacacttagagttctatttattaacagagcatccctggagttccaaaagtccaaaagaattgtaatccagccacttggatgttagatattacttgtaaatctgcagagcacagacttggaatggattttgcacaagcatacaaggattcaactctgtacaagtgagtctttatgcagcaatcctcataatgtttgtatgtgtgcgtcaaactatcgttcttagtgcctggtttggtctttttgtgcagggagaacaaaatggtggttgaacaactgagttctgcgtctctgggatcagaagctctgagctttccttcacgttattcacaaacaggttgggggcaactaaaggcttgcctttggaaacaacattgctcgtattggagaaacccttcacataatctcactcgcatagtcttcatattactcaattctctgttatgtagccttctcttctggcaaaaagctaaggacatgtaagtctccgctccccattttgaagtatgattgtttgcaatcaaattgtggaatcactggctttctttttttttctggggtaaagctcgaaacttaagttctttaactacgattcagtaaacgtaacttctcataaattagagagtatgctgtctttttaatagaattagttttttcatgatgggtgaaatacatatcatagtaagacacccgtaccaaaaagttcaggttccaaaactcatcttgttttctgaatctcacggatatgcaataaacaaggattaggtactagaaggtttcccaaaatgttttgcttactaaatctacacaaccttagtttgatattctatggttgtaagtcttcatcaatactaccaacatttcacactgatcaaatgttaattaatatgagtgtcactttactttgcagaaataatcagcaagatctttttagcatatttggctcaatgtacactatagtaatcttctcgggaataaacaactgtgcgacagttatgaacttcattgcaaccgagcgcaatgttttctaccgtgaaaggtttgcgcggatgtactcctcatgggcgtattcattttctcaggtttaaattttttccatttgtaactttggttttgtcgacttttaagaaaaaccttatatagctcgtctcttaggcttccactcatattggatggataccatccactggccaaatttctctatacatgattcaggggcctaatgtttttgcaggtcctagttgaggttccatactcactactccagtctctactatgtacgatcattgtatatcctatgatcggctaccatatgtctgtttacaagatgttttggagcttgtacagcatcttctgctcgttgcttatcttcaactactgtgggatgcttatggttgctttgacgccaaacattcacatggcattgactttgcgctcaacttttttctccatggtgaatctgtttgctggctttgtcatgccaaaacaggtaaccccttatctctggctcttcttttacatacagccaaaatccaaagtatatatcatggaacctgtggtcttagaaacttattgcatcaataaccaagagatatgtcaagtcgagctaagtcagaatgttgttgcattgcatggaaatgagaaaaatgtaatgttttccgcagaaaatcccaaaatggtggatatggatgtactacctgagccctacatcgtgggtgttggaaggattactgagttcgcagtatggagatgtcgagaaagagataacagtatttggagagaagaagagtgtttcagctttcttggaggattacttcggctacaaacatgactccttggctgttgtagcgtttgtcctcattgcttttcctatcatcgttgcttctctttttgccttcttcatgagcaaactcaattttcaaaagaaatagttctttttatttttgtcagttaggcttttctttctcttatgatatcatcataaacgttttacattttctctatctggtctcaaaaatgggcaattgtgaagcacacaaagaacaagttttgagaattgattccagcagcaaaagatgatcttttattacatataacaacataactagaaaattcttgagaggtggcttggttttgttgtttattcaaaatgcggtatggaccataccgtatggtctaaaatgttcgacgtaacgattccaacggaattggctcgagaaagcaacccctatttgtttattgattacttggcctgtgttattcagttgcaccatgcctataaggacggacttgtctaacttttttttttttttttaattttattttgtaaagttgaatctttttatttttctaatgtggtttccaataatgaaaatgcatcaagacggatgaaatttagtatgatgacttgatgatgagattaccaaattttaggtaatttgtcatcggaaaaacgtgttttcttttctcaaaagaattttaaatttgtgtgttgctctcccaaaaaaataaaacattccttacactgttacacataccaaataggcaaataaaaccgaactctgctgtgtaagatttggttttaaccaaaaaaacaacaaagaaaaaactatttcttggtggaatttgaagattccattggttaaatgatctactaactatcctcatccatattttactaataaagtaataatcatgttaatttatgaaagaactaaaaattgtcactgtttggaggattaaactcctctgacatgtttttaaaaaactatatacacacagttatttgaaagttaagttttgttgcgtcaccacttctcatattgtaaacgcgtttgcaagctaaggttttttgattaaacaaaaccttatctcattaaattctgacaacgaatcaaatattcaatcttcgtgctgatgttgaagataatatcacgtctctctcactgcagattcgatctcagggaaatataatacttttacagagttacgtggtcaaagtgttcgacgaaatgcctcacagaaagccaataagttgcgttcaagtatgaatactcttgcagatagtgggatcattgtcaataagctgattttcgaaaagatttcgtcttgataacattttgtcaacgcttaccagatttgtattagtttattcgatctttttctcccggattctatggatatgatcacgtgaagcatgggagatgataatgtatgcgtaatgtttgttaaagttattataattacaaacattcttccttcaatagttcttcattcatttgacgtttgcttcttcttgttcttgttaagtttgttttttgttgttgagttccgttggcattttaactgaaaatgatccaaacaggtgaagaagatgaagaaaaggcaacgtcccttgaagttgagtttgcttctggaaatggtgttgatgatgaggaagagcttcggttgcagtgggcaacagttgagagattaccaacttttaaaagggttactactgctttgttggcaagagatgaagtgtcagggaaagggcgagtcattgatgttactagacttgagggtgctgagagacgcttgttgattgaaatgctcgttaaacaaatcgaggatgataatctccgtttactcagaaaaataaggaagagaattgacaagtaagtcactgcacgactctactgtgtttttttatgtcaagtagagcaacatttgttttgtaaattgtatgtgcatgttagcaactattgaaccttcatgtaattgtagagttggtatagagttgccaacggtggaagtgaggttcaataacctttctgttgaggcggaatgccaagtaattcatggaaagcctatcccaactctttggaatactatcaagggcttactatctgtaagtactcaaatttatttgctgcatcgatctgaatatggagcgcttttctgctctcaatgttctttattcatgtttttctgctttccatgttacaggagttcatttgttctaagaaagaaaccaagataggcatcttgaaaggagtgagtggaatcgtaaggcctggaaggtaaagtattcaagaggttattctctagtccctttagttgcacggaagaagaaatgaagggtgactggttattttgtgcatgtagtgtttttttataggttttcattacagagttcaaaagaggtgttggttttcttgcagaatgacgttgttgctcggtcctcctggttgcggtaaaactactctgttacaagcactttctggaaaattttccgattctgtaaaggtttgactaacagagtaaaaacataagcctgttgaactaatataaaataatatattggagatcattaaggttgtcttcactttacaggttggaggagaagtatgttacaatggttgctcactctcagagtttattccggagaaaacgtcgagttatataagtcaaaacgatctgcatattcctgagctgagtgtaagagagacacttgacttctctgcgtgttgtcagggcatcggaagccgtatgggtgaggatcagatttctgaaagtttgaactgaaggatacttttgtgtgtttgaactcagttcacattaacaagcaatggtttattaaacagaaattatgaaagagatcagtagaatggaaaaactccaagaaatcattccagatcctgctgtagatgcttacatgaaggtaagtaatgaaatattaaatttgttctttaaacactgttaaaacgtaggcaatctcagttttccctctacctttgctatcacaggcaacatctgttgaaggtttgaaaaacaatttgcaaactgactatatcctaaaggtttggacataatttgctttcagggttctgttttcctctttatgctgcatttgacataattttatgaatccatttccagatcctgggactcgatatctgtgcagatacaagagttggagatgccacgagacctggaatatctggtggcgagaagaggaggttgacaacaggtactttcactttcttacagctcctcatagttttctgatcagagtttttaaatatctatgttgactactgtaggggaactcgttgtgggtccagctaccaccctctttatggatgaaatatccaatggtttagacagctcaactacgttccaaatagtgtcatgtctccaacagttggcacatatagctgaagccaccatactgatttcacttcttcagcctgcaccagaaacgtttgagctttttgacgatgtgattcttatgggggaaggaaagataatttaccatgctccacgcgctgatatctgcagattctttgaagagtttggatttaagtgtccagagagaaaaggcgttgctgactttctccaagaggtatggctgtaaatttgatcattttccctatctatttgtaatcatcacatgcttctgctacagattatgtcgaaaaaggaccaagaacaatattggtgccacagagacaagccctacagttatatatctgttgattccttcattaataagtttaaagaatcaaatcttgggttgctgctaaaggaagaactgtcaaagccgtttaataagtcccagactcgcaaggatggtttatgttataaaaaatattcactgggtaagtgggagatgcttaaagcttgctcaaggagagaatttcttttaatgaaacggaattctttcatttacttgttcaaatctgcactggtacgttcctctaatctacttaggattccttatcatttaccactgcatgctaaccctttttctttatgcagttagtttttaatgcgttagtcacaatgaccgtttttctacaagttggtgcgacgacggattctcttcatgggaattatctgatgggttctctattcactgctctctttagacttcttgccgatgggcttccagaactcactcttactatctccagacttggtgtgttctgcaaacagaaagatttgtacttctatcctgcttgggcatatgcgattccttcaattatcttaaagatacctctatcggttctcgattcattcatctggacattactgacatattatgtcattggttacagccccgaggtcaaaaggtaaacaacatttttgaagataccttcaatgattaatccaaattcagtaagtaaactacttctaatggtaagtgttactttccttcaggttcttcctgcagttccttatcttatctacattcaacctttcttgtgtatcaatgtttcgcgctattgcggcaatctttcgcacaattattgcttccacaatcactggagctatttccatattggttctctcattatttggtggcttcgttattccaaaatgtaagtttccggaactttcttatatcaagttatacttctgcaattttattattataataatctacttgtgaggattggtaggcatctagtttagactatttctaaaaatgctcatctttcagcatcaatgcctgcttggctgggatggggattctggctttctcccttgtcatatgccgagattggtctaaccgcaaatgaatttttctctccacgatggagcaaggtaataactcttcagaaggctttcacacaagtctagtaactctagtctactgatccgctttatattttgcaataggtaatctctagcaagactacggctggggaacaaatgttagatattcgtgggttgaatttcggtaggcactcttactggacagcttttggtgctttagtcggctttgtcttgtttttcaatgccctctacgtgttggccctaacgtatcagaatagtaagttcatcacacatgacaataaataactctatgaagtgttttccatctaacatattgataagattatctttgcaagttaagatccccaaagatcccgtgctatcatctcacatgaaaagtactctcggcccatagaagaagattttaaaccctgccctaaaatcacttctcgagctaaaacaggtatctctttttgtcagctattccatcttttctatgttttactaggtcagtggcttgcgtaatgacaagatatcttttcacatctttcgtctctttttcataggaaaaattatcttgccttttaagccactcactgtcacatttcaaaacgtgcagtattatattgaaactcctcaggtaaactcattgtttaagatcagtgtgaatgttttgagatactaaattctcaaacaaagcacaagtttacatgtgagtcacgttcctcttagggaaagacgcgacaacttctctctgatataacaggcgcgttgaagcccggagttctcacatctctgatgggtgtcagtggagcagggaaaacgactcttcttgatgtcctttcgggaagaaaaactcgcggtatcatcaaaggagagatcaaagtaggcgggtatcctaaggttcaagaaacatttgcacgagtatcaggttactgtgaacagtttgatattcattctcctaatataactgtggaagagtctttgaaatattctgcatggcttcgactcccctataacatagattcaaagacaaagaacgtacgtaattacactctcaaaacgaatcgacttaaagaaattgtcagaacctttatctgactatatctgggatctggcttcaggaactcgtcaaagaagtcctcgagacagttgagcttgatgacatcaaagattccgtggtgggacttccgggaataagtggtttatctatagaacaacgcaaaaggctgactatagccgtggagcttgttgctaacccttccatcatatttatggatgaacctaccacagggctggacgcaagagccgccgccattgttatgagagctgtcaaaaatgttgctgagactgggagaacggttgtttgcacgatccaccagccgagcatagatatctttgagacatttgatgaggtaagttgttgaaatcattgatttaaccacatagtctaaactttgatcccccaaacagcttcttattcccttaattgcagctgatcctaatgaaaaatgggggacagcttgtctactatggtcctcctggacagaattcaagtaaggttatcgaatacttcgaggtcagtttgtctacaatactagactagtttcctctcggctgagttttggatttcacaaaataactttaagagtactatatattgacagagcttctctggacttcccaagatccaaaagaattgtaatccagccacttggatcttagatattactagtaaatctgcagaggaaaaacttggaatagatttttcacaatcatacaaggattcaactctgtataagtgagtgtttatgcaacaatgctcttactttttgcatgtgtgcgtaaaaaccgattgttctcattgctggttgttcggtcttttcttgcaggcagaacaaaatggtggttgagcaactgagttctgcgtctctgggatcagaagctttgaggtttccttcgcaattttcacaaacagcttgggtgcaactaaaggcttgcctttggaaacaacattactcgtattggagaaacccttcacacaatataactcgcatagtcttcatattgctcgattctacgttatgtggccttctcttctggcaaaaagctgaggacatgtaagtctctgctccccatttcgaaatatgattgtatgctactagatagtggaatcacagtttttctttcttagaggtaaagttcgaactaaaatgatcttactagtaaacataatttctcttttcttctgtatcaggtctttttttatagaatattctgttcgtttatggtgggtaaaatttgagtttacctttgcagaaataatcagcaagatcttatcagcatatttggatccatgtacactctagtagtcttcccgggaatgaacaactgtgcggcagtgataaacttcattgcagccgaacgcaatgttttctaccgtgaaaggtttgcacggatgtactcctcatgggcgtattcattttctcaggttaacactgtttcctttaaaaataggttatgtcaacttttaagaaatagatcttatagcaaatcgcttaggctgtttataattttcttggatatagcatccactagcaaatatctctctacataatccaggaatttaatgttttgcaggtcctaattgaggttccatactcactactccagtccctactatgtacgataattgtatatcctacgatcggctaccatatgtccgtttacaagatgttttggagcttgtacagcatcttctgctcgttactcatcttcaactacagtgggatgcttatggttgctttgacgccaaacattcacatggcagtgactctacgctcatcttttttctccatgttaaatctgtttgctggctttgtcattccaaaacaggtaaggctccccttatcccccacgccgtttgacatatagccaagatccaacgtatgtgtcacttagtgcatgttaaacctgtggtcttgtagacttattgcatcaataaccagtaggcttagagctatgtcaggtctatttaactcgaaatgttgctgcgttgcgtggaatattaattgtatatcattcatataaaggctcctgaacacaaaaaatgtatcgttttccgtagaaaatcccaaaatggtggatatggatgtactacctgagcccgacatcatgggtgttggaaggattactgagttcgcaatatggagatgtcgacaaagagatattagtatttggagagaagaagagagtttcagctttcttggaggattactttggttacaaacatgaatcattggctgttgtggcgtttgttctcatcgcttatcccattatcgtggcaactctttttgccttcttcatgagcaaactcagtttccaaaagaaatagttgcttgcttgtaatagtagtagttcactacacttacttcagttaggcttttttctctcccaccatatcttaagttattatcagaaacattttacaattcttatggtcacaaatcttggccgattgcaatggtcctgataatcccatagtgacaatcttacacctacacttcggtttaaccggaaaaagctgagttggggcaacagatattattgaagcatacaagaacctttgttattggcagaaatgatgattccaaacagccaaagtcgaatcttttacatatcaagaaaaattctttagaggtggctagtttttacaactatggtactatggtccaagtgttcgacgtaatgatactaaccgaaagcaacccatttgttcttttgttcattgattactttgtctgtcttattcagttgctccatgcttgtgaggacttcacattaaaaccgtttacttcttttatccacattgtgaagccacttgattatcataatatcgtccaccatggtttatttttattataaaccttatctcattaatttctgacaaatgaatcaaatatttttctgataatcatgtgggttttgtccatgcacgtctctctgactgcagatatgattcgatctgcaaaattattagttgacaaggctcactcaggggattgggaaataatactctctatcagttgcgtagtcaaagtgttcgatgaaatgccaatgagacatatttgtggtattattgttaaaggagccgacttttgtcgaaaagataccatcttgatgatgccattgtcaacgcttacaagatttgtattactttattcattctttcctctgtgcaggaccggatttttattatttttatggagatgatcacgtggagcatgggggctaataatgtataccgcgtaagttttgttaaagttattatatttacaaacattctgacttcaattagcttctccttgttgttgttctcaagttgtttgttttttatagactttgttggttgctttgggacagtaatttggattttcactactgttacatacaagtaagattttttttttgagatttgattcttttacataacaggataattcttcagaggcggctcggatttgttttgttttgttgtttcttcaaatttggtatatatatggtctaaaatgttcgtcgtgaaagcaacgtgtctttcacctattactttttcaatgctctcccatttgtttattgattatctttgttttgtctgttgttttagttggcacttggtccatgatgatagacataaagaccgttgacttgtgtgtcaaccttgtgaaaccaacttggttgtgattaattgtttgcaagctagcacactaacttgtatataaacattctcttctctttgtaagtctaataatcctttttttcgaatttggtttctaataatgacaatgtctcaaacagatggagttgagtttgcttctaggaacactaatgaaaatgggcatgatgatgatgatcagcttcggtctcaatgggttgctattgagagatcaccaacatttgaaagaatcactactgctttgttctgcaaaagagatgaaaaagggaagaaaagccagaggcgagtcatggatgtttctaaacttgatgatcttgatagacgcctgtttattgatgatctcatcagacatgttgagaatgataatcatgtcttattgcaaaagattaggaaaagaattgacgagtaagtgtacgccttttggccgttgacctttgtatttatatgttgttcctattacattagaaatgttaattccatgtattttgtagggttgggattgatttaccaaagattgaagcgaggttcagtgatcttttcgtcgaagcagagtgtgaggttgtttacggaaagcctatcccaactctttggaatgctatttcaagcaaactatctgtaagtgtcattcaattgctttgacttgtctttctattctcaattccttctgagattagaaaataatggttgattttgacagagattcatgtgttcaaatcaagcaaagaagatcagcatcttgaaaggtgtcagtggcatcataaggcctaaaaggtagattcttgtagcagaaatttcctaatcattatccaaagaatgattggtttaattccagaagagttagtggttttcttgtagaatgactttgttgcttggtcctcctagctgtggtaaaaccactctactactcgcattatctggaagactcgacccttctttaaaggtttggcttctttttttttctctccttcaaaacgtctctattttttttcagaaatcatattggttgcttccattttacagactagaggagacattagttacaacggtcacttattttcggagtttgttcctgagaaaacatcgagttacgtaagtcagaacgatctgcatattccagagcttagtgtaagagagacactcgatttttcgggatgttttcaaggcacgggaagccgtttaggtatgcgtaatactaaattcttatgcattgaactttattgacactaaaaaccactgtcttttgttcatcagaaatgacgaaagagattagtagaagggagaaactgaaagggattgtaccagatcctgatatagatgcatacatgaaggtaaaataactatggatatttcatatgacaagtatacataacttggaacttgttttgatgaataagaaaacatctttggaattcaactttttatcatgacaggcagcttctattgagggttcaaaaacaaatctgcaaaccgactatatcttaaaagtaagatacattcagagtctgttcttttttttttaatcttttttatttcatctttagcttctactcttatcagaagttgattaatgcatctgcgtttcagatcctaggactcactatctgtgcagatacacgtgttggagatgcttcgagaccaggaatatctggtggccaaaagagaagattaactacaggtacttgtaaaatttcacaaactgctttaggttccttgcaaacattgttttgatgtttggtatatatctctgtaatctattgcaggtgagatgattgtaggtccaatcaaaactctgttcatggatgaaatctcgaatggtttggatagctcaactacattccagattctatcatgtctccaacagtttgcacgtctatctgaaggaaccatactggtttcactgcttcagcctgcaccagaaacgtttgagcttttcgacgatttgattcttatgggagaaggaaagataatctatcacggtccacgggattttgtatgtagtttctttgaggattgtggatttaaatgtccaaacaggaaatctgttgctgaattccttcaggaggtatgaatatgatagtgatggtactctctgttcttgaaacttaaatgttcattacgctcttgtgttgcaggttatctcaaggaaagatcaagaacaatattggtgtcacatagaaaaaacatattgttatgtctctattgagtcatttattgagaaatttaaaaaatctgatcttgggctagaactacaagacagactctccaagacatatgacaagtctcagactcaaaaggatggattgtgctttagaaaatactcacttagtaactgggatatgcttaaagcttgctcaaggagagaatttcttctgatgaaacgtaactctttcgtttacgtattcaaatctggacttgtaagttgtatttactttgccaaaaagctttacttatttttaccgatacatattaaacccatttacctttttctgcagttaattttcattggattcattgcaatgactgtttatctacggactgggtctacaagagattctcttcatgctaattatcttatgggttctttgttcttctctctctttaaacttcttgctgatggacttccagaactcacattgacaatctcgagaattgccgtgttctgcaagcaaaaggagctatacttttatcctgcttgggcatatgcaattccttctgctattttgaagataccgatctcatttcttgaatcattcctctggacaatgttgacatattatgtcattggttacagtcctgagatgggcaggtactaatttggaaccggtttttcaatgaccaatgcaaaaagaaaccaaatttaatatttttcgttttgctaaacaaaaatattttttctttccttcaggttcattcgccagttcttgatcttatttgctttacacctttcatgtatatcaatgttccgtgctatagctgctgtctttcgagattttgttgttgccacaaccgttggaagcatctctatagtgcttctctcagtattcggaggatttattgttcgaaaacgtaagtttttaacctgtaacttgaactgtagtaactcggaggattcactgtaatggtgccctgttacttttcagcctcaatgccttcttggcttgagtggggattctggctttctccattgtcatatgctgagattggtctaactgcaaatgaatttttcgctccacggtgggggaaggtaatgaattcttcagaaacctttctcattagataattttttagtctattattgatccttatcatctttgcattaccattagataacatctgaaaacagaactttgggggaacaagttctagatgctcgcgggttgaactttggaaatcaatcttactggaatgcatttggcgctttgattggcttcacactcttcttcaatactgtttttgcactggccttgacctttctgaagagtaagttcacaagagataagaatgtgacttaatcatgttagattataatcaatgagaattgatgttttttctgcaacttcagcttcacagaggtctcgtgtgattgtttctcatgaaaagaacactcaaagctcagagaatgattctaaaattgcttcccgtttcaaaaatgcattgcctttcgaacctctaactttcacatttcaagacgtacaatatattattgagactccccaggtaaagactaaagagtatgcaagatcagtgcaagttttcttgaatccttttaaacaagatagagaattataatgtgtggctatgatttatgtgttaaaagggaaagaagctgcagcttctctctggcgttacaggcgcattcaagcctggtgttctcactgctttaatgggtgtgagtggcgctggtaaaacgactctgctggatgttctttcgggaaggaaaaccttcggtgacattaaaggacagattgaagtaggcggttacgttaaggttcaagacacattttcgcgggtttcaggttattgcgaacagtttgatatccattctcccaacttaactgtccaagagtccctgaaatactctgcttggcttcgacttacttctaacatcagttcagaaactaagtgtgtaagtcattatttggaaaaaaaaatccttcctcccttaagcttctatttctgagtattttcttgatcttcgctttcaggcaatagttaatgaagttcttgagacgatagagctcgaggagattaaagattccatagtaggaattcctggaattagcggtttaacaacagaacaacgaaaaaggctaacaatagctgtggagcttgtttccaatccttcaataatatttatggatgaaccaaccacaggattagatgcaagagctgctgcaattgtaatgagagctgtgaagaacattgccgagactggcagaactgttgtttgcacaattcaccagccaagcatagatatcttcgaagcatttgatgaggtaaaaactctgaaagttaagaaaaacaattcatctcattttaacatttctcttatgtataagtacattatgtgacccttcaattgcagctaattctgatgaaaaatggaggaaaaattatctattacggacctcttggacaacattcaagcaaagttattgaatactttatggtcagtttctatataatactgaaactgttgcaaaaaaagtgtggtctcttctctacttacaaattattacaataattttcaactttagaggattcatggagttccaaaactgaaagaaaactctaacccagccacttggatacttgacattacttctaaatcatcagaagacaaacttggagttgatttggcacaaatgtacgaggaatcgactttgtttaagtaagtctaaacacaagtatcacttaatactttggatgtttgcctgaaactgattttgttatttgtttttagggagaacaaaatggtaattgagcaaacgagatgtacatctttgggatcagaaagattaatcttgtcatcacgttatgctcaaacgagttgggaacaattcaaagcatgcctctggaaacaacatctctcttattggagaaacccttcctacaacctcactcgcatcattttcatgtcttttacttgtatgctctgtggcattcttttctggcaaaaagctaaggaaatgttcgtgtcttcccccatctttcttgaatcggctttgaaccgcgtgatttccttgatcttaaaaggtttagctatttaacctttttttacctttcttctttgcagaaacaatcagcaagatctattcaacgtatttggctcaatgttcacggtggttctattctctggaataaacaattgctcaacagtgttatttagcgttgcaactgaacgaaatgtcttctaccgtgaaagattttcccgtatgtacaactcatgggcgtattcacttgctcaggttaaaacattttctcaatcaaacaataaaaaaaggaaaaaaaaaaaggaaaaaaatatcagcgtttgttattgactttaaggcttaagtttgcaggtgttggttgaaattccatactcattgttccagtctattgtatatgtgataatcgtatatcctatggttggctatcactggtcggtcttcaaagtgttttggagcttctactcaatcttctgcaccttgctcatcttcaactattttggcatgcttttagtcgtggtgaccccaaacgttcacattgcttttactctccgctcttcattttacgcaatcgtcaatctctttgctggttatgtcatgccaaaacctgtaagtcctctcttacctctcttcaccaagtttgtgaagttcgattcttattatgtgaaagaaagaaaaagagttagaaacagcatcaagatatgagattttgagagtttgtgttgttgatgatgcagaacattccgaggtggtggatttggatgtattacttgagcccgacgtcatgggttttgaacggattgctcacatcgcagtatggagatatggagaaagagatattagcatttggagaaaagaagaaagtttcagatttcttggaagattattttggctacagatatgactctttggctcttgtagctgttgttcttattgccttccccattctcttagcatctctatttgccttcttcattggtaaactcaatttccaaaagaagtgacttagcattttcctcatatataaaagtttttggtatttagaacttagaagtgagattttgtgtcttagaaaaaaaaaaaaaaaaagaaacccttccaaaattgttgaacaaaacagtacagttgtgcaaaaacgtaaccgaatggaaccaaaccgaatttctaaacgttcaggcctcctgatattcaatagtgagaaacttacaactgctcttcgatttaaccgattcagtcaattttgggcaaccgatattaatgaagcatacaaggaacctttgtttatggcaggattgatgattccagcactaaaagtcgaatcttttacatatcaagaaaattctttagaggtggctagtttttgttgttttgtcaagtatggtatatattgtctttagtgtttgaccttgacgtaatgattctaacagaaagcaacccctatttgttttgatcagttactttgtctgtcttattcagttgctccatgcttgtgtgatggactccacattaaaaccgtttacttcttctatccacattgacattgtcaagcccacttgatctacttggtctgttttgcaacatgcttgtgaggagttctctgattttatggaagttcgtatcatcgtcgcccaccatacttaaagttcatcatcggttttaagtcatatgtttatttttcagcatcatgacattaacaatggcgttacttatgagattttattttattcgtatgcaaacattgattttatttaatcaaacctttttttctttccacggtctttatttataatgacaaacacattgtacaagtcggaacaaacgcttctaactaataagacagtacatataaagcccaaataaaagcccagttacagctcaagaacgtgtcaaaccatttgggataagctaggacacgtgttgcttccataaccttcaccgcatgcaagagattttaaatccggtgtatcggaatcatcgccggaacaactactaacaatgaatcttctttttcctcaccgatgatgacaataacgagttacaagaccaatcaatcttatttaatcaaacctatctttatatatatgcaataaacaacctatgtatattttttctgcatcattttaattttgggagattttgataatccaggtagagcaaagcggattatggattatcacgtgatatccgtgcgtaatcatccctacctctgctatgcttttgtaaatattttaatattgaaaattaatgttgcgtcaccatttctcatatatttttaaaattaaggtttttttgataaaccttatctcattaatttctgacaaatgtttttctgataatccgatcttcgtgatgttgaagatagtcatgtgggttttgcccatgcacgtctctctcactgcagatttgatctgtgaaatgactaattgggaaataatactctgctcaagttatgtagtcaaagtgttcgatgaaatgcctcatagaaagctaatgagacatattgtgggattattgttaaaggagccgacttttgtcgaaaatatatcatcttggtgattccattgtcaacacttaaccagattagtattactttattcattatttcctctatggatatgatcacgtggagcatggaagctaataatatatgcgtaagctttgttaaagttattatagacattcaaacattctgatttcaattagcttcttttgcatcttgcttctccttgttgttgttgttgttaagtttgtttgtttttggataaactttgttcttgagttcatttggtttttatctgaaaatagcccaaacagtaatttggattttcacaactggtagaactgttacatacaagtataaaataaatcaagtaagaacctttttttggattcttttacttaacaggaaaattcttcagaggcggctcggatttgttttgttctgttgtttcttcaaatttggtgtatatggtctaaaatgttcgacttcaaagcaacgtgtctttcacctatactttctcaaggatctcccatttgtttattgattatcttgttttgtctgttatactacagttggtctatgcttgatattaaaactgttgacttctctatccacctcgtgaagccaacttgctagtgatcaattatttgtaagctagcaacactacttctctacttatatataagatgactctcttctcttttcttcgttataaagaacaatccgttttggaacttggtttctaataatgacaatgcctcaaacagatggagttgagtttgcttctaggaacaatcttgaaaatggggatggtgatcaggttcggtctcaatgggttgctattgagagatcaccaacatgtaaaagaatcactactgctttgttctgcaaaagagatgaacaagggaagagaagccagagacgagtcatggatgtttctaaacttgaggatcttgatagacgcctgtttattgatgagctcatcagacatgttgaggatgataatcgcgtcttattgcaaaagattaggacaagaactgacgagtaagtgcacgcttttcgctgttaacctttgtatttatatgttcctattacattagaaatgtaatccatgtattttgtagggttggaattgatttaccaaagattgaagtgaggttcagtgatctttttgtcgaagcagagtgtgaggttgttcatggaaagcctatcccaactctttggaatgctattgcaagcaaactatcagtaagtgtcttttaatagctttgacttgtctttctattttcaactgattatgagattgattccttccttataattgtgatttttgtcagagattcacgttttcaaaacaagaagataagataagtatcttgaaaggtgtcagtggcatcataaggcctaaaaggtagattcttgaagcagttagtggaaaataaatgatcggtttaattcagaagagttagttgttttcttgtagaatgactttgttgcttggtcctcctggttgtggtaaaaccactctactactcgcactatctggaagactagacccttctttaaaggtttggtttcttttctatcattcaagcgcgtttagttttcagaaatcatatgggttgcttccactctacagactagaggagaagttagttacaatggtcacttattttcggagtttgttcctgagaaaacatcgagctatgtaagtcaaaatgatttgcatattccagagcttagtgtgagagagacactcgatttttctggatgttttcaaggcgcgggaagccgtttaggtaagggcaatactaaattcttatgtttccttttgcattgaactttattgacacgaaaaaccacggtgttttgttcatcagaaatgatgaaagagattagtagaagggagaaactgaaaggaatagttccagatcctgatattgatgcatacatgaaggtaaaataactatggatatttatttcatatgacaaatatatataacttggaacttgttttgatatttaagaaaacatctttggaattcaactttttatcatgacaggcagcttctattgagggttcaaaaacaaatctgcaaaccgactatatcttaaaagtaagatacattcagagtctgttctttttttatttcatctttagcttctactcttatcagaagttgattaatgcatctgtgtttcagatcctaggactcactatctgtgcagatacacgtgttggagatgcttcgagaccaggaatatctggtggccaaaagagaagattaactacaggtacttgtaaaatttcacaaactgctttaggttccttgcaaacattgttttgatgtttggtatatatctctgtaatctattgcaggtgagatgattgtaggtccaatcaaaactctgttcatggatgaaatatcgaatggtttggatagttcaactacattccagattctatcatgtctccaacagtttgcacgtctatctgaaggaaccatattggtttcactgcttcagcctgcaccagaaacgtttgagcttttcgacgatttgattcttatgggagaaggaaagataatctatcacggtccacgggattttatatgtagtttctttgaggattgtggatttaaatgtccacagaggaaatctgttgctgaattccttcaggaggtatgaatatgatagtgatggtactttctgttcttgaaactttaatgatcatcacgctcttgtgttgcaggttatctcaaggaaagatcaagaacaatattggtgtcacagagacaaaccatattgctatgtctctattgattcatttattgagaaatttaaaaagtctgatcttgggctacaactacaagacgaactctccaagacatatgacaagtctcagactcaaaaggatggactgtgcattagaaaatactcacttagtaactgggatatgtttaaagcttgctcaaggagagaatttcttctgatgaaacgtaactctttcgtttacgtattcaaatctggacttgtaagttgtatttactttgccaaaaagctttacttatttataccgatacattctaaacccatttaccttttttccgcagttaatattcattggatccattgcaatgactgtttatctacggactgggtctacaagagattctcttcatgctaattatcttatgggttctttgttcttttccctcattaaacttcttgctgatggactaccagaactcacattgacagtctcgagaattgcggtgttctgcaaacaaaaagagttatacttttatcctgcttgggcatatgctattccttctgctattttaaagataccgatttcatttcttgaatcattcctctggacaatgttgacatattatgtcattggttacagtcctgaggcgggaaggtactaatttcgaacatgcaaaaagaaaccaaatttaatattttgctttctgctaaacaaaaatattttttctttccttcaggttcattcgccaggtcttgatcttatttgctctacacctttcgtgtatatcgatgttccgtgctataggtgctgtctttcgagattttgatgttgccactaccattggaagcatctctatagtgcttctctcagtattcggaggtttcattgttcgaaaacgtaagtatttaacttgaaacttgaactgtagtaattcagaggtttcactgtaatggtgccctgttatttttcagcctcaatgccttcttggcttgagtggggattctggctttctccactgtcatatgctgagattggtctaacctcaaatgaatttttcgctccaatgtggaggaaggtaatgaattcttcagaaacctttcacattttagatttttttttagtttggtattgatccttgtcatctttttattaccattagatgacatctgaaaacagaactttgggggaacaagttctagatgctcgcgggttgaattttggaaatcaatcttactggaatgcatttggcgcattgattggcttcacactcttcttcaatactgtttttgcactggccttgacctttttgaagagtaagttcacaagagatataagaatgtgagttaatcatgttagtatatgcaatgacaattgatgtttttctgcaacttcagcttcacagaggtctcgtgtaattgtttctcatgacaagaacactcaaagctcagagaaagattctaaaattgcttcccattccaaaaatgcattgcctttcgaacctctaactttcacatttcaagacgtacaatattttattgagactcctcaggtaaacgactaaagagtatgcaagatcagtgcaagttttctagaatccttttaaacatgatacagagttataatgtgtgggtatgatttctgtgttaaaagggaaagaagctgcagcttctctctgacgttacaggtgcattcaagcccggtgttctcactgctctaatgggtgtgagtggcgctggtaaaacgactctgcttgacgttctctcaggaaggaaaacccgcggtgacattaaaggacagattgaagtaggcggttacgttaaggttcaagacacattttcgcgggtttcaggttattgtgaacagtttgatatccattctcccaacttaacagtccaagagtccctgaaatactctgcttggcttcgacttccttgtaacattagttcagaaactaagagtgtaagtcattatttggaaaaaataaaaatgttttcttccttcctttagcttccttgtctgagtattttcttgatcttcgcttttcaggcaatagttaatgaagttcttgagacgatagagcttgaggagattaaagattccttagtaggagttcctggaattagcggtgtaacagcagaacaacgcaaaagactaacaatagctgtggagcttgtttccaatccttcaataatatttatggatgaaccaaccacaggattagatgcaagagctgcagcaattgtaatgagagctgtgaagaacatcgccgagactggcagaactgttgtttgcacaattcaccagccgagcatagatatctttgaggcatttgatgaggtaaaacctcgtaaaaccttcatctcatttaaagtctcttgtttaaagtacattaatatgtgacccttcaatggcagctgattctgatgaaaaatggaggaaagattatctattacggacctcttggacaacattcaagcaaagttattgaatactttatggtcagttcctatatattactgaaactgttgcatataatgttctcttctctacttccaaattataacaataattttcaacagtagagcattcctggagttccaaaactgaaagaaaactctaacccagccacttggatacttgacattacttctaaatcatcagaagacaaacttggtgttgatttggcacatatatacgaggaatcgactttgtttaagtaagtctgaatacttattgtgactttggatgttgtttgcctgaaactgattttgttatttgtttttagggagaacaaaatggtaattgagcaaacgagatgtacatctttgggatcagaaagattaatcttgtcatcacgttatgctcaaacgagttgggaacaattcaaagcatgcctctggaaacaacatctctcttattggagaaacccttcctacaatctcactcgcatcattttcatgtgttttacttgtatgctctgtggcattcttttcttgcaaaaagctaaggaaatgttcgtgtcttcccccatcttatttgagtcggctttgaaccgcgtgatttccttgatcttaaaagatttagctatttaaacttttttacctctcttctttgcagaaacaatcagcaagatctattcaacgtctttggctcaatgtttacggtggttctattctctggaataaacaattgctcaacagtgatattttgcgttgcaaccgaacgaaatgtcttctaccgcgaaagattttcccgtatgtacaacccatgggcgtattcccttgctcaggttaaaactttttctcaatcaaaccattaaggaacgaaaataaacaactcagccattggttttgactttaaggctgaatgtttgcaggtgttggttgaaattccatactcattgttccaatctattatatatgtgataatcgtatatcctatggttggctatcactggtcggtctacaaagtgttttggagcttctactcaattttctgctccttgcttatcttcaactatttcggcatgcttttagttgtggtgaccccaaacgttcacattgcttttactctccgctcttcattttacgcaatcgtcaatctctttgctggttatgtcatgccaaaacctgtaagtcctctcttacctctcttcaccaagtttgtgaagttcgattcttattatgtgaaagaaagaaaaagagttagaaacagcatcaagatatgagattttgagagtttttgttgttgatgatgcagaacattccgagatggtggatttggatgtattacttgagcccgacgtcatgggttttgaacggattgctcacatcgcagtatggagatatggagaaagagatattagcgtttggagagaagaagaaagtttcagctttcttggaagattattttggctacagatatgactctctggctcttgtagctgttgttcttattgccttccccattctcttggcatctctttttgccttcttcattggtaaactcaatttccaaaagaagtgagttagcattttcctcatatataaaagtttttggtatttagaagtgagatttagtttgcagatttgtcttttgggaaaacatcttagtatcaagcaaaagttgaagctttgaaagttgttgcaaccttttaggttatgttcaatggatttttagattcctttcgaagatccatttttaatactttgtatgctttaaaatgtttgtcaagtttggtaagtggaagtttccacatttgtatctcttgcaacatatgatcattataaattgtaacactttttgggaaagaaaaaaaaggtgggattttgtgtcttagaaacaactaaaatgaaaagaaaagaaacgcttccaaaatcggtgaacaacaacaagcttttacagttgtgtgcaaaaaaaaaaccaaagttgcaagtgactactttctcacaaaaccaaaaacgcaaaactttggtagagaatgagacgaccatatatacagaagaaggatctgagttttcttcatctccttacacaatttacaaaaacagaaacaacctttggtgtaaaatgcaaaattgtgctcaggtcttgtatgagacacttttcgtctgaactctaaaccctacagacaacatttaagtattattgagcatcaaggttgatgggagaagaattctcttacaaaaaaaaaaatttgtgaagaaccaataaagttacctcggattccgccatttcttccgagcagaagaaccgtagaccttgcttgcacgggattttttagctgattctagaagagagtgactgaggaaaaatgctaagtgttcatggcgattagctcatccggcatgcattgccttatattaatgaccattgacttattatatggcgatgagatgtcacaacattggcggcgaggcaaacccatctgacattttattttcaggaaaccaaaaaaaaaggtgaatccaggcaaaattgaaggtactttaacagagaagcgatcagtatttataaatcctacctgttcaacgttgcgttccagtttaggagacagaactctgatgcgttctagacgctcaacagcttctgctctgtgacagtgtccaactctatggatgttatagttactccatgttccctcagttccatctgatcctacactgtccaagaaaaagacgagcggtctcccacatggatccctcggatattctcttgtactgaacatatagttgctttggacccctgaccctctcctccatgtagaaaatgtcttttgcagtgtgagaagatccggaagaagtttatttccttcataaacttgaaccgcgtaaccccacacaaccgaaacagtcactgtgttcaaagaatcataacaaacactctgctgtaaaatcctcccggaatcaaaacttgcagctccgataagatgagccacggattctgtcctgttcctttttggaaaaaacggatcaactgcatccaagtgatgaagagataccaatggagataaagggtgcgcacatagcagaccaaatatgttccctctgacatcaatctataaaatgaacgcatacatagtaatactcagattaaactctctagcaacaaaatcagttatagtaaggtaagcaaatcacacttatccggaaaatactgcaacagaaaggaacatactaactacactattcaatatcaaccacaaaagacaagtgatctatgaactaaactttcctaatatagaactctctcagaacttttatttttcaacaatcagcatcaatgtcacagtgaaccatctcaatctctatcagattgttgcaactaatatagtaaaaactccattctttgattacctgatgaaatccaggttcatgagttaatgtaacaccaagctcagcgacgcaagagaagatcctagaatcacttccatacatatgtgaatacctcatcaaacaagaatccaaaaccttagctaaaaccttcgcaagcgaagcactaatagcaaatccaccaccaccaaacgccatatcaaacgaatacctaacattctgatcataaaactccgaattacttccgacgtaaaaccacttccggtgatcatacttagataaaaccgtcaccaaattatctacaaagaagacagtatcatcatcaccgaaaacaaaccaccgcacatctttatctcctctatcaaccgtctctttaacaacacgagccacacgaatcgccgatcggagaccaccagggaaattataaggaaacctagaaacgtctttagagacaatcacaggaggaagagttagatcggactccaatccaccgcgatcgagaaacacgacggcgcgtgtagattcaggagagtaccagagacgaacgtacgagctacgacggagccaagagtcgtgagaagcggcgatcgagaagagtaagtgacggcgacgagtggagaacacagataacgatcgagcgattgatgaaatctgttcacggcggaaattggtgccgtaggagaagatgatgtagatgatgaaacaaaagatgagtaataagaagatgtttctgatgcgagaagaagttagcgacggagatttggccggaaagagcatttccggcgaaagagaatcgagtctagagagagatgaatcaggtcgtctcttacgtctcgtttggttcattttgttgttaactttcctcttttgaattcttcttctctgcagattcgacgacggttaaagtttcgaaagtagtaggctagtagcacaacgaagcagtcactttcagtgaatagacttggtcattcgggtttacaggtcgggttttcgggtagtttcggtccggatctagctttcggacctacttgatgagaccgaggttaggtgttgtgttgtgtcatgtgtatcatattttatggttatgggcttgacatatgagttttagttggagggatttggatattatactcggcccattaaattatttagctgatataaactcatttgggctcaatatgtcaagcccaataacatacggatttggatactaaaactcatttgtcaacttagctaactatattttttttttttgctaagaatgtaaatattcattatcacaatgaaaatttcggttacacaataaagggtaaccaaatcatggttccatggcaaaaaaaggataaaaagcatggaagcatacaacattcttgaacctaatcctcgattcttgttaaagaagttgattgggaacaagataagatgaatccctaaagtgagctaggagaggaaacccaacgaagacaaataagtgaagctcacgaaacccccaaaacaagatggcagccctttcaacgggaatccgagcacatcagggagctccggaattgccgagccaaaagtgttaggcaatgcttactcactctaacgagtcccacttggaaacggaagcttagaatcttgcaacatcttaaccacaaagagccatactaacaccaccaatcgcaaagagcaaaacagagacttcaacaaaatcttcgcaagattacacatagacacaaatctgatgtggttgagcttaggtaataacataagtgacaagaggagacagataaacttgaacgcaacaaagaggactcaagagagacatgccatggaaatgcacggagatggtataggcagcgacgggccgtccacaaacccatggtcaagcgtagccctcaaatccatcctagacgaaactcaccagaacctacagaggcaaaactagtctcggactaaaaccagtccacaaacaaagtaaccacctttggcttgggaaatggaaagaggaagcttgcaagcagctagagaagccagctctaacaaccagccacaacacaaagcaccaaaaagagaccaacttccccggtgcaaactaaaagagaggatcagaatcgccggagctgagacctcagcactacaagctacacctaaaacagcaacacacaaacagagcctccaaacaaaccggagtaatgcgaggagacagggacacaaacgacttccaaaactaagcgggagtaaagcgcacagatcgcagaatctctagatccgaaacgctaactcgtcaaatcgccgacgagaaggaagccaaaccactgagtggagccactggggggcctctcccggtcacggcgaagagcaccgatgaccggagaaacaaaggcggcgtagatctaggttttgcgaaaggtaaagggttgaaggaaaagtcgtccgcgagtggatgccacgcacgtcgacttcttcttttgatgatattagctaactatattggaagtatagaacctataaagaatatttctcgaatgtaatttaacagttaagggttaattagttaaaattagaattcaaagagtgagaagtttcgaatagttgcggtggttaggacggacaaatccttttacgatttaaaccgttttttgtttaccattcataagctataatccgtagtagtatggattgagaaaatagaacaagtctgcatcggactaactatgtactgcttttacatataaaaaaacttggtctgtggttgtttgttgtctgcttcaaaaataaagtgatatgtttcgttagcggtttagttcacttttttcattgcattcattcaaaacctaaaacataaactgtgaaacgcataaagtttttattcgtgaaattttttggtcattctgatgataaatttggtcgaatcatcattaaatatatcatttaaacgtcattaaattaacgatgaattaactaagtgtttaccaactaattatcaacgataattttatcagtatatcataaatttgttatgtatacgttaccatttcgagtttaaatggtgataatagtcgagatggacatattcatcaacggtttagtatgttctatttttactgcagacaataaactgtcgcgtcgcagaccaactctatttgtatgttaaagcggttcgtagctagttcacaacaaactttttaagaaaaaaatctctgcttacaatacacaatttataaatagtaaataaaaattcagctcagtctacaaagagatttgacggcattaaccgctgcaaccattaggggatattcaactttgacagtttcggaggatgtacgtctcctagaaaataagaaattaattattttaatcgttaaaagaaattactttaatcatgaaccatgcaagtgaagttcctttttttttccttttgcgagcaaactcgtaataaaatataaagttaaaatagttaaccaccacacacacaatgacacgaagacacccaataacgtagagactgtcccgacccgatattcaatatatttctgaatgctcacatagtcacataatctttaataattgtaatcagtgggacattgattctctaaccacttcttcggcgatgaatttttctagactaaacgagtaactagttaatagtaaaatttagagtaattggctgcactgcacccatggccatcatgagtcacctaaattacattaaattgaatgtatctctctttcttcatcttcttcaacgcttcattccacactcgtagattttcttgactcttgtatcaattcagattaagaaaaaggtacatttctttggtagatgttatgactgctcataaatttataaaaacgaacagaaatagttttaaaaaaaaaagaaatattataatctaagtgaaaacatgattgaaaacaaatgatagtatgttacacaatttctcgttcatatattatctttttaaaacaaaccaaaaacttgcacagtagtttaatgaataatcactaataaattcatatactattattatatactccctttttatagaccacaaaaatgctatgattcatgattcattctagaacgtgattgtgatatgtgacaatgagcgagtcatactagtcaactactcgaaacttgtgtatcaaacatgaggacgagagatcgtctggtggagggaaaataactaaattattgacaatttggtcctctagggacactcacatcaaaccaataggtcaatatttttccacgtgtacaaccagtttaatgacaatttcataatatccatttgctttaaataacaatcattcctatataaacctaaatcttgaacacaagagagacaaagaaagagtaaagatgtgtagagggtttgagaaagaagaagagagaagaagcgacaatggaggatgccaaagactatgcacggagagtcacaaagctccggtaagctgtgagctttgcggcgagaacgccaccgtgtattgtgaggcagacgcagctttcctttgtaggaaatgcgatcgatgggtccattctgctaattttctagctcggagacatctccggcgcgtgatctgcacgacctgtcggaagctaactcgtcgatgtcttgtcggtgataattttaatgttgttttaccggagataaggatgatagcaaggattgaagaacatagtagtgatcacaaaattccctttgtgtttctctgattttatgttttgtttttcgcgtaattaagattaaatattggtagggttttttctctggaaatgttctaagaatgtatattttcattctaaagcttaaaagtaatatatgaacacctagaaaacatattgatttaatagtaaaataatgcggtcccaatagtaagctataagaaatcaagaacaaatcttcctatggcaaacataatctgcctttattctttggctttatttttcttaactaggaaaacaatacaacgttacaaattacaatcaagtgaaatggaaggtggagagtggtccaaaacacaaagaagatatatttttctatgattaacatgtaattgagattaaggagctataagtaggaaagagtcaacgactcttgttttgttttttggtttctgattttgtctgatcgtctcgtagctgtatgcctaattaatgcctgtatgaccggtaggttttgtggttgcatcaaaaaacagtggaaattctctagtaaaaagagcaactttcagttttttttttttttaatctccattttggaatcacctttgcgatgattttaagtctttgtagtttgatcttgtatactttctcaagaagagaattttatgttttttttttgttacttctccgacaagaaactgttaatcccgtggatggagtcagattattctttagttccgcagtgaagattcactagttcacatcaccagtgacggatcatactcaaaagtttctccagattttacaaatctccctttgacccgttttctcgtatcagctctggctttgcgtgatgcatatcttatttgcttcccaaacctagaagaaattggtaccacaaatatcaatgagattatgttttaaaagcatgataatgactctgattatgtgtctcaaaaacttacatgcgctttgatttcttttgtttgtatctctttttagcctcatcccttaattttggattaaaactaacttcaacattcgattcccatggcgaatctcctatgagaaaccctggtgaaattccgcaatcttggtaatcagtcgcattgctttctcctgtgaggttagacatcgaaagtgacatgttcggtacaacgttcccggataaagtaggaagcagtaatgaaggaaggccaatgttattctcttccttaaaagaatcctcgtactcgtaacatttggtattgtcaagtgatgaacatccgattatatcattgcttgcgttgaaattcaacggcgcatcatctaagtttatcccttcgcatagatccaaaccagaacattcctgcatatagaacggaatataaatgaaaaacattcttctttatcataaatgaaacattttgatatattacttaaacaacacgtcacctcttctatcacttttggaagattagattccataggaaagaaagaagaatagtctttaaggttctgagtttgtgtaaccacggaagttgatgaaccattccaatcgtctaattcctggagcagggtatcagaaaatggagagaccaaacttgtgacagaaggttctaaagttgaagaccagatcttgccgaaatctgatggagaaggacaatcagagtaagggttcagactctgaagtctgtgtcctaaaccagtgcagttactagcggtccactgacatccttggcaaagagaaacattttcgttcatacagtgtactgccgtgggttgtaaggaacatttctcgcagagtagagatcgcgtgtgtctttgagacagaggattcgctgagtgtacattaacgtcacagtttaaacaaagtttagccgaatcagatttgcagtagattaatgctttttcggttccacaaaagtcacatcgagcctccatacttcttcgaagacaaaactccaaagaaataacgatttctcaatcccaatcgctacacacacctaaaatcctatagcatagaaggatcgtgagacaaaaacagaacattcagagatcaaacaaaattacgattcattataggttcatgtatctttttaatgtgtgactgtgactgtgactaatacatggttgtgtttgaatgttagagaaacactcacaaactaagaaaatgtggattctcgagaccgaatcagtactaaaatcacaatgtctagaaactcataaccagttaattacagagttttttctaaacaagagtataacaataatcgtgtaaaattgtttatgtttcagggttccagagattagaagctttacaagggtgtgtgagagtccagtgagaaggagatgagaaagaacagagaagaaaaggttttgctctgtttttatcctgtgtggggtccaccttgttaagcgggtttgccacgcggggtatcttttgtcacgtgtggttttattgttccttagattttgttgatgtcataatgtggttgaccatacaattcggagtttttgtttgattctttaggtactttctgtggctcgcaagaatttcgagaattgttaataaaaaaacgtgtaaatgtcattaattttgaacacgtttttcttgttattcaaaacatccgagtaataagactagttcgaagcaatttattccgagtgttggtttaatggatctaggagtttgcagcatactagtccggtttcattaacctgtggttatggatagttattgtatctatttctcactaattttactaagtgtgttttcacaacttaaaatatgagatgttagaagcacttaaatgattgaaattctagtgagcgatcatgttttaagagagaaaactttgtgacaacgattgatattcgtttacgattttttaccagcctcagtaaaaaggctaaatgtactatttttgaaacatctcccaatgcattccatgccaaaaaaggctaaatgtacttgtaaacaattcaacagacagtaactgctggcattagctgaaaaggtcgctcatggcatgaccagtctggttgtcattgtttgtttgccaaaagatttcattagatgtccaaaaagcagctcattcgaccaaacaattgtttcctgataagtcaattgttttgttaatcaattctataggaacgctaaatccattattcgtccaaaaatcagctcatagttttcaattgttttgttaaccacttattttgcaaaagtagtgaagaaaacataacatttaaacacaccaattgttttcataaagcccttccaccaactgaaaatcaaagaataactagctaatctcttccggtattaaaaaagaggaaaaacaaaaccaattgatataatgtgcgaggcatttccaggatcaaaaggcatggaaaaaagcaaaaagatcaggatataccacaaccaatatagcgtcacaagccattatacctgaaggaactgtttttatccttcagaattggtaatggacgccaatacaaaaacaaaaaacactaaaactctttcttcaatagggcaaaatttttgataaaaaatgctcagtggaaggagaagtcgttttaaaggagagctcacggtaaacccactgctcttctcacactcttcgtgctttcatctcatcattgcatcatcatcatcaaacccataacagtaatccaacaaaacaaaacaaaaaacattgaaagaacaaataagcttcagtgtgtgtaacaaattcagttcattgattcaaaaacctcactgaaatccgctaagataattgtttttatcatcatcagctttataacccaaaacaagtacatacaaacatcaatcaaacctattaacaataatccaactaaacaaaagccaaacattaaaaaaaaaaaaaagcctcagtgtgtgtaacaaattcagatcattgattgaaaaacctcactgaaatccgctaagataattgttttctatcatcataagcttataagtggaaaaacatcaaccaacaaaaaaaaacaataacagagaaatttgtcttcaaaccaatcaaaagataagattttgggtgaaaggggaattaatactcagacagccaagggttaatcttcaacttctgggagaagaatcccagatctgaaactctagtccacaatactcttgtatcatcaccatattcaaccccttccacatcccataaaactaagacatcacaaatctctttcacaaaaaccttaaatatcaccaatttcaacatatatacacaaacgaaaatagtcacagacctaaccctaaaatcacctaacatatcattcagacatgaaaagaaagagagttcctatgatttgcattagacgaaaccttataaatacacagacacagcagacaattagggtttacttcggtcggcggctaccatatctattttaggttctcggcccaattatactaaatgggccagctttcgtgacccaacaaacaacttacatttattttactttattaacacattcactttacaaacccaatcaacgaaaagtccaaaaacgtaaaaacagaaatgaagaagattgagctcgtgttcataccttcgccgggaatcggccatctccggccaaccgtgaagctagcaaagcaactcatcggaagcgaagaacattttttcaatcaccgtaatcatcatcccttctagaaacgacgccggtgatgcaaccgcctatatcgcatccctcgttgcagagtctcaagatcgcctccgctacgaacccatctccgtcgaaaaacaaccaccaaccgcaaatcttgagccgtctcaagtctacatcgagaaacaaaaaccacaagtgagagacaccgtctccagaatcatcaatccaacaagaaaactcgccggattcgtggtggacatgttctgttcttcaatgatcgatatagctaacgaatttggagttccttgttatatgatctacacatcaaacgctacgtttttgggaatcacacttcacgttcaagaaatgtacgacgacaaaaagtatgacgtcagcgatttggatgagtcagtcaacgaattggagtttccttgtttgactcgtccttatccagtgaagtgccttcctcatatccttagttcaaaagattggttacctttttttgcagctcaaggtaggtctttccggaagatgaaaggtattttggtaaatacagttgctgagcttgagcctcacgctttgaagatgtttaacaatgttgatcttcctcaagcttatcctgttggaccagtgttgcatcttgataacggcgatgacgacgatgaaaagagattggaggttttgcggtggcttgatgatcaaccgcctaaatctgttttgtttctctgttttggaagtatgggaggtttcactgaggaacaaactagagaggtagctgtggcgttaaaccgaagtggtcaccggtttctttggtctctccgtcgtgcatcgccgaatataatgatggaacgtcccggagattataagaatcttgaggaggttttaccggacgggttcttggaacggactttggatagagggaaagtgattggatgggctccacaagtggcggtgttagagaagccggcgataggagggtttgttactcattgtgggtggaactctatgttagagagcttgtggtttggtgttccgatggtgacgtggccgctttacgcggagcagaaggttaacgcgtttgagatggtggaggagctgggattggcggtggagatacgtaagtgcattagtggagatttgttgttgatcggagagatggagatagtgacggcggaggatatagagagagctataaggtgtgtgatggagcaggatagtgatgtaaggagtcgagtgaaggagatggcggagaagtgtcacgtggcgttgatggacggtggatcttccaagacggctttgcaaaagtttattcaagacgtgatagagaatgttgcttaaattggatagagagactcgcatggaattccagactcgcatgttgagagttcactatgagatcgatgactcaggtccatgtgttattatgtatgttatgtcgttttcgtttttctttttttgttggaatttgtatacgttgtgtacttgtgtttgtgtgtctttttaaaatgtttacgtaataaaatgtgatacagaaattttgtttcacaaaaaacatcggattctcagcacaaaaaagaaacatcagattcttttattcaaattcatttggttacaaaatttgactatataattcgttagtttattaatatttatcaaacaaaaaaagattaatcattagagcatccacattcgtcatttttttggatgtctttaaatataaacttagtaaaaaatataaaacaaattaagagtgtctttaatttttgatttgtgtttttaggaagacatttgagacaccagaggagatgtctttgattttaatattaatctatactaaagacacatatcaaaagctatgcaacgaggatgctcttaagctttattgtggattgcttttacagcatttagaattaggatgatggatttgactttgctaatctttattgtgaattgctattacaaatgtgaataggaataataattgttataattttaagaaccaaacccatatggctatagtagactaaaagcattattattagttgtctcttatattagttcttaggataagaatatctcattttaactcttatataagagataaaatgataaaatgtctcttatataagagttaaaatgagtataagagataaaatgataaaatatctcttatataagagttaaaatgataaaataactacttttcagtagattggtaaactggttaaaaaaaaaaaaaaaaaaaatcaatagatggttagtcatggtccattaattcagatcaataggagtataaattcgtcaaactttgttcataccaaaaccagaattgcatatagagttcaacaacataagcttgatggttgctgtgtttcaaatcattcacagttatgttttctagctcaaatttaaattgtttttgagcaataatttgaagctgagggttgactatataagatatcggtgactcagttaccaagtgtttatgtagttacatttgtagaatttggcacatcaaaaggtttattctgtatctgctactagttctattctatattccgttgtgtggacggatgacaaacttttgtactacaaaaaagaaaacatttttctattttaagtatttgttatggtttctaccattgttaacaaattctattgatatttaacacaaaaaaaaaaaaaaaaaaaaaactctattgatacaagtttttatttttggttacatgtgtttgttagacgcaccacaccatcgtactttttttttttttcttcacaccatcgtacttattatcactttatgacacaaattcaagaaacgcgacatacattacatcaactaaagaacttacacatagacatagtttgaccccaagaaaaacacacatacacctatcgtagtattatgggacaaattcatgaaattttgtgacatgacatacataaacagtcactcgtatctcagagtcaacctgtgattttccatcttcctaccatcagacaacattctctgtcacgtcttgaataaacttttgcaaagccacctgcgaggatccaccgtccatcgacgccacgtgacacttctcagccatctccttcactctattcctaacctcactatcattctccatcacacacctgaccgctctctctatatccaccgtcgtgactatctccatccctccgaccaacatatctcctctaaagaacttccgtatctgaaccgccaatcccaactcctccaccatcgcaaaggcgcttatcttctgctctgcgtaaagcggccacgtcaccactgttaaacattttcaaagcatgaggttcaagctcagcaactgtatttaccaatatacctttcatctttcgaaaacatctagcttgagctagaaagaaagctaaccaatccttggaagtgaagaaatcaggaagacatttcacagggtaaggacgagtcaaaaatggaaactccaactcgttgaccgagtcttccaactcgcttacgtcatacttcttctcgtcgaacattcgttgaatatgaagtgtgattcccaaacacgtagcgtttgatgtgtataccatataacacggaactccaaattcgttaactacatcgatcatcgatgaacagaacatgtccaccacgaatccggctactcgcggcgagtcaactcctgttgaatggaagattctcgcgacaacatctctaacttgaggcttttgtttctcgatgtagacttgagttggctcttgatagtcggttggttgatttgcgacggagatggcttcgtagttgagacgatcttgagatgcggtcgtgagagatgctatataggtggtttcaacgtcgtcgtcgctaatggaagggtaagggatgatgattacggtgatccaaaggcggtcatcgctgcggacgagtcgctttgctaactcaacggttgacctgagatgacctattccaggcgatggtatgaacacaagctgaattttcatttgttagtatactcttctttggacttttgatcgatgtggttagccagaagtagtaaaagtcgaaggtatattttatagtttacaaagataacaaccaattaacaactacatagtatccatgcaagttgttcgtttaggacaaaatccgttaataaattacaaaaataataattatgacacgattaattgttggttttagtctggaaaaaatatgttaaattaagttcaaaggagtatggaattctttaacgaattttacttgcttagatcaagtgatcaaccgaagaaatttttcctttgtcctctaattagtatgaagataaaccgtacaaaactcttttacgtgagagcatcatcatacgccacaatgtatctgccccaatagtttttagttttttaaattttaggtttttaaattaccatactatcctcttataataaaaaaaagggttaagttgcaaactactcacttttttaaacttaattagaaaagtagtcactttactattcataatttgcaaaatagtcaccttttactgtttgattcgtacacttcgatagtacaccacttttagtgtacatatgtatataaaaaatacacagcgtacactttacatttgtacactaaaaatgatgtacaatccaagtatacgaatcaaacagtgaaaagtgaatactttgcaaattatgaataataaaatgactactttcctaattaagtttgaaaaattgactattttactaacacaccctaaaaaaaatccagtttggttattcaccaaattaatcctctattttctttattttattgtagttagatacgttttcttttatttggtttgtatgttttagcaaaaaactgaccttgccatatgacatcctctaaagtcatagattttaaatcctagttatgcaatatcaatagaattaagataaattcctatcaataacgaatacggcatggtggtgatggtacccaaaatgtcaagttaaggcacgacgaaaaagtatattaaaatgcacgaaaatacttttaaaagataacattttcaagcaaaggagaaaaaaatgtagttttccctaattcacgaaattactttcaaatataaaatgcgtcgaaacattttaaacaactgaagggtctttttcaaacacataatcatttataagcataaaaatcaacattctagaaattctttattaagaagaaatgaacatataaatgcacgcatttcatataattctttattttattcaaaataatacaaaatatataacccacgaaaagcatggggcaattttctatagtatataagtatactatacctttactttcactaactccgactattcattcacgaaaagtcagaacccaaaaacagaaaatgaagattgagcttgtgttcatacctttgccggggattggtcatctcaggccaaccgtgaagctagcgaagcaactcataggcagcgaaaaccgtctttcgatcaccataatcatcatcccttcaagatttgacgccggtgatgcatccgcctgtatcgcatctctcaccacgttgtctcaagatgatcgcctccattacgaatccatatccgtcgcaaaacaaccaccaacctccgacccggatcctgttccggctcaagtgtacatagagaaacaaaagacgaaagtgagagatgcagtcgcggcgagaatcgtcgatccaacaagaaagctcgcgggattcgtggtggacatgttctgttcctcgatgatcgatgtagctaacgagtttggagttccgtgttatatggtatacacatcgaacgctacgtttttaggaaccatgcttcacgttcaacaaatgtacgatcaaaagaagtatgacgtcagcgagttagaaaactcggtcaccgagttggagtttccgtctctgactcgtccttatccagtgaagtgtcttcctcatatcctcacttcaaaggagtggttacctctctctctagctcaagctaggtgtttccggaagatgaagggtattttggtaaatacagttgctgagcttgaacctcacgctttgaaaatgttcaatattaatggtgacgatcttcctcaagtttatcctgttggaccagtgttgcatctcgaaaacggcaatgacgatgatgagaagcaatcggaaattttgcggtggctcgacgagcaaccgtctaaatctgttgtgtttctctgctttgggagcttgggaggtttcactgaagaacaaacaagagaaaccgctgtggccctagatagaagcggtcagcggtttctttggtgtcttcgtcacgcatcgccaaatataaaaacagatcgtcccagagattacacgaatcttgaggaggttttaccggaggggttcttggaacggactttggatagagggaaagtgattggatgggcaccacaagtggcggtactagagaagccggcgataggagggtttgtcactcactgcggttggaactctattttagagagcttgtggttcggtgttccaatggtgacgtggccgctatacgcggaacagaaggttaacgcgtttgagatggttgaggagctgggtttggcggtggagatacggaagtacttaaaaggagatttgttcgccggagagatggagacggttaccgcggaggatatagagagagccattaggcgtgtgatggagcaagacagtgacgttaggaacaacgtgaaagagatggcggagaagtgccacttcgcgttaatggacggtggatcttcgaaggcggctttggaaaagtttattcaagacgtgatagagaatatggattaaattggatagagagaatagcatgttgactatgactctatgagatacgatgactcagatccaaatgttactttgtatattatgtacgatatgtcaaaagaaaaatgtttgtttttcatttggtataagactttttgttcaaagtttaaattcaaaaaagtatgtacaagttaaaccaactgttagaacaaagacgcacaaataatgaagaaaaaggaaaactaaacttgacaaacaaggtataacaattaacatgcatatgtatacacaacaagattacaagaagatataaatcttaaaaaagaaatgaaacaaggaataaaattaaagatttcaattcgaaatcacgtgaaaagatcgaatttcaaaaatttcaattcgaaatcacgtgaaatcacgtatcaagtaccaagaaataatcagggatattgcagattgcttttggtttaaggaaagaacctaccaattaatgcactatggacaaactttagcatacaaatataaatgatgtcccaagtttatatagtcttctgtttttatataagtgatgatgtttaagtatttgacacacgggtggtgaagttccagagacacaaacatcgagtgatatttttatcattcatagcccttgataattttctgctaatccttggcggagccaaagtttttactttcttcagacggcatagaggacaaacaaggtggatggttaatcataatgtttcaaagtttttggaaatatgttttttttttccttatagtttaaacttttaatttatagctttaagttagattcatatattaaaagaaacaaaaatagtgagtaaaaagaaaaaataaacttgacaaaggaaatatagcatgtacgacgcatgaggaaaaaaacaatcttaaattaaatgaaacaacaaacacaccttattcgttaccaatggacaatgaggactagaattgaagatttcaattcaaaattacataaaaatatccagagaaataaagaagcaacaaacacaccttattggttaccaatggacaatgaacaaacattagcctagggtcggaccctaccgttatatactattttcccacacagaaaaatacaaataaaactgtcaaaaaggcagctttagaaagagtagacaatgggatgctatattttccatgctcaaacaaaccctttagaaatggaaggaataacataaccaccaagatacatccacaagcctctgccaaacccgagccacctcctccatgactacaacttgaccgttgtagacgaaccaaataaccagctagagcggcaagattcaccaacataataaatgtgccgggtatgaaaagacccgagctatcaaattcaaatttacctaaatttaattttggaacatcatcttctccttgagatggtttagactcatatactgacttggtctcgggtattgtctttttagcgattacaaacccgatttgcgagattccaagaagcttgagtatgatatcttggatgctaaataaccaactgctagtggctataattctccaaagtgattgaacgacataccacgattgtactgaaaaaccaaggctcatgaattgccaaagactgtagagacagtgcatccccacaagtgtgactattgtacatagacaaggtccctaattccatacacacacaaaaagaagaaaatattaaactttttcttctaaataattcaatgaaattaactgaactatattcagagagagaaagacaccttgggaaacaaggcagagtcgtggagtaggcaataagcaggcaagaggcaataaataagctcagggattgaccttaaacacatgagggcccaaaaataagctaatcgttgacggaattttattttcccgtggaacattcccatgaacgggctttgtttgttaaaaaggacttcgattgctcccgtcgcccatcgccgctgctggactatagcctctaatcctaacgtcggcgtggatccaataaacgcaggtggatccggagaaatgaatgagctagtccatcccctcaaatggattccaacactcgtgtttatatcttctgccactgaatcgtacatccaaccgagctgcaggatttgcattattatgggtaaaggttaatagattcttgtaaacaacacgataatattgtgtaaactgttaagaaggtaatttacgttgccccaactggtttggtactcgtaatgacaatgccccacttcttgagccgcttcaatgaggtttgcaagacttttttgggggtttgattttctttgcaatgcatccaccaccgatttcaccaattctttagaatttccatattttctcactaaactatcctcagccaaaaactcccctgaatcaaataacaacaactactgtgaataatttgatatatgaataatgaaataactaagcagatagtagaaaaagttgttagacgaataatagaacatatataggaacgttaactagaataatgtaaatatcagagggatccctagtataatttaacatatcttaaaaaattacgtcgttttgaataccttacgaaaaagaccacaaactcatgaaactgtggtgatgtattgtcagtaatgtgaagggtttaactcccttattttgtaatttaatttattctctaaagatgtaaaactttaaacgctcttgaatacatatattggggctcttaaaacaaaagtcggagtggttttagcagaaacgataacaatattttaataatgttgcaaagtaattaatgaaaatatcttatgaatttctaatacttacttgtagcaacttgagaaatatttccgttgtcttctaaatcgtccgaagataaaccatacataactcttctagtgtggaagcatcctgttccaatataaaatggtccttggattccagcaactcctcgtcccaaaatctaagtttgaaaaaaaaaagagatcaaaattctgatcaataattaacactgaatttgtgcagaaaaaaaaactaacattgaattgatcgaagagaaggagaaaactcaccgattgtaagacggcgagttcgttggtgtaagaatcatagaacttttgagggaattgaacaaaagcacaatggtttgagttcttcgagttttgtaaaaatacacacattgcttgtcgcaccacatctggttcattagcatacatgtcacagtctacgttcaacgtgtatggtgcatttgtcatcaaccctgagactcttaactgttcaaaatttatttaaggctcatcagatttttatcattataccagaaaaaaaaaatctacaaccattgatacttaatacttttaaagacataaataatggatatcattcaaaatttgattgctatactgttattaggaaatactgataggtatagtagtatcttttactattttacttcaatgaaaagacagcttatatatgtactgtacttacttaaataaaaaaaaaaagatgtgtgagataacttattaaccagaaagttcatggctccagttttgtaatgatgaaggtaatttggtcttttctctcttgaaatgtatacaagatgagggacttctttctcgtctcctacacctcccttgttctcccataccaccttcatatacacacataagacaagattccatgcaattgttactattataagttttaatatgtacataactttggaaaattgtacaaataccctgactgtagtttttaaaaacaattttagtaataccttaacaatagttgaatgatcatttggttttgtgtttgagaaagcttcaaaatcatcgtctgcatccaaccaatgggaatctcctgtggcatcttcaactttccggcataacttcacgtactccctcttcatattaatacaaaaataaacataataaaaaaccttataaatctgaaaaaacaaaatggaaagcaagatactgtataacttttgttttctagtaaaaccggaaattagaaacaaatggaaaaaagaaaaaatgaccttcggttttggaaaacaaattcaaacgtcaactaaataatcaaactcattaccttcatcattttccaatctttgctgaatactgaatcatctgttgcaaccaaagggtttaagaaatatctaaaaggagctctaactctaacgttgtatttcttgcagaagggagcccaaattttaacgaacttagaagcttccttgagagaaaagtaagtgagaggagaacatccatcgtccgacacataacacgctagtttattcgctggataattcacagctaatagcgaaagcacagtgttcacagtgataatcggtgactctctaaccgtatctgccgtgggcacgaacatatctaatgaaggaaggtcatgaaccctgaaattaaaagcttgtaggcgagttaaaaattaaatggaaagctaggtaggagctactttagattattactagattttaacccgcggtataccgccgagacaatttacttttttaaattaatatatataaaagtttgcaaattatatttatctataaaatatttttattttctagtttacaattgttattaagtaaagtcctttcaaacccgtcttgccaaacccgtcccgtaaaaaaacctgaagtacaccgataatttaaatatataattaaaataaatattttacgggattgcaattgtattttagtttgtcaaacaaatttttgttttaaatagttgccaaaaataagatttagtgaattgataagaaatgtatttagatgcgttttgctcattttaagggattgcaattgtattttggtttgtcaaacattttttgttttaaatagttgtcaaaatctagttcaaattttggaaaaacctgcgtgatatatgggattggaagatatttagaatgtttttcgtttgttaatcaatttcttgccaaaaaaaccattaattaaaagccaatgacaaccattgtaaataagtttgaactccagaatttatttcacaaaatagctgcaaaaatgtatatatagatagaaattgaattagaattttcatatatactagaaaatctataaaccattattcggtaataattattttccggtcttgatttgttgtagttaactttttttttatatgagataagaagttaacatttaaaaaaaaaacattatgtaatgatattgtaattatgtaattctttacaaatatgtgtactttaagaaatttattaaaaattgtaatataatttattttctcttaaaattaattacctttaaaacttttcattgtgttgtgttctcgaattaatgcatagtacaatcatccttaacattgtaataaatttaagaaaataacactaatttctttgaatctcttgatttaataaatatcattttaacaaagataatctcataagatattcacatttatttaattgcaatagttgaaatcattaatcataatcttaaatttactactgttgttcccacaagtaaactcatttaagttccttaatatcaattgttactcccgaacgaatttttgctttataaataaaatctatttcagatcgctaaacataatttttccaagacgagaacgtaaagttcaaagcatctaagtcattgatattattggatcaaattatcaggatcattaatttataaatgtgttaatgtattagttaattatgtgcatataaaagtggtacctttcattaagtgtatttatatagggtatatcttcagcaggactccattttaggcaggtaaaaatcagccataccaatgagaaacaagattcacagaagaaagccaagagccaaacgttgtcgttttcgcttatatgtaggattcgatacaagaggagagaatagagaaggccgagaatcgtgagatctacagctcttaaaacgtagcttttgtgtgagatcctttcgcaaagaggatggagagatgaacttgaatctgccattgaatcagctcttaatcggtgtttggatatgaatgtacgtatatataatgtgtagttgttgtgtatacgtactagtgggctgacaaagtatagatatatatacacaatagtattgagtgattgaataatgagtcgggtacattttgactaattttacaaataatgtatgattgaaatagttctttaacgaagtaaaatattactatttctacatcattgcgtataatctggaagattctatgaatctctacatcattgcaatggaacttaccttatcgaaaggatcactttctaatgtataagtattacgggtttcaatgacctcagcagctgtcggctagaaacatgcatgttatatgtacgatgggagggtttcgattttcatttatagattatatgcataaacgaccaaaacgatatttcagtggatcaacagcaaggtgaaatcttaagactaataatatgcatccaatctcttggttttgttaatttagcgacaaagtataataattattattttttttagtaaagaagagtaatggatttttaatagaagtaattaattatttagttagtcagacctatgataaggtggttaggttagttacgatttcattaaaattcggtggttaaattagttagcttttgcaaataataaaattaagtggttagagtatatatgagttgtaatctagaattggttattttttttataaatttagtttgattagaattagttgctttaattattaaggcttcacaattaatattttgtttatatattctaacctaattaataatgttatgttttattctagaaatgattgtttatctatatgtcttctcaaagtaatattgtcacatgctacattgacctagagaccccaaagagtcatggatttgcacataaatctcaagaatcaaaactttccataaacggccgaatttcaccttaaagacctcaatggtttgttcaattatgcattgtaacattatttagattttttgaacgtttgcactcaacttataaaagttgatttctagtctcattctgaaagaatccttgatcaaattaaagtaatagaaacattttttcttgtcaaagttcgagtcttcgtcatttaattcattagtcttaagtgagtgatctctacttaggcctattggaatatgcatattaagtttgttgattgattcaatatctttcattcgttcattgatcgagtgagttgattataccattgattgagcgagtaaatcaaccatctatacatcaattcccttaaattgatctcacatgagagaaacgtccaccaacgtgttagatctccaccttcattgttccaccttctgtgggcaagcttggaatctcgtcatcaattgatctaaaactggagcgattccagctcacacatgaaactaaattggcacaaaaatctgtagattattccttgtgtaatgataaatttggaaagaagtttatcccttgtgtaagattttcaaagattctagggtaggtattttcgggcagtataagtattctaaggagttcatatgtcgccgttaacatttagaagactcttgtgagatttgtaaatttgaagctttaatttccaaacaataacctaagaaggtgagtgtttgcaatatttttgtgtgtgtgtgtttcacgtgcttttggggaggagtttttgtgtgtgtttacctgcatttttatttcttgttttgggaatgtcaaagcagatggattggctcgtacgtagtccaagatggttatgttgttttctcttttgtacgatatactagattttaatccgcggtatatcgtgggacgatatattttttaaaagtaatatatattaaatttgcaaattttatttttataaaatatttatattttacagtttataattgttattaagtaacggtataccacgaatccatgagataattgttaaaaaactgaagttttaacccctattaaaacaacatattaataatattttaaaattttataaatattgattcaaatacatccactatataacccaattccaaaatagaactcgttctgtaatttttttaccgtcccgtgattttttttaaaaatagtaatttttaacatttaagaataattttttatatagaaaagttttgcaaattgtatcattctctaatatatttatatctatagtttaattttatatatagtaacattatacataccacataacatttttggttttatataatcttttctaaattaggatgatttgatatgtttaatattagtggtcttaaaaaataataaattaaagatttaacccgtattgaaacggtggattaattatattttacttttttattaatgttgattcaaaaacccgtccctccaaatccgtcttgccaaaaagctatttattttgttaatattaattttattaatgatatgactctgaattagaatctaaacattttagctaataacataggagtgcaccatatttatttaataggagaatgtaccatatgacccgaatgcacttttatccaaatccaccaaaaaagtcttgcaaaaatactatagagataagaaacgatagtcggttttgatagatataagattagcaaatatattagttagcttaaattagttaaagaatacaaattgaaaaagtatattacactttattcgaatatagtatcaaaacttatataacacagagatttgataattttttaattgatgaatactttttttgtgctaatttttatgtgattaatatttaattgatttcgtatataaaatattaaattgacttatttgtttataatttggtaacagatagatatttgaatattcaatatattttgcttcagtttaaaaaatctttgatgatccgtctttagatccaataagccctataatctagatattaacctgcagtatatattttagttaaactaaaatttttttattgtaaagatgatttaaaaatatttgatattattttatttgattttaaatgtatagtaaactgtgagttgtatatgttttgttgatattatctatattgtttagtgtttaagattatacacttgtagtttgattgttaatttaagagtttcacctgtagtataccattttgtattaatatcgatctaaacatgcaattctaggatttccaacttgtataaaaaaattgaatcacatctaatatgttattaattattgtagtatataagattataaattttcaatataatatgtatgaaattgaatataaatatttcaaattatgactcgttactcagtagaaagttttcttaaatctatttgttacccgttataatatttttttatgtattgaacagtttatatttgtttttaaaaattcaaattatggcatatgggaaaaactctaattatttttttataatgatgatattatttttccgcaaaaatagaatcatataaagatgagaagtgaactataataattaataaaaaattaatatgataatttagatatcaaatataatttgttgattttaattggttacttttttggaaattaataatgtatttcgtttttctaattaaattaaattaattaaaatttagatatcaaatcttatatgttgatttttattgattattatttttggaaattaataatgtatttcgttttttaattaaatttaattaattaaattagtatttgactttttaatccttaaagagataaattaatttactctttaaaattttatttctaatggcaaacctatgtaattacttacaaaaattaaggttacatttaaaatgtacttcccaaataatatagtaggatattttccaaattttctaattgaagtatttttttagtgatgtattacaaaaacaaaatgaaatttaactcaagcagtataatttttaaatagccttttatttcatgtgattccaacggtagctaaggggaacactcttcggataatgtgtagagataatataagaaacgaaaagcatactcatcattcgcagcaatcgggacttttatacataactatatattcaaaccgaaataaccttgtatggaatataaccactggaataaccagctcacttatcgacttcagtgtcttctgaaatttgaacatcacacccacctggaaacataagcataaagcttcgaattattgttgtccctgacttcatagaccacctgcatgcaaaacatatgtaagtaagaagaactttgaatgtagtaaaaaaaaagactagagtaaatcacaagtcacaaggtgatatcgatttataaatttgagaacctgtatctaaacaaatgatggataaaaacggccatctgcatcttagcaaactcagcccctacacaaagtctacgacctgcaccgaagggaatgaaagtcttggagacgatcgcgcccaaatcctttccctgaaattttatttaatcaaaagtttataagacatcctatagctttgattagtgtaattggagtgaataagtaaaaggatgaatatgaaattatagtcacctcccagcgccatggattaaatgcgtaagggtcttcgtatttttctgaattgaaatggatatgaggatatcccataaaggtccaaccagctggaattgtataatcaccaacttggaaatcatgttcaagtactctaagaactgttggtgctgtgcttatgattctaagcgactcattgataacctgaaccatatttgtattaaaaactatatatgtcaacatttataataaggaatgagttctctttttgtttatatatatcattttggatagatactaaccatctgagtgaaatgcattgatttgtagtcttcccatgttaggccgccttccttctctgccttaccccgaacaatttcttcatgttctctttgtaactcttgcttgactttagggtggtcgcttataaactttactgtagccgcaagaatccttggtgttgtttcattagcaaccaaaaagaaggtatatatgtactcgaccgcattctctacgctcatcgtttctccttctccttccatttctccaaatatgatgttgaagaactcccctaactcctctcctgatgctctcttcgtcaacactgtcttccttagtaacttcatcatcctctttcttgcctgccacgaaatatcagcctcagtgtattgcacaaaaagcctactcttatataaatgatactatatttaggttacagaaaacccacaccttcatcattttatagacacctgtcccaggaaggttgagaaagaatctaaaccagccactctgaaaatatctccagcagagggcgagttctttcgccgcctctggttccatctcgcccataactttcttcgcaaggcatccaattaaaatctgtaacgtttgattataaatatacttttaagatgatccaatatccaaggttctttatctagttgattgtaacattatattgccaagaggtaaattaaagagaacacgaaacgtatgacttttattttatataccttgcttgatgtttcctttacgtcaaggtagccgttcctagctccttcctccatgtacgtgcgagccaagagatccacgtcttcaatcatccttgattttaaaccttgtggacccaacaactggaacgtcaagttccgaacatgtttatgggactccttgctctgcaaaaacaagttgttctccccaaatagtcgtattacgctcttcgtgacaccagggacggaatttgccttcgccatctcgagattcaattccatatccattgagattatagctttgtctccaaataagcttgtccgaaaaactggtccatgtctattaaaaaatatgacaattgacaaaggaaagacaacgtaattaataaaaaataatttaaacatacatgacaaatgaatgctagagaaatcagcaaaaaacctaaggactctgtctttgatgaatgttgaaaattgaagagcgtcatgaggcttaaagaactcaaaagtctctccaatgaacggaaagcccatagaccctggaggtagttttccattagtttttggatttctccactgatagacccaatgaaatatcttcactaaaaagagtgaaaccatcacagtcaataactcatgaaattctaccattttaatttttttcaacaactttgaagttgtgtgtttaaggggtatacatggttctacgaagaaggcattctatttatactagtgaatatgtgtgttagtcttaggggtgttctctctaaaatatttcatatatgggtaattatttatttaagaaaaatacagttgtctttatgtttaaaagaggcaactaattgaagcaagttgtaaaacagttataaatttatgatgtcaactcagtcaatactatcgccgcagtattttacaaacaactagatataaacacgtgagagcatatacattggtttagaacccttcatagatataacattaaaatatcaatgatttttttctatataatttagtcatttacttaaatttaattaaaaataaaatatgaaccaactaaaagaagactaaaacaagactaagaacattattatcggtagtatcttaggttaatcttagcttagttttgaataagaatttggttaaaagattaaacttttagcaatatgtaattgtgagatcttaacttggagttttaataaaaaaaaaatatttaaaaatacaaaaactttaattttgaaaaccttaataattattacaacttataaaatttaaaacatacatgaaataaaagtttaaacaaacatgacgtaaacataaacgaaaacgattaattacactattgattcttgccaaaacattttcatatatgcttgagcaaatcaaattttaattgttgatgcgcacgtcgatcacaaagtcgagttctatgttgaaactggttaacggtcatatagttcaagtttgctatttaaaaattgtgtgagttcgaattgattaattcaaaaagtcatagggattgagaaaagccacatgaaaatagttgggattgattttggtcgtttttccttactttcacgaccgttttagaattctcatattggtttctggttagggaattaaaatcaaggcttcttacgatgatgtcgtaccaagatggctaccgttcaatcgcaacaagaagccgattccatcaattcgtaaccttcaatagtaagaactcacgatctatacaatgggctgtttttttttgcgtttgtgaaataagtaggagatgaggattgggatttgactgagtagaagatgtttcagtttggtacagattcctttaactggggatagcctccacgtctcgacctacagattagaccgacacacttcttcgatatcatctatgaggttagaactttttcccactcgcataatcttggtaaataagaagaattgctccattgtttttcaccatccagaaaattaaacagaaggcatttccgttccatataggaaaatttatctataacttatttaccatttatgtctttaatatctagatagtaaattgtggtataatggtattaacatgtgcctgtgagcctttggtatcatttttagtcaacaacatgaaaagaccaccactgccgtggcagatgaagatgtagatgtatatctcattgaacaaagtaatatttgcaacattgtcgctgacgatagctcatggattgtagatctggtgattcttttcatgttacccctcatggaagtttcttcacaacttaccaaattagtggtgaattatggcaaatcagggaagaagcaagattgttggaaagagggatatcattcttacatcaaacacatggtgtaagcaagttttgttagatggggtttaggcttaggcgttttattttttatatggttcaaacttattatgtgcaagtcttgacatttagggttgaggaatcacgtggctatttggacttagggatttagcctgaatcctttatcaaaaaagatttgcgggaacaatacaacaagatgtgcagcgtttctatggtcaaaattgagtactctaaggcaagggaatgtagagaagcttgtgggaggactccaagtgttgttcatatcgagataacatccaggatataaaaatttataattatgctaaaaaaaagtttgcatatacattaaattcaaagaaaagaaaaaaatttgcgggaactcctccgaaaagtctgctaaccactggattatctggcttgacgccttgacctggagacccatccaatagaatatgaaaaagttagaaaatcacaatcattgattttaaacagacgcaattgagaatgaagagaaaatggtatgcagaactactatgttactagcgtggctaacggatcaactattttttatcattggagcatctccatcaaaagtatctaagctagatacatttgataaaataatattaaaaaaaataggaaaagtcggagaaagaaggacgacgtgcaatgcgaacatgcacgttattagatacatatttctaatgatagttgcatagtttttttttttttggtaggaatgatagttgcatagtttggttctattattacgcgactctaagctattggcaatttaaaaattgttaaatattgcgaccatattattttaaatagacctccctacccaaatttgtttttattatttaaaaaagaccttcacaaaaaagtataaatttgttttttatatatattacatgagttaacggtggagaaaaaatagacagccacatctatacaaatcatacaagtagatatatatatatatattattattattattattattattattttttaaatcatacaagtatacaacacaaacttttaaatgtccatatcatttgtaccattaaacttttaaatcatacaagtttatgacaaaatcaagttttgtaccattcaaacttttaaacttttaaatcatacaagtatacaacacaaacttttaatgacaaaattttaatcggagaacccgagttgtaccattagacagactaactttcagtttaatgtccatatcatttgctcaattatgtgtttgattccaccaagtcatctatgattgatttacctctaaactctagatagcaaagtgtggtattcactttttaccgtgagtctgtgatatcatcttttgtcaacaaaatgcagcggcccggatattttattcgagatggacttgcgcaaaactcttgccaatagacgtcacgtgctcacccccaaattattcggtttcacgtggacactggagccattataaagttggaaaatctcattcaataattttaagtgacgccaccaggaccggtcatgaatgatgaaataatcggaaatccatacggaaaagtagaaacttattttttatagttatgaaaaggtctatgagatagttaacaaaaaaaaaaaggtgttgagataacttcttcaaacgtgactttgacgcaacccacgttgataaacgaagtcaatggagaatgaagaaaaaggaagtattccagaaagattgcggtgaaaatttataagattattttcaaaaacattattttgcatgacaattttttccgaaaaaataatttttaaatttgtcatttataaaaactaaagatttcagaattatttttttcgtaaaagacatacttcaaaacgaaactatatcctaaaagcctagaacctaataaattcaaaatcatgtatttttttttgtgtttttatattaaaaactgacatttttaaaactttttgaccaaattgtgaaacttataaacacccctcaaataattcccttattatgaaatagtaattgattcatttgaaaatgatcgttacaaaacaacaacaaacaaaaaatatatataactgtatattatatattacacgatctattgatcaaccatatatattttatgacttgaacgtcgactcgactatagagttaactcataaaagaaaagaaaaatgaagaatcgactatatatagagagccataactatgtgaatcatacaagtagaacttttaatctttaaagaagaaaaacaaatgtcagaaatttatgtcttagcattgtctgttgtattctcactcatagtagtgaaactctgccattgggtttaccagtggagtaacccaaaatgtaaaggaaaacttcctccaggatcgatggggtttccgatcatcggagaaactttcgaatttatgacgccatttgacatcagtctagtagtttcaccgtatctgaagaagagaatatccaggtttcttaacttcttagtttttatttttgagttcccttatgctgttattatacatgcactgatcatggttagaagtacaaataaactgtttcatatctaatttctaattttaaaagcatgatttattgtaatatcgtaacttaaaatttctaatttcatatgccatctaaatactaaaaaagcttgatatgttagagtcacttgttttttgattagcattacgtttgactatgaaaatattaatcaaatgtttattgaaaatttgaaatgtctaattattatttcagaattaaaaataattgtcaggatatttgattaattttcatttcgatatatgacttcaatctagctagaggacaaaaagtttcagaaaaaaattatctacgaacttctgtttttattataaatgatatgagtatgtgtttcaataacattgtatggaactttaaataattatttgttatttacaagtaaacaaatctgaatcagatatggttcgaaagtgtttcggacaagtctattcggggcaaaagttattgtctctattgatcccgacgtgaatatggagatagcaaaggcgagttcgcagttgcgtgctacggagagcgtaacgcggatatttggagaaaacaacccgttcctccagagcaaggagattcataaatatgtccggaacttgacttcccgatttgttggtcccgagggtttaaaaacaagattaattcatgacattgacaatttgttacgaaatgatgttgagaacggagcacgaaacggttctttcgacgttagagaggcaacaatcaaggttataaattaactaaaatctaaaacatattttcaatatttttattttttgtttttgtctcaactgcatgattagattataataagatttcatagttggtgatccacaccagttaaaaaagagtttacaaaaaaaaacatcgataaatattagaccaacgaaatgggctaaagtgctaaactgttagccttgtacaggattttagttcgtaatacagtatatatatatgtacaaattaaaaatccgaatcaaagttcattagttcatcacacaagatgtggtatataaagttatatcacattttgttttggttttcaaaaaataccccaaaacgaaacctgaaccctaaatattaaactttacctcctaaaaacaatactttaaaatctaatatagtcaacacaaacctaaaattttaaatttttgacttgaaaaaaaattcttatgtttatagtatttttgaaacaccaaaaatgtttgtgctatttttggaacattatactaatagtgaaagttttgccaaaacaaaaaaaacttgaaaatgtggttttgaggaatttctctaaaagcaagaagaatgagctgtaaacttatgttttctgcgaaattataaaattttatatgctaatataattttcttacagtagtaatagttacatgcaaccattcatcaaaaaccatctaatattaatggttttaacaatatatgttttcctaacgttttaatttgaagatggtgggtgaacttattgcaaagaaaataatgggtgaaacggaatccgaggccgtaaaagaactcgggttatgctggagtgctttccgaaccagttggtttcagttttcttacaacattcctggaacaactgtttatcgactcgtgaaggtgagattcatctacgtgctactaaaatctcatgttatatgattgcaacataaatcactgagcatttatatagtgcatgtgatttttggtaggctcggaggaaggctgcgaagctgctaaaggccttgattctgaagaagaaagcatcaaaagaaggacttggcgatttcttagatataatatttgatgaaatggaaaaggatgggaccgctttagatatagacaaagccgtaaacttaatattcgtcttcttcatactctcccaagagacaactcctggtgttcaaggagcggttgtgaagcttgtagcagaccaccccagcgttatggaagaattgcagagagagcacgaggcgattgttcaaaatcgagctgataaagacactggagtcacatgggaagaatacaaatctatgacatttactcacatggtaagcttttgagtttattactcaatacacatgttgaagaaaaataataatttaaatggccatcatgttttcaggttatcaaagagtctcttcggtttactagtacacaacctacagtgcacagaatacctgatcaggacgttcagattggaggttggtatatattgttaaactacatatactgttttatagttgttatcgttatagatgttatgatgaaccattttgtggagtttagttctgttagacacaatttttaggatttaaactagacctatgactcagccataaccaccagaaacaaagggcatgctagctaggggtttgtcggggtgactcatccctcatcacatgtttagtctaatacgggttgggcaagatctaaccaaactttttccaccgttcaccataacaccttatgactgattagtgtatgtttccacacactaacagaaacatatggagtttgctcatgagtcagtggtttggacagattatacattacctgctgggtggctattttttggcatccctcaagttcactttgatgaagaaaagtatgatgatccacttacctttaatccatggaggtggcaggtaactttgattaatcaagagtattataatacaaacataaagaattagggtaagtctaaacgattatttgtgtggataataatttcagggaaaagatataaacagtacggtatctagggaatacatgccgtttggagctggcgggactcattgtgtagggtcagagtttgctaagcttataattgcaatcttgctgcatcatttgtccagattcaggttaattaatttaaactaagtgtttattaaaccaaattgaaaaaatagattgttacttaaatgatgggaattatttttgtcaggtggtcattggatccaaaaacagaagtacttcgaaggtatacacttgtgttcccggctggatgtgtagtccacatctccaaggaatcggagtgatgatcattgaattttggtttggcattacatttcttgtacaataattaacgattattgactttggtctggcattgccaatacgattgtttttattttatgtaacctactcgtaggtttggtgtgtctttaatttttctctaatttaatccttgtatatgtttctttgtccacgaatctttgttttttttttatcaagcatttgtgtgatttctgtggttctatcattttcttgtcggctaatctcaattttagtttagttaccagaaaactttgaacaaattatggagcacaagtatctgattatattataggatatcttgacctagtctgttcaaactatggagcactctgttcaaaggattggttactttttttttgcagctcaagctaggtctttccggaaaatgttggatattttggtaaatacagttgttgaacttgagcctcacgctttgaagatgttcaataatgatgtcgatcagaagatgttagatctacaatataatgtaatgcacaaaaattttcaaagagattgtagctaagttggttaatcttgtgtcattgacaccccataacccaagttcaaacctacctcatgtaactttttacacggagcagaaagttatcgcgttggagatggtgctcttaggcgtgtgaaatagagcaagacagtgacatcaggaacaaacgttaatggacggtggatcttcgaaggtggtccaattaactagtttatatcaactctggatttgatacaagtttattatataactaatgggataagtaaacataaaatgtaatgaacacaaactgatttacgttgttcgtgtaccaaggtctatatgaaaggaaacccgattttattaagaaactagaaaatatctcacgcgttgcgtgagttatattaatatagtaatgtatacaatattatataactatatatatatatatattacaataaaatttgatgttttgatatttacattaaaaacatttatagtaaatatttattatatcttccaaacataaaatttacgcataatgtatataactcaatataaaaatttaaaaagcacaacgaaaaataataattttttaataaaaatgaaataatataataatatattgtgtgaatatttatttattacaataaaaaatagattaaagaaaaatatgatgtattttgcaagaaagtataaaataaatatcatattactggtaataaaatatatatacttttactcaaaacttaaatctagaatgagatgttatttctggtaatacatgaattttcatcataaaaattatttagtaatattacaattaatatagtaataatttttttattatatagttgttatcatattttgaaaattttaaaaagtttctttactccatgtttatagcaaagaacaatgtcgatatatgtggtaaacattaaaataaaaccaataatatttacacagaaatgaaaactgacaaccatctataattttctttatgagaatataagttatttagtagaaaataatctaaaaatacgtgggattagataataaaccaaaatctatatatgtgaactaaacactgtattaaacttttttttatatgataaaacatttttaaaaattgtatttaatgaaactaaaatccttagcaaaaattatccctgaaagaagaagaaaagatgtgaaaatttagaatacatttggaatacaaaattaccaaatatggaatttagctagataaaaatgaactcaattgaaaagaaaagactgaaaataatttcttaaagactgaaaaataataataataataataattaagtgaaagacatttttttgttaaagatgaggaaacatatacacatatacctatacttgtagcactcacaaaaatgcaatgctaattttccaacgaatcccccaacaaaaattacattggctctgatttaccaatttgtttatcaactcatcaactttaatttcttttatttttagttagtgtcattccttcataatccatctaaaaaggagaaattcattatagttgttaaacgtatacaaccatccttggctaaaaatattaaagatatcctcctctactaacaacttgttttatcacataatatggaaagcatatgatgagaaagaaaaagagagattataaagtataagaaaaaaaaactaacatgtgaaacacattgaatcatgacaaattatggttttctcggttgcaattgtatcaacgccacccgcaaacacaacaacctcaagaatatctaaaacatagttcccgtatatttagctatgaaacattctaaataaaaataattcatatgtttctattgcaataatatcaatcccaccaacaaacttcgacaacttcaaaaaatatagaacatagctcaagaaaccctattaaatttggaaaaaaataccaaaaagattctcgagggcttaacattaagcagtttagataaaaacatatatctattaaaagataagaaataaaagaagtgatctcattttagttattcgatctactctcccagctaaatcatcacttatatatgtagcaagaaaatcacctcacaacaaatttggtctatctatattaatgtggtgattttttttttcatttactttatgatttcttacaaatggtaagatgcatgccacaaacgttttttcaacaattgaggagatacctctctttgagttaagtttaggcaattcaagaccttcttgagatccatcattttcaccaaaaacaatcatagcacctgctcaaacaaaaagtcatatgtaagataataatgatatatacattgaaatggaccgataacaaaactgttaaactaattcagagaaatttatacttcgcatacgattaaacctcataatgtgatgttgggtagaaaaacaaaccgtattgcagcttctctcgctgtaaaaaggttgggcttctatacttgcttttttgaataaactcaaaaaccaccaagaccttgagttatatgcatgtctctatcctcttcacaacatcttacaataggggcaaaaaaagaagaaagaaattgagatccattagttgaatttcaaattagtgttacatagtttataaattatatcacaacttgaaatatgatggttagtataaactcaaagtgtaccttactatttataggaaattataaattaattttgttcttactatgtaataaaagcagatttataacattcacaattatgttttaatgccatttatgaataaataattgattgtattaatatcataagagtaacagttatattttaaagaattttttgtaattagtcttcgtgtaaagacatgtaattgaatgtgggaatgtagttaccagacgttacaaaattataatttttggggctgttttttttgtttgtaatttttaacattcatataattttgtttctaatttctgcaaaaaatcaatgacaaatttggtaaatccagaaactcttttagaatctctctacttttaaattcaacaaactctacacaaattcatctcccagtaagcccccataattgattgtctctatgacacattgaaagataagagttgagtaattggttattgtaacgtttggattaaaacaaaacttaattacatgcagttatttctcataaacaaatatactatgaccgaatcgtctagtaacatgtaacgtggttttgactaattgaatagtccacaagatatagaaccgagtatttgtttcttctaaatggtggattaaaaccaaaacttatttgcatgcttcttttttctgatttttgtttattcatgcatgtgaatttattattctaagtttttaactgcaattgaattctttaatttttccaacataatgtttccaaaaatttaataattgaaataaggaagtttcaactgaaccaaaaagtagaaagtaaaacggtcattaaataaaaatattggacatacgatcttataatgtatatgtttaaattattttgtagtcaaatagtttcatatatctttacttttgctttaaattatattaaaaaataaatatctaaataatgaaaaatgtatattatgtaaattgtctttttaaaatcaatgcatttaaatttattaattattataataaatacattggattaaaatttaaaaagtgacaaatgtcgaaagaatagaatgccaaatggcaacttctcagagcttgttttggagaaaccttactttattacataagattaaacccacattagtatactattttcccaccgagaaaacaacaaataaaaccgttaaaaacgcagctttagaaagagtagataatgggatgccatattttccatgctcaaacaaaccctttagaaatggaaaaaataacataaccaccgagatacatccacaagtctctgccaaagccgaaccacctcctcctccatgactataacttgaccgttgtagacgaaccaaaaaaccagctagagcggcaagattcaccaacataataaatgtgccgggtatgaaatgacacgagctgtcaaattcaaatttacctaactctaattttagaccatcatcttctccttgagatggtttagatttagattcatatcctgacctagtctcaggcatattctttttcgcgactataaaaccgattttcgagattccaagaagcttgagtatgatatcttggatgctaaataaccaactgctagtggctattattctccaaagtgattgggagacataccacgattttaccgaaaaaccaaggatcatgaattgccatagagtgtagagacaatgcatccccacaagtgtgactattatgcctagacaaggtccctacacaaaatatataagaaaatattaatttttcttctaatttaattaatgaaattcatgttactatacttagagagagagagagagaaagacaccttgggaaacaaggcagagttgttgagtaggcaataagcaggcaagagacagtacacgagctcagggattgaccttatacacatgagaacccaaaaataagctaatctttgtcggaattttattttccgacggaaaccgatcaacggactttgtttgttaaaaaggacttcgatcgatcccgttgcccatcgccggtgttggactatcgcctctggtcctaccgacggagttgatcctagaaacgcgggagggtccggagaaatgaatgaactagtccatcctctcaaatggattccaatactcgtgtttgtatcttctgccactgaatcatataaccaaccgagctgcacgatttatatcggaaagaaatatattaccatgggtaaaggttaatagattcttacaaaagaaaaaaggctaataagttcttgaaaatgatacttgaatatttttgataaacgacacgttaatatttgtaaaatttgtggttttaggatataatgattaaattgagaaggtaataattacgttgccccaactggtttggtactcgtagtgacaatgccccacttcttgggccgcttctacgaggtttgcaagacttttttgggggtttgattttctttgcaatgcatccaccactgatttcaccaactctttggaactcccatatttcctcactaaactatcctcggacaaaaactccccttagtgaaataacaataacaaccgtgaatgagttgatgtatgaacagtgtaataactaaaattatgatgaagtgtatgttagatgaaaatctctaatgaaatttcacgtacttgaagcaaccgaagaaagacttccatcgtcttctaaatcgtctgaagataaaccgtacataactcttctagtgtggaagcagcctgatccaatatatatcggtccttggattcccgcaactcctcgtttcatatactaattacaaaaagaaaaaaaaagagagtaaatattggtcgataaataacattaaattaagcaaagattcaaggaaaaaaggtaaaagaatgagaaaccgcacatgttgtaagacgacaagttcgttggtgtaagaatcatagaagttttgagggaactgaacaaaagcacaatggtttgagttctttgagttttgtaaaaatacacacattgcttgtcgcaccacatctggttcattggcatacatgtcacagtctacgttcaacatgtatggtgcatttgtcatcaatcctgacactcttaactgtttaaaattatatattaggctcatcatatttttatcataataacaaaaagaaacagctctacaatcattgacatttatttttaaatatattaatatatctatgataaatatcaattcgaaatttgattattgttattaagaaatataaataagtatagtagtactctataaccaaaaaagtcattaaccaaaaaaagagagatgtgtaagataaaaatcgttaaccagaaagttcatggctccagttttgtaatgatgaaggtaatttggtcttttctctcttgaaatgtatacaagatgagggacttctttctcgtctcctacacctcccttgttctcccataccaccttcatatacacacataagacaagattccatgcaattgttactattataagttttaatatgtacataactttggaaaattgtacaaataccctgactgtagtttttaaaaacaattttagtaataccttaacaatagttgaatgatcatttggttttgtgtttgagaaagcttcaaaatcatcgtctgcatccaaccaatgggaatctcctgtggcatcttcaactttccggcataacttcacgtactccctcttcatattaatacaaaaataaacataataaaaaaccttataaatctgaaaaaacaaaatggaaagcaagatactgtataacttttgttttctagtaaaaccggaaattagaaacaaatggaaaaaagaaaaaatgaccttcggttttggaaaacaaattcaaacgtcaactaaataatcaaactcattaccttcatcattttccaatctttgctgaatactgaatcatctgttgcaaccaaagggtttaagaaatatctaaaaggagctctaactctaacgttgtatttcttgcagaagggagcccaaattttaacgaacttagaagcttccttgagagaaaagtaagtgagaggagaacatccatcgtccgacacataacacgctagtttattcgctggataattcacagctaatagcgaaagcacagtgttcacaacaataatcggcggctccctaaccggatctgccgtgggcacgaacatatctactgaaggaaggtcatgaaccctgaaaaattaaaaatttgtatgcaagttaaaaaaaaaaaaaaaagataacataaaaacgaataatatttcttaaaaaataatcaaataaactaagtgctagatagaagctagttaggggtttatacaaatctaatatgaaaatcagttttcatgtatattagaaattcttcaaatccttactccattaaaatttattttatttctaaacattagttgtcttagacgagactgtcaaaatttaaagcatctaaatcattgttcaagtaatattcaatttacagagtttttaatgtatttttttttaattatgtgtaaatgataattgtacctttcatcaagtctatttggatagggtttatcttcagcaggactccattttatgcaggtaataatcaaccacatgaatgagaaacaagattcacagagaaaagccacaagccaaatggtgttgttttcgcacatatgtaggattcggtaccagagaagagaaaagagaagaacgagaattgtgagatcgacaattcttaaaatgtagcttttgtgtgaaatcctttcgcaaagaggaaggagagaagaacttgaatctgccattggaggagctttcttcctgttttttttatatgaatgtgtgtgtgtgtaatgctatatgcttctgaagtttttatatatacacatcaatatataatttggattgatgtagattgggctacattttaattgactttaaaatcacatatgttttaaatagtctttcaactatatatgcaatatcttattactaaaaaaatttcttaacttcttaaaatttttatctcattaaaggtacatgtaataatctgttgacaacccaaatgatataataaactgaaaagaaagaatttagaatattaacttagtgtgtttatatcgttttgtttatgatatacattatttagagtctcgatcgttttttataatcatgtaatcgattttaagaattaaaacataaaacatgcacaatttctaaattattccgatttataagatgtggactacggtattggagggtctaatcaaataaaaatgttcttctaataaatatttccatctttaataaacctgaggggatatcgacacatacaatattgaatataccattcacgtttacacttaactttgagcaaactattaacgacgataccaaaatagtcttatgtatttgtactcttgagtatttctaacatgtacgatatcttggttgtgttaatttagcgacattagcaatggaataggtaaatctgttgataaattcatcagtttcttgaaaatagaaaaatgcataaaataagtaaagaatgtcattaattttcatgcaaattagcaacacaattaagtgttgtatatgttaaaaaaatataaaataatttataaggatgttgtatacaaatgccatttcagtaccaaactatttcttgatatgatgtagatttgaacttataaatctaacatatatggattattaacggataaatataagtaagtcataattgatttagcctagagtggaaaagtgaaagttttatggtttttggactctaatatgtattactaagttttatgatttttaattaaagtagttaatttagttaggtggatctaagattaggcggttagattggttaggttctcattataactagatgggtatattggttaacttttgtaataataataataattatttttttatttttgtagcttttgtaattaaaattaggtaattagggtatacatgaatttattatttaggtttggttatgggctttcttcagacggcatagacgaccaacgagggtggatggttaatcataatgtttcaaagtttttggaaatatgcatatttccttttccttttagtttagttaaacctttaatttatagctttaagttagattcatatattgaaaagacacaaattagtgaatcaaaagaaaaataaacttaacaaagaaaattgacatgtacaaggcgagaggaaagaaaaaaatgaaacaaggactagaaaaggactaatatgtacaacaaacacatcttattggtttgtactcgggttgcttttggtacaaggaaataactaccaatggacagtgaacaaacattagcctagggtcggccctatcgttacatactattttcccacattgcaaacaacaaataaaactgtcaaaaaggcagctttagagagagtgacaatgagatgcaatatttttcatgcaaaaaacccttttagaaacggaaggaacaatataacaaccaaaatacacccacaagcctctgccaaattgacccgaaccacctcctccgtgactacaactcggccgttttagagccaccaaatatccagctagaacgacaagattcacctgaagagattctaggaggggaaaagagaaggagaaagaaaaagaaaatgagatggtgaatctgattttgagttctaaaaaatgaagagagaaagagagtttcatggctgaaatctcgtaaagaaaaaaacaaaaaaaaagaaaaataaagtaaaaggataatggtgttgattggttgggctgtaattggtacttacagccacaatatttttgtaaaaactaaatttttaccaatcatgttgtagggtttttttctaacttacagcccaaaaaaaaaaactatttttgttttgactgtaaatcttttaatttctacatcctattattttgtgctgtaggtttttctttttttttttgattctctcgtctagtttttatattgtcactattattttcttatatatatacatatatatttattcactagtcttaatatatagacatagatgtatatatattttgaacgaaaaaatcttatatgtataaataattttaaactaatatttagttattatatgaataccatataaaatattttatacatttagaaatgatttctatatttatatagattgctgtttacatatatgtgcataatacaatttacattgttattaaataattttattaactataatatataattttacaatttaagaaaataaaatttatatatacaaaatttcaaatatttattaatcataatttttaattacaactaataaatttaccaccaaaattatatatttttgtaatctacagagccaaaaagttaccgccaaaattctacagctacagcttacacacttacagctaaaattctacagcaaaaaatttacagttacagtctaaccaatcacccacaatatatagtataaaccaaaagttgccgaaaattctgtagcaaatgagtactattggatcaaagttactttgttcattatttacaagtcaaaaattattttgtacatatacccttctatctaaccatttattactgctcttccaaaacaagaatacacttatttatcaattcaaaatttcgtttcacaatttgaccctgatttaggtttgttctacaaatttttcaatttggattttttccctcaatattaataaactaattcaataatcgttttagaggacaatgttcatactgttaaaaaaattgtctctctagaagacaacattactcttttagtttggttttcgagatcgtttagttcggcaccgacctgcagaaagaaatatgaaaatataagttcgaatttacatgaataacaaatcggaataaaggaagattatttcccaagattaaagataagatagaatccatatctgaaacagagtacctcctccatataaatcgggagctatacagccaagcgggggatccgcaattttagactcaagagccatgatgtcgattattacttagaaccctaacttgtctttcaaactagctagaaataccttgtaataaataataatcgagcttttgcttctaagatcaataaagaaaatcactttctcgaatctattttgatttccagtttaattgctcgcacaaccatgataccaaataagaattccgtggaagcatagatctttatttagagactaaagaggcatatgtttatgacacacgagaaaagagaagacacacgagaaaacaaatacaatactttatggagattaacacacatattaataattctccaataggaattttaaagatgggaaattaaagagttttgggttcggggaagaggaataggagtgcatgtaaggggatgagccatggtgatgagaaaccctccagtagcctcttccatattaatcttgtctccattgatttcccagtcaaagcactggaccatcatcccaatcgcggttcctacaaatatataaccaagatttgatccaggacacattctccttccgctcccaaaaggaaggaagttaaggattttctcttttttatcctcctctctacttaaggaagctagaaacctctctggtttaaactcatcaggatcttgccatgaatcaggatctctcatcatagcataagaattaacaataagtgttgtgttctttggtacaaagaaccctccaatctcacacccttcttggaactcccttacaaccagaggtgtaggcgggtgcaatcttagcccttccttaactacagcttgcaaataaggaaggtttggtaaatctgtttcttgaaccaatcttgtttttcctacaaccgaatcaatttcttctctcaatttctcaagaatctcacggttgtttatgatatctgccattgcccactgtattgctattgatgaggcgtcagcggctccaatgaaaaactcctgcactagcttatgttattaatcttgattctcaatgaacaacacgaggatatattacatgtacatttaccgtgagaagcgacttgatatggctcctagtgattttatattctgtattttcatctcgataagctgccaacaaggcatccataaactgtgtgccttgatgcccgtccattttctcttcatattcaataagaatcctttcaaccagctcactaaatctacgtgaaacaaccattatctccgttttgaaaagtgagataccgagcttctcaagcagcttacgaaacatctttgacacgaaaaacttctgtgacaaggcacctaagtcggcagtaagttccattattctctccacttcattattctccactgaaaagctccttcccgtgcacatcttgtaaaggctattgttaacgaatctggacgcttccttatgaatcataacgctttccttcttcatggccttatcgaacagccttttgtagaacctctctagctcttcagaacgaaaatcctgtgaccgcaccagtggttggggtcccagcaacttagttgcgatgagcttcttcatgaatttccagtaatctccatagggagcctgtatgaaaccagaagatccatacgccagggactcgtcgatcgctccaacaccgcgagaggagacgttcacgtcgtgatccctgaagatctcataggccagtgagtccgaggagacgaggatgaaggggatgttaaagatgcggagatggagaagaggtccatacttggaggagagtttctgaagagacttgtggataagagtagagagcaagaggtgaagatgaccaatgattggaagtgaaggagggctcggaagcaaatcaaagttaacctttggttttttgaagaagacaaagtaggagatgagtgagaaggaacatagaagaatgatgatgaagcagttttgagagtcaacgacgattgcatccattgttgctgaaaagcaaagaagaggcagatgagaaagaagagtccttgaaaccactgatataataataataacgtaagtaagatagtggagttctggagtttattttgtttactaaattatatatttgagtgtttttaaaacgtgtgtggagtaggtgatcaagacattgttaatacgtttagtgccgaactgtatacgcatgaacttatacgaggagtaggtgaacaatacattattataggtttattaaatatataaagataaatatatatataaaaaattgttatatatagtgtgacaatcttatcaattacatgaagtagagaccaacatattcccacacatctaatagtggtatagagaattaataatggttattatgttcgtcgtcacatactctatttgtttcattatatttataatttaaggtttgtttacataaattaaaaaaaaaaaaaaatttatttaatgtttatttttttataaaaacatcattaactacacctaattcaactaataaaaatttgaaaacaacaattattttgtaaaatataattaataaaaaatttatttaatacatttaatttttaaataaataaatgaaaaacaacaattattttgtaaattttttttttctgaaactacaaatataataaaacagagtttacgttgttttgttcatattccatgcaaattcaattatttgtgtatgttcatacgttagtttagtttagatgtgtggttatgtgatgcaccaaccccataatttaaatgtttggtggagagcaatttttttattatgggttaatactttttttcgtacgtcccatcaccaaaggtagataatgttaatctttatttacaacattcgacacataaaaaataattcaatgatctctacatgaacaaaaaattacaaaataacaagtcaattttaactttaaaaaagatataaatatgcgggtattttagtcttttagaccatcccattgatcataaaaatgggaggttttaaaatataaaatgaatacaaaaaattaaaagaatcaatgagaaatatgtgtatttctatggacactaaaggccttttaacatttatttaccatgtgtttccttttaaatagtcaatttgtttttgatattaaaatattaattattttggttttgagatattcaaaagagtggttgttcactgatgaagatactctatagtcataataataaatcaaaatagtgagatttgttctctatgtatgaaagagagatatatagcaagcgacgactgctggaactaaacatatgttactcgggataaaatgagataaaattatttcaaaaaaataaagaaaatgagataaaatcccccgcacagtttaataaacgctttgatacaatattcagttacataatttatttgacacaatatgtaattgttcaatgaccatagtttgcttgcgcagagaaatggaacatctctcttttattttattatggatatataaagagttgaaggtagaattgaccgtgcatttttctcaaggctgaagccgccgtagagcttgcgtgtatagtgtgagggcccaaagagaataaatgttcctatatgttggataatggagcagcacattcatattgaatactcccattacttcctgcaaatgtataagaacaaaacttcagattataagattgatagttttattttggtatcaacatgttgacatgaactttgaatgtagatgattacataacaggaacactaacacatacccctaaattacataatattagtttatagtttcatgcaaattatatattagagtgtatgaaaaagagacatgagattataactacctgttgcgggaaatcaccgttatccaactgtaaattgatcactactttggcagcacgatgaaccggcaaaggatctctctccatctgaccacccataattagaaccataagcgcttgtcctgtactcactatatttgtcttgtttcctgctaaaggagtatatttcttccttaggcaagagagatagctctctccccaaccaccctcctggttttgcgtgtcgagaaggaaacgaactgctcgacgaatgggttcacagttatggaaagtctttcctgcagccacaagacctcttacggcaaataaggtcccatagataaagcacactccccagtttccgcaccatgaaccatccttcatttgcaaatcctcaatgtatttcactccgttagttataaacctttcaacctctttctttctaaactccgggaattgtttactaaactgagtcaacgctacaatggctgaccctgtacattccacatacctaaagattgaaatgatatctcacaatgtaaacccgtttaacttttacccaaaccaataatagatcgatgaaagagaggtgataaatatatcatactcatgctcgatgaccgtgtcttgaacaaattccaccggactaaaccactgcatttacttgatgaggtcatttttaatgttacatctaaccaggtcgcaaaggtatatgacaaataacaaaataaaaactgacctctaaccaggttttcccatccgcgggttcccaagctgttatacctccgttatcactctgtaataataattttgtacaaaactctaaatatatacgaaacttaattaatacaatttaacaaacaatattagacttcacatatggtagcgggagtaattttagtaattctttttctttgaatattacaagtaaactcttgagttaggcatattttgcggatatgatcatatcaattttatttttttacatacaccattttgtattactatttgctaaaatagattcccctttattattactttagagtatcaattcaattccggatgattttaaggacccattgaattattattgttaatagatttttcacgttctatgaaactatagaaaaatatatttctattgtattataactacgtcattatgaataatcttacaatatgaaatgaatatataaatttatctttgtaatgcaccgattaggtttgtgcatatattttataaaataaattattatttatctaccggcagaatatacatgttttaattaggtttgtgcatatattttatacgtgtgtaaagtatggttaccctaccttgttaaacatttagacatttgggacggcattgtggctgatataatattaatttaaagacccacttaatgtacttcggttatctttgtaaaaaaactttgtgtgcctacaattggataaggaccatatgccataaacatacataaaataagtgtatcatatatggctttgtcagacatcactacgttcattccaaaagtcgtcattggctcattgccaataagttttggcttttaattttagtggttacagatatatcaaccaatatagttgtatagttttaagtaatcgtatcctttaacgataatttaacacatatatattaatatatatatatatatatatacatgtatataatatttttttttttaaatatatatatttaaaatatagtactgtacatgttaattaacaagtcactttaacggttacaaaaataatgtatatgtgtgtttggttggaatatttgattgtatatatttatatatatatagacatattttcaaaattttaaaatatttttactcacaagttaacttattttatttactcactaggattcgttcaaataacattattctaaagttcttgaaatttacctgcaagtagagaagaaaatcaacggcatcaaagagtttctccacatccattttctggccaacaaactccgacggcatcctctcaaataatagacagcactgagagtttgagcaaatcatttgtttagactttagactaatgactaaatttaattagtagagatatttttatctcttacttttaaactctcagcagtgcagtctgaaacaggccatccttgatctttgtccgaaaacgtccatccacctttcgaaatatggcggaacatttttatgtgatcactaggaggattctctgtaacttgagatttcttcaagtaatcgtatcctttaacgagcgtggatctaatttcatcatcgacatcatcctcaacaccgtctaacaggaaatgtagcgacatgactgtatcccacaattggctgccaaaagactgcaagagttgtatgtatatatgtgttattattatttattcgtcaaccaaatagagatggtatagagttgggattttattccatggaggatctacaaactagaaaagtcaagagctagaattcaaagtcaaaagcatgaagaataaacctgaattttgaggccatcctcgccaatccatatgaaatcagagactcgagcaagatgctttttaaaatattcaccctctgggtcttctacccaacatgcaagcatatgaaaggcctattaaacaaaaaaaaggaaacaaagattattccaagaaaaaaaaaaaaaaaaaaacaacaaaattacctttggcactgatccgcctgtaatgtatctattggcttcatcttgatagtgaaggagtttcatagtggttcgaagagctgcttgtcttatgagcttgttgaaaggccatcgatttagaatactctctgagaagatatgaacacctttccaaaacaaatcttgtaaaaatgaggatggataacagagatcttcctgcatgatcataatcacatttctttaatatcaaaaaagtatttggtaatttaacacttcttttgcactaatttgcaaactaaccgatttttaaaagcatccaaagaacacattttcttgtaaaaaagacggatttacctaaaattagtggatatgtgaggcttgggagctttttatgcgaatatttgcttaccaaattgttttgttttgtttttcttacaaatataggttcacggataacatataaaattgtcaatacgagtaaaaagtgttacgtctttagttaatatccaaaggtgctacgaacataaaataaacttttaaaatgctaatttgccaccaaaaagggatcaacgcatcgtgacgaaaaaaaaaacaaaaacaaaagggacctaagcatcgataataaataaatggtgtacctaatatttatttttataagcgtaccattggcgtaagcaaataaattgttgtacctaatattagattgtgtgtaagataaactaaaatttagtgtatacatgctgttctcaatagaataagacatgcatacataaaccttagtactattttttttctaatgtatatgacatgtgatttgtatttacaacttgcctttgcacatcggtttctggtaagcctccaattgattttggtgtaaggctctggataaagctcttcttggagctggaggatgagaggtgttggagttgcaacaaattttttaccatacaagtatgacaaccccatgaaaatatcccgtaaataaatccatagagttcctgcacatacaaaaacatatttacagctataagcaaaattatttaaaatcaaagatattgaagataggcaacgtgaaagctaatgttgaagacaaccatttgatgccaacaggagtctgtatcaaaatacaaaatttgtatatcaggagtctgcggagtgcacataacgtttgaaactgacatggcactttcgactaactgatttgacgtgacaagtaagcgagtagctaacgtggtacgttgttgttggtgcggagattcaatatatattctccgaatcaatgtatggaaaggataaacttgaggagcagttttattcgtttttgtgtgtgtatattatcgaaaatctgctaggatttttgtggttgtaataatatatgtgggacatttgttgccgttaacacttctactattgtgttggaagttgtttcatagctccagagaaatacgagctgggaaagtatgtaaatgattattcaagttctaggtatcacggtagggaaccaattgattcatagtaggatatttctctaaatataatttggtatctttgattatattgtggattcacggtagggtgatatgaatctatgttaattaggcttaaaataggttttagtcgggttcgattttaaagtttgctaaatcgagtaactctgaataagtgtaattcttaatgtaaagactaattgataataaactccgggtatataagcgttgacttggtgcattccaaacaaaaagagagtgtgttgttattctctctatataacaacagtatataaggtgtccgaattcaaacctccattaataggaaaagaagaaggaaggaaccagaactctggcggcataggtttgcagccagaccaatcatacactccaagaacctaatgaaataaagatttaggatgactaaagacaaatatcgtttgtattaaaaataaagtaaaaatctagtcccatactgataggcaagcttttccgatcaagggtgtgtaggtagcaccaccgtggtcgagtatccacttacgagcctttgtacaagtacttccttgatcatcatcatgaccggcttctactcccacgattcgtaaacaaatgtagttgatgactgtacaaaacataatactagggctttctacatgtaatccccacccaccatcttcgttctacaaaccaattttgctaagtcagtaattcttgctatatttaataacatatactgatatacatatatatagtaaatatacaaatttacctgatggttatacatgtaacgtattaactctatacgatgctcgactgtaaagattttctccagatgtccagtaatgtacaagcatataacctatgcaacatgaagtttaaatttttttttttttttttatcacttgtatagctgattatgcttaactataaaagttagtttatagtatgtgaagtaactcactaaaggagcgatgaagaaatttggaccagagttatctgcaggccagtgtccatcatctgcctgcaaggccgtaaaataatgtaatcctcttttcaatgcggtttttgcatcttcataccttattttcgctgcatcctctactctcacacgtggaatcttctgttcaaaacctttttccctaagaaactattaagtccacataacaaagaaaataaaaaaaaattttatcaaaaagggaaaaaacaagaaaaataataataaaacaattctctaacaaacgtattgtgttatacgtttcacctgcatcctccataagagatcagcactggccttgtaatgtgacctattgttagagaaattccgacgagcctcctcgacctcggcaagttcttgaggggagcctgcgttggcatcaaactcccaaatctgcctcccaacatagttgttggtcgtgaacaagtgagtatcatttccggccttagctccaattcttagtctccacattttgtattaatcctccaagttcagtcgagaggcaaaacaactaattatatagattgataatgcttgtgaaaacgatgatttgagtgggaactgatgataagttaattaataattttcaactaatttgttttcttaacgtatttaacttgtgctatttttctataggaaagtattcttttattttaatttattttctacaagatcaacctttttcctttttcttttgaaagatatataatttttaaatgaaaactttaacaaagtacatgctaacaactcccaagaagctttcttgaagatatgaaaataaaacgtggaaatgaaaactttaataaaattccaatcaccaaccacaagctcaccttttccacaagtgtacagtacgactgggcgttcgagtatcattcaagttcagatcattttcgtttttgatttcagtaaatttggttaggggatttaagaatctattgggtattttaaaattttgattccggttcggtttcgttctctcttggttcggatcggttcaaatatttgaatggagaactgaaatagaagtaaaacttttttgggttcggttgaactaccgaaaataccaaaactatctgaaatacccataaaactataaaatattatttaatttaccaaaaaataatatttagttttgaaaaatataactaacaacattttgatatattggttatttagagtattttgagtctaaacataattattttgggtttatcattataatgttgggtattttaatcattactttgcgtgtattttgggtgtacattcggtttttggatattttgattacccatttaatttttggttcgatatggttcagttctgggtactccggttaggaaatttgagatccattgaaatattctataaactatattcagatttggtccggttcggttcgattttggttccggttattttgcccttttctaactgtttacctctatattatatattatcaatttccctcgaacaaatctattctcctaacgatgatttgtatcctatctaattacggcatttggttggcaggtcggaccaattgatggagttaagatcagagagaattacgaatagaagaaaaaaatgaatttggaataaactttatttaagtgaataacaaatctgaaatatagaatagagcaatagctctcctagagaatgtacttctctccaacaagacgaatcttgtccaatggcgtagccgtccaatagaaaattgtaaaacctaattccttgatgatcgactttttgctaaagagtacatatttaaagacatctcctaaacgaacaaaggaaataacaatataatcttataacataactatagaaaatagcaataattattagcatatcacgtacacgtttctccatccgcaaccaaggtccctaattcccaagcagactttagtcatagttaacgtttcctacacaatataataactatatatttgttatatttgagaacctttcgaaaaatcttgtgtagtataaggatgtcccagtctcatgtctaatgagtatttctaaccttaacaacttgaagatggtggttgatcttatcgtgatgtaatggagtctggggctgtaaaagaattgggactttgttgggttgatttccgaactaattggtttaacttctcatacaacactcctgggacgactgtttatcgagtcgtgaaggtgaacataactttacttcatcttgttttcgaaaatacaggattttatatacatacatttatgaattgacatttacatttttttggcaacaaattgatatatacatatgattcttaataggcacggaagggagtagcaaagttgcttaaatgatacaattcaactagatatttttaagacaagattatattttaattaagaaaatagaataaaagaaaaatataagtaagttgaaatattttgccccgggagagtcctagttgattttaaatttaaagcctatgaaacttaagtcaacggaaatttgagatgtttcggccaagaaagaaaaggcatgcagtctcctgtttcacactagatcaaagctttaatgagagtggagagttccatctcttttccttcttacgtttaaagcgtccattaccctaatatctaaatatttcacatgcgcctatcttatattagacgaatctgacaatattgaatgtctattgtcaacttgggacgtacacgcttaacgagtttttttttttcacgttctttcaaagcgacaacgtatcatttttgctaataaaacagagcacgataacacatgcatcttgatcaaagattactctgtttcatttgtctctgcactttgagcaacaatggcagtattgatcatcttcatcctcttatgtctcttgtcattcctatgttactctctcttcttcatgaaacctaaagattcacgagatggccgtgaccttcctccgagccctccttctcttccaatcatcggtcatcttcacctaattcttctgtctactttaacccacaagtcttttcagagactctcatcaaagtatgggcctcttctccatctccgcatcttccacgtacctatagtcctcgcctcctcagcctcagtggcctacgaaatcttcagggaccaagacgtgaatgtatcatttcggcattcgcctccgattgaagagtctctctttttggggtcgtatagcttcattagcgccccctatggagattactggaaattcatgaggaagctcatggttaccaagattcttggaccgcaggcactcgagcggtcacgaagattccgtgaagatgagcttgataggttttataaaactctgctcgacaaggcgatgaagaaggagagtgttgagattgttgaggaagcagcgaagctcaataacaacaccatctgcaagatgatcatggggaggagttgttctgaggagaccggtgaggcggagagaatcagaggcttggtgactgaatcaatggctttgacaaagaaaattttcttggcgaccatctttcacaaaccgcttaagaagctcgggatctcacttttcaaaaaggagataatgagtgtttcccgcaagttcgatgagctactagagaagattcttgtggaacacgaagagaaaatggaggagcatcatcaaggtactgatatgatggatgtgttgttggaagcttatcgagacgaaaacgctgagtataagatcacaagaaaccatatcaagtcaatgtttgtggtaagtgtttttttttttttatgtgggttcctaagcgaacacaatggttttttttttacttagaaatgtttgctatttcaggatcttttcattgctggtactgatacatcatcaaccactatacaatggatcatggcggagatcattaaccatcccaagattcttgagaggctaagagaagaaatcgattttgttgtagggaaaacaaggttgattcaagaaactgacctaccgaacctcctttacttgcaagcgataatcaaagaagggctaagattgcatccgccggggccactcttaccaagaacggtccaagaaaggtgtgaaattaaagggttccacataccagagaagactatacttgttgtcaattcttatgctataatgagagatcctgatttttgggaagatcctgacgagtttaagccagagagatttttatctatttcaagatcagggcaagaggacgagataagagataaattcctaaaatacattccttttgccagcggcaggagaggttgtccaggaacaaatctagcttatgcttctgtaggaaccgcggttggagtgatggtgcaatgctttgattggaaaattgaaggagagaatgtcaacatgaatgaggctgctggaacaatggtgttgaccatggctcaccctcttaagtgcactcctgttcctcgaaccctaaaccttttacctccctagttcttgacttggggatgtcagcttgctttctcttgtttttcttatttaaactcatcaagactgattatacatgttttcctggtttattgaataaagggctgccttttgagttgaacggctatattgctacatgcagcattgtaaaaaatttgtacgcttcaaaattttaaaactaggcgggatttgttatggcgaagttttaacaatttgatttatcagacaatatattttacccgttaaggtctgatgccataaaattcttctttagcacttcttctattacctctgaacctaagactacatttcctcaaccctagtttgtagcttggtatgtcgaagcttctgtatctccttttcatctggttgtcaaaaatcatagttaggtatagtttttttttgtagatttttgcttttgtggaatatgctgatttacgcgaacaaaatgtttgcagactgaaaaatctcaaaatttgtcctgcattaatcttgacgtttgtgttttttttgcatgatcttgatttggcagatatgaaaagaaaagataattttttttttgtttgttttaggaatgtgttttatagtacgttttataagagtatcgataatgcgttggaggctgatttttccaaagacactttgatttatcaggcattggaatctatgtctgagggacatgctctggttgatttaaactcaacatcaatatctctcaaggtacatctccttgttctctatcagtgatccagtgttgtttgttgaaatgacagcacatcaaaaagaggacttatatctacttcttgaagtttgtcacttaaatttagtaaacacatgcaggcttaaaacaaggaagatgaagattgtcttgatgatttcttcctcacctgtcacctcaatttaggtgcaaaaattagaaatgtcgaactgattatatattttagaaaatggcaaatttccactaagaatgtgttatgtgtacattttttaggtattgcaacaaagcgttggattctttatcatattaagcaaaaatgggaggaatggtccgctttcactttaaaaattgattcatcttaatccttctatgcccttctcaaccctcagtctagctctttgccttattctgcaagaaaccaaagcctcaagacttggcttaaattttcctccgagcccacctcattctctttcaatcataggtcatctttgcgagcatacgacatggagagatgttctttaatttcttaccaatttgtatcgtttcatactctttggtctcttcagctctcgtgaaatttattaggtttgataagataatcagagatttcatattaagtgtccttttaaaactgaaaagaattatataatttattaattaagaataaaacaaaaaattgattttctttttcatatgtataaaaaatcttagattcttaggatatacaattataaaacggaagatgttattactaactctgggagtcagatatatttaaaatggatatcacaggctacattttaaatgtgtataatttgatagaaaaagttatgatccttataacaattggatttaaaatgttaattgtatgcaacagtttagatataatgtataatatgacagaaagagttttgatccttataacagttggcgggtttaagattatgtataaggtgaagatgaccgatgattggaagagaagaagggctcggaggaaggtcacggcgtgtttaaattaaaggaacgttaactatccgacgtgtttcattttgtctgccctacttaagtcgcatttcatatgttttgtttattctcctaattgttgaccgtttaatacaatatgttagaatttggactctgagagtcaattgcgtaaattagggaaacaataactgcttcatgtgttttcattcgtttgcaacgctttaatcacattttattaatttgttcatagtacattctccttattactgttgactgttaaatattctttatgaaaagaattgtcagctttacaaaatatagtccaacacatgatcatccactagtcaagaacttaaagaacatcaactgtcccacatgtttcattttgtttgctctacttttgtcacctttgatccatttgtttagtagtttattctccttactgttgactgcttaatacaatatgttattctaacttagattctcatgagagtcaattgcgtgaattagaggaacaataattgtccattcatgtgtttgattttgtttgctacgctttagtcacatttgatctattaatatagtttattattccctttatcacatatctagattaaattattgtatgagtatctacccgaagaattgaatttgcgttatgacatgctcacatgcatgaacaaacataacttaagttatgtgacccacatcacaactatcacttattatctagtattgatttgatttgatatttccagacacttttgtcattgttcgacatgtacatttttctagctgatcaatgtttatttcttgctatatgtgtttttaagtggtcaaaaaatcatgtgacaaacaagttgattccttggattttaaattttcttcgttggtttcgttttctcgactgaatttggtatcaatgttggaaaaggaaaaatatcagatcaaataaaaaaattaatcaatgatggttattatgttggtcatatatgatataacctatgtttgtttttgtatatgtcactatacaattttttgtttttttttgttgttgtcaatatcagtcaatgaaaattcactggaagagttcattcttaactgagatgatactactcttttttctcttcctatgtgatgtggtagctgctttactttcgtttggttgcaatttgcaaagattatcccgacttactaagataattcagtcgatggatataaacagaggatctgcctcttgctgtttatatgttcggtttgaacatacttctcaatgtccctacacaattttgttgagtactaagatctcgatctattgatcttttacgcaatcaatgtttaataaataaaagtttttttcggtggttttagatatgtttatatttaatttatacgtccatttggatatgaatagtttttcttactagcttggcaagatatgagcactctaggtattacatatattgaggttatttaggttgataagatccgatttatagcaaattttatttttatcgtattttttgtttttgatatatttgaataaagaaatgtactatttttctttccagtaaatatttttaatgtctaaatttattactttattgtaaattttgataacgattacataaataattctaccacgaataattttttctgatcttattaaatccacgatatacgacactttattctctattattttgaattttgttagacatcttcgatagttcacgaccgatgatactttattttttatatgtaatagacacttttaactataaaatttcggcgaacggttctaattatacataatatctcatataaatttgattcggttaatatataaatttattaataaattgtattacttgggaatctgggatttgaacctaaaactcttgatgtaaaagcaataatgaaatcttagtcaactgttagccaaaaggggcttctaccatcaacaatatttagaaaactagttaacaatagggatgaatgagtaatatacagctacactatatgatggagttacgttaataacatttaataacatttttagtactatcttattaattaacaaaaatcaatagtaatagttgagaattttttaagcactaaaattttatttcagattttttccatattttatattaataataaatccataacaagtaatttcggacctgcttctgaacacggtaccatgtgaaaccgaaataaagctcgaggaaaaaaactgcagaggggaacatctttacccacttgactaaggttcatatatttactagataaggcccgcctaaataggagatgtaagatgtaactgtaattttttatcaataatatttaaattttgaatagtaaaataataatctatacattgttcttgatatataattttgaatagtaaaatagtagttttatgcattttattttattatacccattcaattttattgatgatatttgaagtctaaatagtaacctacacactttttctttattataatttagtatttatatagaagaaaagaacaaatttttatcttacatattcaattttgtaatacaatttaactatctatttcataaaaaactcgattttaattctacacacttcatcttacttgataatgatttcatgtcaaaataatatatatatgagatcaaatctatatcttagttaatattaaaaattattaataattaacaaaacataattaataataataaaaaatctgttaataccatacatattaaaaatttgaccaataacatatataaatatttttggttaattttccttttggttaagaaaaataaaatgtaatatttttagatatagacatatgaattagtatatgttaataataatttattttttagttttctatttctttaagaagaaaaaagttaattgatttcttttttagtatttctatttctttaagaagaaaaaagttaattattttcttacacgtgtcaacatctgatcgatagacttgacacatggtataatcctatgagttagtaattttaaaaaccatactttatataataagattattgatatttaaaactataaggattcagcaaatggccgatccagaatatttttcacggggtgcaattatctataagattttttttataacttttaataaattaaaatatatatatatattaaaaagataagattttattggtaaaatttctttaatttttctaaaataatttatctccaattttggacaaaaacaatatatggttggtcattaacttgtttcgaaattttattgtagatgtttctttccaaaaagaatatagtaatttaattagatcagggaaatgtgatattactagtaaataaaatgttaaatttttgggttgtttacaaggcaaccgaaaaattataattatgaacgaataaacatgctatatccgtcacattggcgtttatataagcgaatcaattaaagctgttgacaagaagaaaaaaaaaacagatgctatataaaaggaatcattaatatgtgttttgtgttttgaaaggaataattaatggtaagataaaaggaaattggtaagaaataaaagtgaaactgaaataaactaataaaagatcaaatgagagaaaaagaagataaaaaatgaaagtcctgagactatggtgcatcaaactcaaatcactgggtgacacactttcatttttagttttataaatttcattgggtgcaccccttaaggccttaacacaagtgtagatacgcccctggagtcagttgtccagtagtatgtcacgttcttctagacagagtttttttctaatgtaataaacaaagcatggttggtcaccctacagatacattatatttacggattcttgatcatgattaatctatctcttaaccttggagaaacaatgatagcaatcatcgttgagttccaaaacttctttatcttcatccttctatgcctcttctcactcctctgtcactctctcttcttcaagaaaccaaaagactcacgaagctttgttctgccttcaagccctccttctcttccaatcatcggccatcttcaccttctcctctctgtcctaactcacaagtctcttcagaaactctcctccaagtacggacctcttctccttatccgcatcttctatgtacccatcattcttgtctcctcttcctctatggcctacgagatcttcaaggcccatgacgtgaacgtctcttctcgcggtattattgctcttgatgagtctctcatgtttggggcttctggcatcttgaacgctccctatggagattactggaagttcatgaagaagctcatggccactaagctactccgaccgcaagtgctggagcggtcacgaggtgttcgtgttgaagagctacatagattttacaggagcattcttgataaggcgacgaagaatgagagcgttgagatcggtaaggaagcgatgaagctcatgaacaacaccttgtgtaaactgatcatgggaaggagtttttcagaggacaacggtgaatcaaatagagtcaggggcttggttgatgaaacctatgccttgtccgagaagatattcttggcagctatattgcgcagacctcttgcaaaacttcggatctcactattcaagaaagagataatgggtgtctccaacaaattcgatgagctactagagaggatccttcaggaacgcaaagagaatttggaagagaagaataatgaaggtatggatatgatggacgtgttgttggaagcttatggagatgaaaacgctgagtataagatcacatggaagcatatcaaggcatttttcgtggtagatgttcctctcattttttcgatatttaatttgatgatccaaaccaaaatgcttataatgttctgagtgttttcattgtaggagtttttcattggagggactgatacctcagtgcaaacaacacaatgggcaatggccgagatgatcaataacgctaacgttcttgagagactgagagaagaaatcgtctccgttgtaggggaaacaaggttgatccaagaaacagatttaccaaacctaccttatttgcaagcagtggttaaggaagttctaagattgcacccaccatcaccggtcttaatacggaagttccaagaaaaatgtgaggtcaaaggattttacataccggagaagacaacactcattgttaatgtttacgctataatgagagattctgattcttgggaagatcctgagaaatttaagccagagaggtttctaacttcttcaagatcaggggaagaggatgaaaaagagcttaagtttcttccttttggcagcggaaggagaggatgtcctggagcaaaccttggttctatatttgtaggaaccgcaataggagtgatggtgcagtgctttgactggaaaatcaaagaagataaggtcaacatggaagagacttttgaaggaatgaccctgaaaatggttcatccgcttacttgcactccgttcttcgaacccaacctttatcttttgcttttaatctctaaatttccgtgtctgatacttagctttggagcttgttaacaagtctactttcttttgttctatatgtttgcatttgctctcttctatgttgtctttgtatttgcattgctatttgacgtttaatatgtttgctcggaaacgttgaattatatttgatctctttatgtttgttatatctgaaaatttgacattcctatacacgggatctacgacatcatcatttttcaatctagctgatttaagttctttggattttttttgtgacacaaaatcttatttcaccatttcatctctgtttcttcaccaatagattaattccacagaggcatcgttttatattaaagaacctttgtgaaagcatccttagtccattagttaagggtttacagaacctttggggtttgaatactagataacacaatttcttgcagaatatcggtatcggagattttagaataatgcaggccgagacgttcgtcccagtatcatgtgttgtgggagagcatgtccatcggatgtcgtacatgcataaccatccatcgtggatccaaggttcaggagaaaactacattgtagaatcgttgtttgtggaagctattcatcgtaactgcatatattgcaggtaatctacatcataataggattaaatcaaatatttttaatgatgatataacagatgaaaaaaaaaaaaaaccttctataatttgaatcttcttgccttatcttcgatcaaggctaacatgcataagaattaagttacatgtaactaaacttgaatgccatcaagaatttcatgtatcaaaaccatatgtgtgagggtttgtttctgaaaattgttggtgaggctaataatttgatgtatcaaaaccgtagcgtagatttcaagtgaatgaacctctaataatctacgaaagaaagaaaaaacacatctctttctatatattaatcgataacaaaagattaaaaaaaaagtatgttcggaaaaattttgaaaccgtgtttttccagaaaatgtgtttcttgtgggaaaaatacggtcttgctctttttggctgaaaaattacggaatcatggttttggcagaaaaaatgcggactcgcgtttttttttccggaaaattatgaaatcatattttctactaaaaaatgagtacacaagttttcggcggggaaaatacatgttgaattaagtaaactaaacttgaatgctgcaaaggcttccatgaatcaaatcaaatttaagttatatgttacccacgatctaacctggctgaccaccagattactcaaaacatcaccaaagctcgattggtcacttttgtttgacaatcagttaagaggtagtaagcataaataatatctaagctggttcacaataagcaccaaaacaaccctcagaaatgactaaaaaaatgtgaatcacgatctcaaacaatggacaagtggtaacctaatgagcgtattgatctcatggaagaacaacgtagaactttgtacgacataaaagtttttttttgcaggggacggtgcaccatcttgcaaaaatgatcacaaccaaaaatattgaatcataaaccagttgtgtaccaggaagtcccaacacgaagaccatgctgatatgcatccatcccagaattagatcgaaacttgttctcaagaaaaacaaagaattaaagaatagaaaagagagttcaagactcggaatctcgcataagtaatttgttattcatattaggagtatgatttgagtaatgcgcacaagacatatatatcatcggagattgggtgtttaaacttgggggaattataggtttaattaacgatattgtagccttggcattttaatattgttcttggatttcaataataagtcgattttattcatattgtggtgtggttactctttcagaacttttatccgaatatttcaaagtataataaaaggcacatttttattcttgggttgtggagtttcagagccctcgcagagccttcgtgtaatgtgtaagagcccaaagagtgaacatgtttctgtaggttggaaaatggagcatcacattcatcttgaacactcccattatttcctgaaaatttataaaagcaacgttaactttttttttatctatatagtttttattttaatttgtcaataatatattattggctttgaatacagataagtaatctatagttatattcacattatatattagagttaatgggaaacatagataggactatattcacctgttgtgggaaatcgccgttatccatttgtgaattgatcaacactttggcagcacgatgaaccggcaaaggatctctcttcatttgatttcccataattagaaccataagtgcttgtcctgtattcaccacatttgtcttgtttcctatcaacggaatatatttctttcttggacaagatagatagctctctccccagccaccctccgtgttttgagtgtcgagaatgaaacgaactgctctacgaattgcctcacagttattgtaacacttcccagcagccacaagacctcttacagcaaagaaggtaccatagatgaagcacactccccaatttccgtaccatgaaccatccaccatttgcaagtcctcaatgtactttacgccttttgttataaaccgttcaacctcttcctttttataccccggaaattgtttattgaattgagccaacgctacaattgcagatccagtacattctacatacctagagacaaagatgatatcccacaatttaaaccaatatctttttgctcaaacatataatctatccaagataaaagggttgaagaatatatatagcatactcatgctcaacaaccgcgtcttcaataaactccactggactaagccactacattcaatcggacgtagttaaaatatcacatccttgaaaatatcattgataagttactaaataaatattacctctaaccaagttttccgtccgctggttgccatgctgttatacctccattatcactctataataaaatattgataaacaatctcttatatatgaaatttcaattactttaatgaacaaaatatactaagtgatccattgttgttggagtgaaataaataatttatactaaaattatttaatttttaaaattatttaatttttaaaattatttaatttttaaaattattactcataacctaattattattattattttatatgaacttaaatttaattttgaattatcttattcaataaaaatcaagtaaccgattaaatactcttccgtttcattataactggcttttccctagatattctatatatattaagaaagaaaacaattaaaattttgtttttacatcatatcattttcatttgtaaatacatcaaagtaatagggataaactaaatatttaatcaaaatattaagtctggacaaaaatataaaacgacacttatgataaaacaaaattttaacttcttaaacaatacctaatataaaacgaatgaattgccaaagcagacatatattacaatttcatcattagaaataaattattaattttttaaccattctatcataactataaaatgaaaacaaattcaattttaattatcttgtttaatgagaaaacatgcatttattacgatttcgttactcccaagtatatctaatttttaatatcaccagtcaaatctattttatatagcaattagttaatactaatatttaccaatttaagattatgctcgagtgtatactagctactataatactatcatttagagagtcatagttaacaaaccgatatcattggtttcttaatcgatatacctgcagatagagaaggaaatcaactgcatcatagagtttctccacatccattttcttgccaataaactctgacgacatgctctcaaagaacagacagcactagagaatttgaccaaaacatttgtttaggcttaagactaagactaagaaattgatttaatacaaaaaagctcagtgtattgattactgttacctctaaactctcagcagtacaatctgaaactggccatccttggtcttggtccgaaaacgtccatccacctttcgccatgtgacgaaacattttcatgtaatcgccaggagggttctctgtaacttgagatttttccaagtaatcatatcctttaaggagcgttgacctaatctcttcatcaacatcatcatcgaaaccgtctataaagacatgtaaagacaaggctgtatcccacacttggctaccaaaagactgtaaacgttgtacttatgttaatacatcttttagtactatgttcgatatgagtttagagtttctatattttaaataaaacttcaaaaaaagaaaacagttagaatcaagaagaaccaacttgaattttcagtccatcctcgccaatccatatgaaatcagggactcgagcaagatgtttcttaaaataatcactctctgggtcttctacccaacatgcaagcatatgaaaaacctatatataaaaaaatgcaaaaataaaaatccagatttcattctgtgacaaatagtagaaaacaagaaaaagaagaagaaaacaacaacagcaattacctttggtacagatccgcctgtaatatatctggttgcttcatcatgatagtgaacaagttccatagtggttcgaagagctctttgtcttatgagattgttgaaaggccatcgatttaggatattctctgagaatacatgaacacctttccaaaacaaatcttgtaaaaatgactgtggataatagagatcttcctgcatgataatcaccacatttgctttaataaagttataacaaaacaaaattgctttaatatcttaataagttagttaactaacacttttttcaaatttattctttctaactaataaaaaagtcttcatggaactaattgttttctaggaaaatgaccgatttacctaaaatcaccagatgtatatgagctttttttatctattcactagattttaacccgccgatacaccgcgagctatatcttttttttttaaataaaatttaacttgtttagtagatttaaaatatatatgatttaattttctgtattttctaaatgtataactcttatatctacatattatttagtgtacaattactatgtttggtttttactctttaaaaatataggaagaataacatagagttcattaaattaaaatatatattataactaaataattcaaattttaattatatttgttttattatatattttttgtttagtgtttaagataatttaattatattttaatttttatatctaggatttcacctatggtataccgtctcgtattactatcgacccaaatccgtcatatcatctaatctcgttcaatgaaattaaacatatttaatggatttcacccgtggtatagcgtctcgtattttatcgactcaaaccctttttaccatctaaccccgttcaatgaacttaaacattattttgttatttttgttttaataatactttaattgaaagatatataatttaaatcaatttaaattttttactttaaatggttatttaattgtttaaaagttcatatattataaatattattaacccgtcataccatctaatcccgttcgatgaaattaaacattatttttttgttttgttgtttaaataatatttttattaaaaaagatataattcaaatcaatttataagtttttttaaatgattatttaatttttatagatttcacatattataaatattctaaacgtttattccgttaaatattctaaatgtttaattaactataatattttattttttaatgaagtatatattaatagtgtcctaaaatttctcattttttaagtaattagaattgatacagatatattatataagaaaatgctattaattaggaatattaattaattgaaaataattaatgtcaatggcattgcttgtaaataagtttcaacttgaggatttatttcataaaatggttgcaaaaatgtatatgtagatataaacttaacttacctttgcacatcggtttcgtgcttgcctccaactgatatttgtgtaaggctccggataaatttcttctcggagctggagaatgagaggtgttgaggtagcgacaaagtttttaccatacaagtatgacagccccatgaaaatatcccttaaataaatccagagagtccctgcgtttatacatatattatatatatatatattaaaaaggtaagaataattaaactaaaattcaacataaacaaaacataatattttatgctgtctaaattcatacctccattaacagggaaaaatgaaggaaggaaccagaactcagggggtataggtttgcagccagaccaatcataaaccccaagaacctaaccaattttaaatgagagttaacagaagagatatcatcatgtatgtatatatattgttgtattacatattgttaagtttcatgagactatgaatcaaaataaaatgacaatgtctcttatatatataccattcaattaaggtcttatcttactttcgatgtaggatatattcataaatcctaatatatatatatatatataatagaaaagtatagtagtcacaaaccgaaagccaagcttttccgatcaagggggagtatgtagcaccaccatggtcgaggatccatttacgagcccttgcacaagcacttcctttatcatcatgaccagcttctactcccaagatccgtaaacatatgtagtttatgactgagcagaacatattactggggctttctacgtgcaatccccacccaccatcttcgttctatataaaccagttttgctaagtctttttgtgtttaataaatatataggtgaaaattgtggacttgttgaaagagtttaacgaccattcatctaatttttcatcatttgagttgaataagtgtaaaaatgattcaactcatccaacaataattgggaaaataaacaaaatacaaaagaaaattgttcaactcattaatttatttactatttcgcagaggaatgagttgaataataaacttttttttttgtcgactaagttgtttctggtcattcatttacacacaatatttgcaccctatgtatgtgtgtgcacacgagatatttatagatgtacctgatggttgtacatgtaccgaagtaactctacacgatgctcgtgagtgaagattttctcaagatgtccagtgatgtacagacatatcacctatgcaccatgattttattttttcaatcattgttggatcgataattcatgttttaactataaatgtaaaattttagtgtttgggagtagtaaatagtaactcacaaaaggggcattgaagaatatggaaccagcgttttcagcaggccaatgtccatcatcagcttgcaatgccgtgaaatatagtaatcctcttcttaatgcagtctttgcatcttcatacgttattttttctgcatcctccactatcactcgcggaatcttctgctcaaacttcttctccctaagaaactgtaaagtccacaaaataaaacaaaaagaataaattaaaatactattttctgaaataaagaccaaattgttatgttttacactgtaaaatatttcacctgcatcctccataggagatcggcactagccttgaaccgtgacctgttgttggagaaattccgacgagcctcctcgacctcggcaagttcctccggagagccagcgttggcatcaaactcccaaatctgcctaccaacatagttattggtggtgaacaagtgagtattatctttggccttagcaccaattctcagtctccacattttctatcaatcgttcaagtttattcggaatgaaagaatacgcgataccctatacatataaataagaaagaaactgacgatgcatgcatgttgggaaaaactagtgtatctactatctagttgtttaataactataactttaataattcccatattttatcgttatagtactatatcctcatcttctaaaagttgatattttattttttgaaatcattaatcatattttagtaattaccgttacataatttatttttaaaagtatatatatgattttctatgatttttttatttaatgactttttttaatcaaataacttttataaagtaaatttaaaaaaaaaaaaaattaaacttcaacattccgtaatttaatcaatttaagctttgaactttaaatttatgtcttacgttctcacatatttaagtaattcaccttaccttgctatcacttatacagtctcactttctcacccaagtttaattgaaaaataaaaataaaataaaaactatttaaatcgatatacgaagtttggatttatctttcgatctcttatttacacttgctattaaacatacttatcggcgttagaatctttctctaactcgtagtggtgaaattggagtaagagaggagagagaagagagggagacgcaaaacaacatggtataatcttttttttttccgtctgaattattcatgaaatagcaaccaaagtgaaatacaaggatgagatacatggacttcaaatcgatgaactctatcttttttttatggtattggggaatacctcttgttgtaatgttttaacctttgggttgtttaactcttgtacttgtaattgttctttgttccactgaatgaaagcaaggtttgacaaaaaaaaaaaagcaaccaaagtgaaatacaaggatgagatacatggtgaaatacaaacaacatggtataatctaattcatatattattttttaactgaagtcaaatttaacaaataaaacaatatcgtttcgaggagaccgatttgttttcgtaaaacatattcgttttattgtacaacatggtattctagtaagaaagcactaatagtttgggtaatgatatctacttcaacgtaggtttccgactacatatttaaataggtcatgtactaaattcataatattgttttgttcatgtagttttaggcatgacacttttagttcattaatatatatgatcatgattcatgagagccttagagtagtatgctacgtaaatagccgttttcctcttaatctttaaaaaaaaatgagccttcaactagaagtcaaattactcatatatcttctacaagagcaaaaatattagtgccaatttcatgtttactttcaacatgttaaaccttaattagtgccaacaatttattcttgaccatttgctcaaactccaaagtcttttggccaaggctaccaagcctgaactcctttcgagatagctcaatttccaccaactataggtgaccaagggtttgaacttaaatctagcagagttgaaggaatttatttcgttctcaccattgtctcatttttcaaagaaccgaataaataccagtggatccgttcagcggaaggtgaaaactgaaaaccgaggttgagatatccatttgaagttacaccgggtctcaagagaaaagacagatcaaaccatatactgtataaatcttataactcgatgaaaaaaaagtaaagtttttaatttgtcatgcacatattaaattttgttattttgtataatgaaacaaatattgaaaaaaaaaatatcaagaagaagattggaatataatttcattgaagattaaatgaaaaagttatagtgagttattgtccatttttatataatattgcatgacttgtttagttttgactttaaataaaagaattcagtggtcaaaatcgtcacatcactggtcaatcactttcttttctgcaaaataactatacaaaatacaaatggaagtttccttagaccagatttaggtacaagattcaacaccaataatctattatatatgccagttttatttaacaccagtgtgaactcgacaaaaaatgaaattcaatagtccagtactagtccacatgtaataacgacaaataaagattataactacaaatgttatctactaagtgaaattagtaaagaaaaatgaaactcttttttagttttcccccgatcattcactgattcacataatgtatatcattttaatatcgatcacagaatgtacaagtcttatgaggtaactagttgactgataaatggcaagtaggaatatatataacggatagagtacaatgtataacgtaggaggtacgcctctactaatacaaaacgaataacgtcaccgccggaccaatgactcggaaggcttatcaattattgttagaaaaattaactaacaataaatcatctgaaaatgtggttaaaataaaactttataaagtttttgaattaaataaatagtataacagatgacaacaaaaatatatatgataatgatgataaagatcaaacggttaaacattacaattaactgaaaaaaaaactaaaaaaaaatacttgtcaaatgttgcctcaaaaataatgattgaggatgtgccctagggctattgcccttttttttaaactaagtaagcacagctccgaatatcgtacaaagttatgaggcacagtaagatctcaatataaattaatagtgttggaattatggtaatttattaatttataatttataatttataatttattagattatagtgtaaattaatattttattaatttatacagagtattatattaattgtgaaaacttttttgaaactatgagttaaaacatgttgatctagataaaattagtatacgactattgacataaataacaaatattctatatgaattctcatatataagcaatacacatatttaaatttataaatactaacctcaattgttaaagagatttttagatattaaaatttgtaaagagatttttcatagatatttattagataaatattaattaataaagagatttttcaaaatttgtagtttttaaattgtttataaaaattgaaattgtcattcactatataaaatatatttttagaatcaattataaggaaaacaatgataatatatatatttaacatatttatataattattaatttattatattgatgtggctatatatttacataagattttcaaaaaattattatctaattaatttattgatttgtatcactttttacacagcttccaactcgggacaagaaaattttattaatttataaaaattattgattatctagtattaatttatagaagttttactactgttgaatgaaaataatgtatattcataaattttggctatatttatgaaaactttagagacaatacaacaatgaaatagtttagaaacatatgttatgtttcttatataagaaaagttagtgatgagatataagaaaattcatttaaaaaatattatatatatatatgtataattttatataattattaattggaccatatatttacatagaaatggtattatcttattatcttatagaattttgctattttcacactagtctgacttgagaacaaataattttattatagtatttattaatttatggagaattcatttattgaagttatattgcacatctgtaataatcaattaatagtgagtaagtattttttagacacagatcaaatcaattcattcaatctaaaccctatagggataatgtctagggaacccacggattctaattttagacacagatcaaatcaattcattctaaaccaaatttaattgctagtgttgacaaagcttcccatcacgatttgtaacatgagatcttgaaagtgggttttcaaaagctggtcgattagactttcgagtctcaaattggagcttggaaatcagatagatagaacctttatgaccggattttgaggtaaaaaaaaaatattgatagatttaaagagataaagagatgaatgattctggtgttcattgaacaataacaattacgggaggtcgaaacctggattttggattccatttggttatgtgggtgagagatactctgaacaaaaacttaagagagagagaaaaggaaattattaggtttgtctgggtgaggaaggataaaattgtcaattaaaggaagagaaatgcttaattctataaggcacatgattttgtgcatgtatcaacaacgacatagacttttaagtcctttattcgcaattgatccctaaattagatgatgtttcaactttcaatgcaaaattaattagttttgataattaatttcttaagattgtgttcttatcgggtgaatcatgtttgggtatataataaaaaaaaattagtgaaaaaaatgaaaacatatgattttttaaaaatatgtgtgtatactcataaaacaacaaataaaataacacatggagtaataaaaatagcaactgattattcttacaaagagacgaactatatggttcacatagaccatacatagtgtgttatcatgtggttaagtgaggttttatttctccgaaatattttttaaaaacgattcttagaaaaataagagagagtttaattatatgaatcaattaaattttagatattaattattatttggttatgcaaagtactgaaaagtatgttttaacagcccttgttttgaaaaatatgttttttcaacaaaccatattaaaccgcacaacgctgttcaatatatttgttttgcattattgtatctgtcaccattcgaagtcataataaataaataaactgcataccattaaactcctttgtatatttaaacattaagtgattagataataattaaaatactctaggccatttatgttctgtccgataaaaatctatctatattctaaagactaaactgcataccattttacacccttgtatactaaaacaatgggtgagaaacaaactaataagtaaatacactaggcaagtaggcatttacgttctgtccgatgaaattctatttatattctaaagactaaactgcataccattttacacccttgtaaattaaaacattaggtgacaaactaataattaaaatgcactaagcatttacgttctgtccgatgaaaatctatctattttaaagtccattagtcaacattgtaacaatcaacgaagacaccgtctaaaaacaaagtgacttgacttcgaatattaagaattatcattttttcttttgtgtaaacattactttttcgtttcagaaaacatatagctgtgaaattgtcttttaaatcctaagttgagtgttgaatttaagtttttgatgcaaaactataactaagattccggttgtttctctatatttactaatattttagaaataaaatgaaactatgtaatctactaataaagggtttctaccaaaaaagaaatctactaataaagggtataataaaatttagattaagtcttttactatatgtaaggaattatttaaacgatccttaactaaaacgaattaatattaattgataaaatagtttacaatttaataaaaattgtcactctctctgttttagattaaatgtcgtttaagaattttcttagattttaaaaatataatggaattttcatttttcttctttgtttgtcaagtttttcaataatgttaatacattaaaatagtttaaaaaaaattaaaatatgtattaagaatatagagaaaactctaaaaaattttaaaagatagtaagctgctggcctgtcttcgtcggtttccttgtcccttgaatacagtgaatatatatttatacagtacagatgacatatatattttataaacgaagtcaaacgccaatcgtataacatcagcatcggataattgacatgagattgtggagctagttcacgtgaaaattggggcatatattcatgttatcgcatatgcttaaatcttaatttgtggaaggagagatatacgctagaatattaaaaagagtttcatatatccatggttttagggttgtaactttaaatcgtacttgatattttcatatatgcagatattgattaacgcggtaatgcgcacatggtagttgtgatcgagtgattggtgagactttgaaatatatgctaaaacgcttcttccagaatttgaggattaggcacattgtcaaacctcgtgaaattgcttgtatgttcatacagttgtattaacatctactattagagagggacacctcgttcagaaatcattcttctaaaataattgatatcgaggaagagaatatgaagacatatgaacgactactcgatgtttacaatcctctattgttagatggtgcaagttatggatattggaaagtgagaacaaagaacaacatttgtggcacccctgaagacgcttggacggctgttgagtgtggttggaaataactgtatgtgacatttgaagatagagaagtaatagtgaaaccaaggacaaggtggattgcaactgaggctgtcaaagtttaattcaaaggcgttgaatgaaatttctaaatcggtgaatcaaagagaattcaaacttataccagggtgtagataagataaagaggcatgtgatatactgcaaaacgtctttgagagaaaaaatagtttgcaaaaaaggttgaaagtaataatgaggttactacttaccatatatggattggtgtgcttgcacttatttgattaaatcaattttggtccaactcttgcaagtgaactttttttttgtttttgacaaataaaagttggctagccaaagcttttccctcttcaccaaaaaaaaaaagtttttctttgctcgcagccccttaaatctgagaaccggttctggctctaatcattggtccaacgaaaacatgcacttgagtctcttcctcagcctagctaaagtgctcatgatgtccttttcatgcatgtgctaattttttttgttttttaaggtttagttgtgtgctagcttaagctgaaaaaaaaaaaactatttgagttaaaagaaagctatggttatgcaatattagaattgatgaaatggagtcttggaaatatatttaaaaaaattgacatgtacaataatcaaatgtgggaacctaatcaaatattgtaagagagtggtcctatatgctaccgcttcctcatggtcaaagccaggtctatatatataactccaagccaccgcttccctagtttctgcttaaattcaggtttgatgaaacctcggggctcagtatgcatgtcaacgtggaacttgggaaagtgaaaagatatgaggtaagacatgtaacaaattctcggatgttttcatccttttgccattaaattgaacaatgtctcgttcatgctcaaggaggctcaattaatgaactgaactaacctagagccacgtgttttccttctgccttttctgattcaaaaagttgactgaggataatgacatacgggtagttaattatagtgtatcacacatcttataagttgtaatattgtctacttcaaacattagctagccaccaagtataaaccaggaagtttctagggatgtatttaatttggctcgatgggctttgtgtcaaaaaaaatccagtcgctattaagtatgagatatctcgaccgttctagtcgaattcgtctattatgtataagtttgccatatacggccgacaacttgagattttgctcatggatattaaagatactttataaaataaagttattgataaataaaaaaaatcaaactaaaatggagtggagaattcacaagagaattcaaggacaggaaatatttatgttgataagtggatggaaattaggataagcattggtcatcggtaaaatttgtaaatgacggtttattggtaattaactacgtcatatcagcggagggattattttcagaaaaattaaaccttaaaatgatattccagtaggtttcatttcttgcattacatcttgaagatcagtgtatccaaatctttattgaggaaacaaaaattttagtgcaggatttaaaccaaaacactagggtttatggaagcaaaggcgagcaactctgggttctgctcaaaggacgacatgttctcttcaggcaatgtgacgaacgcttaaattccttgtccgtccttggaatctatcaacatggtcaagtagcttaacactggggcaacatttccggcaacccaaacggagaaccccatccacagctggtctcgtaaagatcaggtagcttgcaccagctactcacagtattgggttcgtgagtttcatagctcaaccgaggtagcttgcaccagtttaaaactttaaataagtacttgtaactttagttaatctcaacttaatggaattgttggagtttgaaatggccgacttatttggaaacgcaagaagttaacaaacaaatgtcaaacataccatataccgtacaaactctatcaagattataaccacatcaatgatcaagtaaatcaacaagaatttcgaaaaaaatgttttttttttttttcatttgttgttcatgtggcaaaatgcaaaagctaacaattctaaaatcaagcatagatcagacttgaatactcttgacaattttcctttataaaatgaagttgttttcaagttgtgaacgtaaaatgatttaggcaagaagaaattggaaggggaaaagaataaaaaagaaaaatgtaagtccaaaagggccaagattaggagttttcaacaaatatatattttaagtaatttttccacaaaatataattctaattggcaatatatgtaaatacaaatacaaaatcaggtttaaaggtcattttcaaaattttatatgctattttattaagcttgattttggttaagctgttatagtcattctcataaatttatgtgctattgtaagtagtttccgtagcttttatgtaacacatacataattgactttagattagcatcccatttctcatcttcctctttctctttgagcaattatggcagcaatgaacatgattgactttcaaaactgcttcatctttatcctcctatgtctcttctcacgactctgttattctcacttcttcaagaaaccaaaggaccctcgccttcactttgatttacctccgagccctccgtctcttcccatcatcggtcatctgcaccttcttctctctgttctactccacagatctttacaaaaactctccaccaagtacggatctattctctatctccgagtctttaggttccctgtagtcctcatctcgtcagcctcaattgcatatgagatcttcagggcacacgacctgaacatctcgtaccgcggtttcactccgaccgatgattcactttttgccggatctttcagctttatctctgctccctatggagattattggaagttcatgaagaaggtcctagttacaaacgtttttgggccccaagcacacgagcagtcacgaggtgtccgtgcagatgtgctagagcggttttatgggaatctgttcgataaagcgataaagaagcagagcgtggagatatgtgctgaagcgttgaagttatctaactccagcatctgcaagatgatcatggggaggagttgttcagaggagagattcagggctttggctaccgagttagatgttttgacaaagaagctcttctttgcaaacatgttgcgagcatggtttaagaagcttgttgtctctctgtttaaaaaagaaactacagttatttcctacagattcgatgagctgctcgaaagcattcttgtggaacacgaaaagaaactggacgtgcatcatcaacgtacggacttgatggacgcattgttggcagcttatcgggatgaaaatgcagagtataagatcacaaggaaccatatcaagtcaattattgcggtaaatgtttctcccatcagtttgtttcattgagattaaaatctgatccgcctaagataacgttttgcaattgcaggatcttttatttgcaggcactgaaaaccaagtgcagacaatacaatgggcaatggcagagatcattaacaaccctaacgttcttgagagactgagaggagaaatcgatagcgtggtaggaaagtcaaggttgattcaagaaacggatttaccaaagctcccttatttgcaagctgtggttaaggaaacgataagactgcacccgccggggcctttcttcttaaggttcacaaaagaagggtgtaggatcagagggttctatgtaccagagaacacgtcagtcgttgttaacgtttatgctgtgatgagggatcctgatgcttgggaggatcctcttgtgtttaagccagagaggttcttagcttcttcaagagcagaacaagaggaggagagaagagagaaagaaattaagtaccttccttttggaagcggaagaagaagttgtcccggagaaaatctagcttatgtcattatgggaactgcaattggagtgatggtgcagggttttgagtggagaaccacagaagagaaaattaacatggacgaggctgttgtaggactgagcttgaccatggctcatcctcttaagatcattcctgttgctcgaacctcaaactctttaacttcgagtttgcaaaaatgtttgtgagttttcacatattatgtatgatagttgaagatataagcaagttgtggctttgtatatttctgtgtccaagtttcccgctttacgtgttgacctctctatagtatttttccagtcattttagcgggaaggttaaaatgcatacgggtacatttggtacccgacccgttaatctattttgtttattaaatcttacttgggtcggttcaaataaaactcgattcttaacaccttgttcataaataagtcttccaaaatagttgagatcgaggaagagaatatgaagacatatgcaattattcttacaacaaaattttgaatgttagagattgaatctcagctataaatcttggcaggaaagcactacaaacggatatggatgtaaccattgataagtctagtaaacacattatacatgaatattatgcatcacgattctaatcactacagatatgttataccgaaagattggaaagttcacaaagaacttcaaaataatcactcttacaacaaaagtaataataataattaaaacgttggataattttcttcagtgtatgtagagatagttttcaacaaaaaagttaaaagtaataataaggttactacctaccatatatggtctggtgtacttgcacttattagaaaatatcggtccaacccatgcaaatgatttgttttttttgataaacaataacacaataacttgctatccaaggcttttccttttcaccaaaaaataaaaagcttttccttgctcgcagcccctaaaatttgagaaccggttctgactctaatcattgggccaacgaatacatgcacttgattctcttcctcagccttgctgaagtgctcatgatgtctttgtcatgcatgtgctagtttttttctttctttttaaagtttgcgtaatagcttaaactgaaaaaaaaaaaaactatttgagttcaaagaataaaagctaaaggttatacaatactagaattgtggaaattgagtcttagatatatattataaatttttgacaggtacaataattaaatatgtaagagagtggtccttagtgccggtctgatttaggtggtttaaagcatttttaaaacatgtgatctttaatacaaatatttaaaaaataaaaattatattaaaatattataaaagtaatgaaaattattgagtatttttagtaaagtgtaaaatattatactttttataaaaacgaactttctaaattattgcagcaaatttattgtttgaagacgttttctttgagtgaaaagaaatcttttatttataaaagatttgataaaaaccaaatattaaaggtttttgtgccaaaaataaagtaaggaaaatgaatgtcgaaagaaaaaaaatcacataaaaggtaaataaaggatctaatccgtaacgtctattaaaacattgaaatacttaaccagcagactaaataaataattctgaaaatgtaatctttcaattaattttatatttgtggcataaatcaaatgcttcacttgtcgtatagacaggctggacatgatgtaccgcttccttatggtctacatatataactccaagccaccgcttagattcggggttgataaaaccttggagctcagtttgcatgtcaacatggaacttggaaagtgaaaagataagatgaggtaagatatgaaacaaattttcggatgttttcgtatttttgccataaaattgaacaatgtgtcgttcatgcacaaggaggatcaattaatgaactgaactaacctagagcaacgtgttttcctttcttctgccttttctgattcaaaaagttgaccaaagataatgacatacacattagtgtaccaagtataaactgggacaatgccggttcggtatctatgaatgccctacacaaaaacttaaaaagatgcctttttcatatactgttactatataaatcataccaataacaatagtaataaaaatgttataaaaaacaatagtaataaaaaaaaaatcttactaaattttaaataacagtttaaaaattctaaaaaacagtggaaaagaaccacaaaaaatgttgctttgacaatattttaacagcaatcaaaaggaaaaaatattatagcaagggttgtgtgctcgtatataaaatattaaaattaaattatatgaaattttgtgctttgacaattatttaactcaaactaagccaacatgttagtttgatgaaaaagctagcaatccatcaatttaaaagaagaagaaaaactaaatggagtggagaattgacaagagaattcatcaaagacacgaaatatttatgttgattagtggatggaacttaggataagctttgatcattggtatttggtagaatatgtaaatgacggtttattggtaattaactacgtcataccagctgaggaattatattcagaaaagttaaaacataaatgatattccagtagtttacatttcttgcattacatcttgaagatatatatagattcggtgtatccaaatctttattgaggaaacaacaaatttcagtacaggatttaaaccaagacactagggttcatggtagcaaaggcgagcaactctgggttctgctcgaaggacgacatgttctcttcaggcagtgtgacgaacgcttcaattccttgtccgtccttggaatctatcaacatggccaagttgcctaacacgggggacacattcccaacaacccaaaccggagaatcccatccaaagctagcctcgtaaagaggtagcttacaccagctactcacggtatagggttcatgagtctcatagctcaaccgagaatagttggtgagcatcagatttgctagtttcgaaccgatcatggaagatgagtcagatgacccaccctcgtctaggatcacagttcctaactcctcctttttttttcgtaagtctctaacggcctcttcaattttaacttcccctcctcgaccaatactcaagaccacagaagagaacatgagatttccgatagagctttcttgcagaagggaaggtatcttggaccgcaagttagcaagctggaccagcactttgtgatcacaagtagttgtctttgaggatgcgacgaagcatttccagatgagcgcagtaacgctctccacccgcgtaggttggtctactgtttcttcactagcggctttggtcctgagatcttccaccttagaagcttcgaacacaaatctctttgtaatgctgcttctcttgccggcttgttcgtccgcaggtagcttaaaagcctcattggctggtgggtagaaattcgcaccagcaaatacaggactttccatcgcagcggcatcgttctctcctcgagccgtggcggcccaggaccgaatgaaagtcgagatggaggctgcgtccgcgattttgtgagtgatgcagattcctatggccatgcctccgcatccgaagtaagttgccttcacgagcagcaaaggccacgtggcagcagccacgtatgggttgtctacaacatctagaggaagcaactgttggagggcgtcgaaatcagggcacttgagaaattcagtgagaggacagttattgacacgagcatcgacaaagatagctccttcatcggtacaatcgacggttactccggtgattcttccggcaagagggtagaacttggtcagggtttcagacagagaagtcttgagtttgtgggaagtgtgttcttgagagatcaaatcatttttggtgtagaagagaaaggctactgtgtaaactggaggaaggatgtgatcgtaaattgagagttggagagtttggagattatttggagttggcgaagatggctttatgatttctttactaatggtttcaaccttcatcgtcatcgtctccatggatttctctcctctttagacgaagagaagtattcctttatagcggtagaaaatgactgttttagactgtaaaaattagtagttaaatatggaaatacgtcaaaagattctctaccgaatataaaaattacttggggagctgtagtgtaatcatgttggcgttatctcattgatgtaaccatattcgtatttcgttacaaaaaattattttcattgattaatttgatttatacattttgtcgtgtatagaatataaaatcttagccaccacatgcattctgattgtttgttaatttttatattcaatactctaccataattaggagtggccatccgggataagcggatcgggttccggtaaaacccgatcggatacggattagagcatattaaagtagtgatggtaaatattaagccttgaagtagtgcttagagcattttcattaatggttaagatagtataatataattatttatcaaattttaactttaaaagataaaccaattagacggagacatatgaaggaagggttcttattaatataccaaacattttcatttgagtacacttcaatttttctcagtaatttatctctttctctttcacgtttttgttttaaatttttctcaataatttagtctaataagatgtcgttttttctggtgtaaatgtttaattaatagagatgtccctatagcgtgggaaaggatactccataaataaaatacttgatctttgaaatattatgcatattacttcaggattattgttggtttaattgaagcatgttatacttatatatactaaaggatttatagttttcgttgaatgtaaaatttgtgagttggggaagatggctttatgatgtatttaccgatggtgtaaccttcatcatcgccacggatttctctcctctttgctacaagagtaatcaaaagttgatctacagaccattggaaagatctgagtcttactttctagagagcctgaaatctcttcataggggttgccatctgagagttaacgtcgaatctgtgcatccactattagtaattgacgaattcgtgctctacccgtctaaaaaatggcgataaattataatatatatatatatatagctaatgtatatgactataagaaatgtgtattactatgacaataattaataaataatagtgttttgaggttaattttttagttgataattgttaccatatgcaaatatttttagtaataatttgtgaccatttaagacttactttcatcatagtgaatgataaactgaaacattatgatagtaacaaaaaccacagttttgagtaattgtttcgaatatgcgacaaatttttaattatcactagtgaccacttgaggctataattatgtaattaagatgttatgttaatcacgaattattacgattttgaagcgatgttatagtttgtaatttaaacagttttcttacttttttgtgtcgtaactatttgggacgaaatgattattagatatatttgtcgcaactcttgtgacgtttttgttacaaaataaaattttgtgattgattgtattgcaacaactcaaaaatcgtcaaaaactcgtaatatgtttattttgtgacaaattttattattattattgtgattaattattacgtcttataatattattttcttgtagtactagaaggaggatgtgtacgaactgctcatcttcttttcaaactttggagttgataaatgaaaggtcacaaagggtttcttggggtcagattgcttgatttcatgtgacatgatttaatcgaatcaaattcttaggttgatccgatccaaagccatacacaactaatttttataaaaaccacaaccttagactttcgtacaacctcatatgtgacaagtccttcaaaaaaaaagagagaggtaaaagtcaaaaaccgtaaacgaagcaactcgtaactacaaactctatttttagatctacgacctaccacaattgtacaatatctttctttatgtttttttcttgaacatcataaagcagatttctctaatttacaagcatggtgcacacaccagaactgtggccatctcctccctttaacccaatccatcaccgcatcactaattctactttagccacaataattcaaattttattgtatctcgagtttcttcaatgtcttgtatgtaacaattctctctcgtaaaatcagtttcctaatggtccacacctatagtgaatagatcctacccccatttatcggaatgtagttttttgggaagactataatttgagaatgcgttccaaccaaaaatgagatttgacctctctattgtatctgattggtaacataaagttgtacaaaatattttagttgttagttcgagagataaactgttatgaaatagtgtaaaactgtacggaaaaactgtacaaaaaagttgtacaaaagagatgagagtaacacttttaataatatttttgtgattgataaaaataatagttgtaccacttgtaatactttctttttgttcaccgatcaaaaccattgttacacaataattattttcatttccttttttctaacttcaaaatctacaaccactccatctgtattcacaaaattctttatttatattttcatgctacattttcccttgattagactaagaaaaatcaaaatattaagagatatctcttcaactagtgaacatgggacaaaacaaagataaaaagaaataaattgttatgtaagctttgagtatttttattggattatagttttcaaagtcttcttcttaatttgtctttttgtactagtagttaagattttttaatatgattctatcagtcataaatgataatctaaatttgacatatcaacgaatttactataatatgaaaatactagatcaaaatttggtagaaacaaaatattggaaacagaagcatgaaaggtgaaacaatttttactgactttaatagtaagtctagcattgaacatgtaattctttaatggcaaaagatatgcatcgaaagtatcataatatcctatataacactagtatccatttatattatatgcatcaaaaatatcatttatgaataaatgatagtgtaaacctgtacaaaaaagctgagagcaacgcttttgttaatacttttcataagttttttgtgattgataaaaataatagttgtgccacttataatactttttttttgttccccaatcaaagccacggttacacaataattatttccatttccttttttctaacttcaaaatctacaaccactccatttgtattcacaaaattctttgtttatatattctgtctacattttgcctagattttactaagaaaattcaaaatatttagagatgtctcttcaactagttaacatgggacaaaataaaaataaaaataaataaactgttaggtaagctcttattatttttgtcggattatagtttgttgaagtctttctcttaatttttgtttagtactagtagttaggaatttttaatatgattatatcagtcataaatgatcatctaaatttgacatttcagctaatttcctataatatgaaaatagtagatcaagatttggtagaaacaaaatattagaaatagaagcatgaaaggtgaatcaattttactgactttaatagtaagtgtagcattgaacatggaattctttaatggcaaaagatatgcatcgaaaatatcataatatcctatataacacttgtatgcatttatattatatgcataaaaaatatcatttatgaataaatgatagtgtaaacgtgtaaaaaaagctgagagcaacgcttttggtaatacttttaataaattttttgtgattgataaaataatagttgtaccacttgtaatactttctttttgttcaccaatcatagccattgttacacaataattatttccatttccttttctctaacttcaaaatctacaaccactccatttgtattcacaaaattctttgtttatattttctggctacattttccctagattatactaagaaaattcaaaatattaagaggtatctcttcaactagttaacataggacaaaacaaaaataaaaataaataaattgttaggtaagctctcagtatttttgttggattatagtttgttgaagtctttctcttaatttttgtttagtactagtagttaagaatttttaatgtgactatatcaatcataaacgatcatctaaatttgacatttcagctaatttcctataatatgaaaatactatatcaaaattgtggaagcccccttaacctaatggttaaccaaaagttcattaatgcttctatatcaagaggtttggggttcgagtcccagctaatgcgatttatgttatgtacaattatagtatcatttatgcaccaaaaatattatttatgtataaataaaatacataatatcctaacagtatttatgaatttgcatcaaaaatatcataatatcctactatataataacataatatcctatgataaaatggaagtagtcatttctcgatgaatattgtatatttgacgtaaaaataactacttccattgtttttttagtattattattacaaatggtttgcactaatgctgtattatttggcaggacactgtatagcccaatttaaaaaaataaaaaaaaagcaaatgtcataatttctaattattaaatttgattttctattttttatctcgttatttataatttaaactcaaatagttcaaaattttcatatgtaaaatatattgttagaagcaaatctcattgatgtcaacactaatcaagtaaatggtggttgggttatccgagaccacgaaggagttcctaaagcatggggttcgtcattgttgaaactcacaacatcaccactagaggcggaagcactagcactactttgttcattgcaacaagcatggattcgagggttcaccaaggtatactttgaaggggactgcaaaatcttaattgacagcatcaacaatgaatcaatagattcatctatcaccggcatctacgcggatatcaagttttgggcggctaagtttaaagaagtttatttctctcatgtaaatcattgttgtaaccaagtagctcataatcttgctcaatatggaagcatagacactagtttttattctgacattcaaaatcctctcacttggattgtaaacattttgtatgatgatctttcaaattaattaaaattattttgacggaaaaaaaaaagcaaatctcaaatcccatacaatttttagaaaaaaacaatggataataacaaaagagaatttttcattaaggctaacaatacttttaagttaatttaaacatgagatgtccgtttgagcaagtcgatatttatattatattattttctgatcgaaaaatccatgatcaatcttgttgtttttttccgcaaaaaatcagtatttattgagatttgtcaaaaattgaagttcgcttgtgacaaccgaggagttgacttagtggttaagtggctgtattcagtcgagcattctactttacgtgattaaaacaaaataccaaatcctaggtttattcaattatgaatatttaaaagttttctaaaatccaatgttattaaatcagtgatttggaaaagtgctttgaaatctactgttattgtatctcatcttttcaagcattggattttaaggattttcagaaattttagaggattgtattttttaatgattttaagatgttttagaggattttcttagttttaaaacacacaaatctaaatttcataattttaagtaggatttgggagtattattttaaaaacatcatcttcctaaaatcatcgtattcatataaattattttaaaactcaatcatttaaaatatgtgattaaatactataaatctctggattactaaaactttaaattcgcgtggaaaaggatgaacactcgaaaatcatttttattttcttttttactttgcatctaaatgttatatttttagttaataaatatatttttcaagatatatggtttcaacttgtagtgttgtttagaataaattaaggggtgacatgaatatagacatggttgtggtttgttgtatgtccaaaggcattttgttatgtgaaatttgattagtataaattaatagttgaaattgttattattattattattatttttgaatatctcgaagttcaagtataaaggccctatatcttataaatttgattcaaatattttaaaatatgaacaaccaaaaacgaaaagctaagtgcatgattagttgggctttaagtctgacttacaaccttaattttttttaaatccttgattacaaaccaatagtgttgtagctttatgtttaaacttacagcctaaattattattattatttttgtaaagctgtagtagagtaaattctcaaagccctattttcttggttgtagaaattttaatttattagataaatacaagaaattaaaattatcaacttaaatatataataaaaaaacaaagataaataagagtcttctaatccttctgttatgatgaaatcgatttctccttcttcttaaaccaatgccagaccaacactgaaccatgatccaatcaactaatccgactaaccaagtcgacatcaggcttaaccaaggagatttgaatcacaactttacaattcttactgttaacaaaactaaggtcttcacgtcttcgtttggtgttttgtagtttgataggcctctctctcttgagatttcagaacatcgatattgacaaaatatactaaactaaggctcgattgagtaaaaacaacaaaatcagtaatcagatcttgacttcatctggtttgtaatttaacgacttgccaattcacctattgcccatgatctaattctttaaaccaccagaagttgtattgaactgattgatctattttttattttttttttttttgaatatttggaagttcgggcccaaagaccctatgtttctcagagacggaacccatagtagattaaattcatctcttttatagagagattccttccaacgtgaaaccattcctgaattgcttagaatcttttctaaattttgtaaactcttttctaaatttcagtttttttggcaggaaaatttgagagtagttttctacggaaaacttttggtgttaccagaaatgtttttgcgaaaaacttttaacgaaaaaattttgggcaagaaaatattgtcaggaatttttggtgataaatttacgtaattttttaaattttaattttaatattaaaaataaaataattatttaaatactatttttgtgcaaaaaaaacttttaagtactatttgtgaaaatttctcattttcaaattgccttaggattttatgtttctagccttctaggcccttttcggttatgtctatcaaactcaaagacaaaggaattaattggtcggccaagggacctttggttttggagttaatcttgaatatgattatatgaaatatgtcttaatatgattatatgaaatatgttaatcttgaatccaataaacgtccgagctgtggaaacctccagttaaaagatgaaatacaccaattttctcctttttcgcaaatctccctaagctcttttaaaaaaatctcaatccacgttttatccatattgtggaactgtgaacccaaaaaaaaaaatctgtattgtgaaaaacatcattaatgatacaaactacatcatattcactaattaaatcttgtaaatgtgatgcaaaaaatcatattttacataaattacaagtggtttgtaccatcctactatattatttgggaagtatattttaaatataaccttaatttctgtaattaattacatgacaatgtcattagaaaaatttaatcaaaaacaaaatcgtttaatgacgtcattaacaaaatcatttaatgacaatatttatttcttaattatagggcttattggatctaaagacggatcatcaaagattttctaaactgaagcaaaatatagtgaatattcaaatatctatctgttactaaatgataaacaaataagttaataagtcaataactatttagagtgacgggtttttgaatcaacattaataaaaaaaagtaaaatataattaatccaccgtttcaatacgagttaaatcattaatttattaaacatatcaaatcaataatatttttaaaatattattaatatgttgttttaataagagttaaaacttcagttttttaacaattgtctcatgtattcgtcgtataacgttacttaataacaattataaactgtaaaatataaatattttataaaaaataaaatttgtaagttttaatatatattacctttaaaaaataaattgtcctgcggtgtaccgcaggttaaaatctagttggggtataaatcgggaggatgatgtttaggccaatttttataaaacaagtgtcctgagtcttattgtatacaataggagtgtcaaaatgggtcaaaattcatgagtcaactcaactcaactcaacccatgaatcctaataagttgaaatttttgactcaaatgagttgatgggtcaaatgagttattgagtcaattggtttgatgagtaaaatgagttgagttgtaatggttaatggtttcagtggtttacccaattaacccattatattttgtaaaattgaattaaaccaactaaaatctctaaaccaatatcaatttaagtttaaccaacacatgtaaaccaatttaatacaatcattatttttccaaatttcttaaatatacaagcgatgaaattaagaaaaaataaaccggtgatttttccacaaaaaaacataaatccgttattttcccgccaaaaacgtaaacccatgattttcccgccaaaaacgtaaacccgtaattttcctgccaaaaacctaaacccgtaattttcccgccaaaaacgtaaacccgtgattttccgccaaaaacgtaaatccgtgattttcccgcaaaaacgtaaatccgtgattttcccgcaaaaaacgtaaacccgtgattttcccgccaaaaacgaaaaacccgtgattttcccgccaaaaacgtaaacccgtaattttctcgccaaaaacttaaacccataatcttcccgcaaaaaatgtaaacccgtgatttttctgctaaaaaagtaaacccgtaatttttccgccgaaaacgtaaactcgtaaaaagtgaaatccgtaaatatcctaagtttgatgatagtgaattaataattattaataatggtaattatttattattgtttaataataatatgaattaaattattacttaaatgggttaacccatttaacaactcaacccattttgtaaatgagttgggtacaaaatgagttgggtcaacccataactcatttaaccttaaactcatttgattatgagttgagttgagttgggttacccattttaacatccctagtatacaacttggttttaaagttactcataaacatgatcgtgacacatgtcaaatgtttatataaatatttttaacaaaaagatatatatactaatttaaaaataaattaaattttctttcccataatccaaaaacgaaaatgtataaaatattaaaaatgtataacgaaaaacaaaaactaacaaaacaatatataattaattttatattaatggttataattaatcaacgacttgccaattcacctacgtactactagttaatcgaccagagagctagactagtataaaagagatagtgcctccctcataatttttatatccaaaagactaggaaaaagaaaataacttaacatatggtagaggtttatgagttctgggccgtgatagtttcactcatagtggtaaagctgtgtcactggatctaccagtggaaaaatccaaaaggaaatggaaaacttcctccaggatctatgggttatccaatcatcggagagactttcgagttcatgaagcttcatgatgctattcagttaccaacattcgttaaggagaaattactcaggttattgatttattcattggtttcttttttattgtcgtaattaacttatcaactacttgtttgaccactacaaatgaaatataagtcagcccataaatacataaaacttaattattcctgaaatttttataagaaatgattatgataaagtttatcgatgaattaatattgtactataatttaattttaaaaaatccaaacatatcagttatataaaactgtggattttcttacttccttataagaaatgatcggatgtttttttgtatatatagttgtatactacctgtaaaatatattgaaatttttttaaaaaatgatgaatgatatctcgtaaatatttacttgatcaaatctctatacataatcaaatatttttagttaactctgtcttttgataacatttaagcgacaaaaaaatattgagaatgtttgcttcttgagaataagttgatgacgtttactcctagcttagtaaatttccgtgtcttactttttgcatttttcccaaaaaaattagacatggaccagtttttaggacaagcttatttggaggcaaagttatcatttcgactgatattggattgaacatggagatcgcaaagacaaatcatattcccggtatgccgaagagcttagagcggttatttggggcaaccaacttgtttgtgaataaggatactcataaacatgcccgcagcttgacaaaccagtttttaggttcgcaagctttaaaattaaggatgattcaagacatcgatttcttggctcgcacacacatgaaggaaggagctaggaaaggctgccttgacgtcaaggaaactgcaagcaaggtaaaaaaaaagtcaatccattttttacagtttttgtaactcataacaagattacattctctcgtttaattaacaaatcatcctatcaaatacatcaaacattacagatcgttattgaatgtctttcgaagaaagtaatgggagagatggaaccagaggcagcaaaggaactcacactctgttggacatttttcccaagggattggtttcgattcgcttggaatttcccggggactggtgtctatcgcatagtgaaggtgcatatttttcgatcatctagctttaatatatgtatagtactgatcaatatgcatgcataggatttgggtggaaaaatagatgcgtgcgttgtgttttgatgtttgtctcaaatagcaatgaccgaagtgcccaaagctagtttaaaacattactacacaaaatcgccatgcttttatttctttttcaatctttttcaataacattccctgagggctttcatatattcttgaactgagcatgtattttttataggcaagaaatcgtatgatgaaggttataaaggagacagtagttaaaaaaagagcatcaggaaagaaattgggggagtttttcgagaccatctttggagatacggaaagtgtaactatgagcatagagattgcgactgagtacatatttactctgtttgtgcttgctaacgaaacaacaccaggggtccttgcggcaacaataaagctcataagtgataaccctaaagtcatgcaggagttacggagagaacatgaaggaatcgtccaagataagattaagaaggatgagacagctgacctaacttgggaagactacaaatcaatgacttttacccagatggtgagtatcccaacgaaaccatatattataacttaacaaggatgcaaatatattaattaacatgcaaatatattattagatacgtaacttcctaaatataataatgacgacttacctaccgtttacttcctcgcaaatgaataagaaagaaaaatgcacgtttaatacttacttataggcatgccattatcaaccaaattaatttaaataataaacttagcaataatgcataaatatatatttagtaagaaaaagttataaaatatacaagtaatatacttgtttttatttttataacgaaaatatgagctatttatttataaatgagagtttaaagtcagaagtacatgcacttccaatgtattccgttttggtttaggtgataaatgagtcgcttaggatcacaagcacggtaccaacggtgcttagaataattgatcatgagatccaatttggtgattatacaattccggctggttggatctttatgggttatccttatgtgcatttcaatccagagaagtatgatgaccctttagcttttaatccatggcgctggaaggtgattttaatttgatgttcatcttttattttatttttacttacactaatcaaatttttaggaatttaagcatgcatatattaaactaaaatttcagggaaaagacttgagcacgatcgtctccaagacttaccttccctttggctctggtactagactatgtgtgggagctgaattcgttaagttgcaaatggccatttttatccatcatttgtttagatacaggttcgttttttctcatttaatgactctacgattcaagccaagtttaactgcactcaaagtttttttttacttacgtttattacctatggtgtgaaggtggtcaatgaaggcagagactactttacttcgaagatttatacttgtgcttccacgtggatctgatgttcaaatctcataagacaccaaacaggataactctgtatagtgttatgagagaataataaaattcagtttctatacctttcactctttctccttataacttttcatgtagttttggtatcatagccaatttcgatttttctagtatttgctttataaaaaatatatgttattgaaagaaagaaataaaaattgttaactgcacaaagtattgtagaataaaatacctgagcacacgtaccaaatttaataatatatagccaactacgcatatcttatattatataaatcagatgcatgtccacataaaaatagatattacaagagaagtataaaaaattcctccgtctgaccccatccacataaaaacacaacgtgctaattacacgttatagaacaatacaaaataatagaggtctcagcgagccaacaaacctaaatcatgcaaataatcttaaaatatatactaatcgacaagagagctcactagtatacaaagagagagagtgcctccctcagttatcctaaatcaatatctccaaaaagagttagaaagaaaaaaaataacttaagatggtagatctttatgagttctgggctgtgatagtttcactcatagtggtgaagctgtgtcactcgatctatcagtggaggaatccaaaaagtaatggagaacttcctccaggatctatgggttatccaatcattggagagactttcgagttcatgaagcctcatgacgctattcagttaccaacattcgtgaaggagaaagtactcaggttattgatcttatctattggtttggtttttgatcttacctacatatttgacaactacaatgaaatattagtcatcctataatatataaaattaattaacattgaacgcttttaagaaatgattatgataaattttatatcgatgaatttatatagtattataaaaaaaattaaaaatctaaacacatatctattaaataaagagaaataacaaaactgtggatgttcttacttccttataataaatgagcggatgtttttgtatatagttgtatcctacatgtaaaacaaattggataatttttaaagaaatgattaactgtatctcgtaaatattttactagatggaatttatatacataatcaaatttcaaagaacaaagaaaaatcgtaataaattaaacttctctttggataacatttcagcgaaaaaagaagaagcaagttaaggtttgcttcttgagaatatattgttgaagtgttttttatttgaaaattcccacaatttattaagaaaaaaattaacgatttgcacccgaacatatctagtcctcataatcaattcctccgagttttattagtagattaccgtgtctcaatttttgcatttttttcccccaaaaaaaatagacatggaccagtttttaggacaagcttatttggaggaaaagttataatttcgactgatattgggttgaacatggagatagcaaagacaaatcatattcctggtatgccgaagagcttagcgcggctatttggggcaaacaacttgttcgtgaataaggatactcataaacatgcccgcagcttgacaaaccagtttttaggttcgcaagctttgaaattaagaatgcttcaagacatcgatttcttggttcgcacacacctgaaggaaggagctaggaaaggcagccttgacatcaaggaaacgacaagcaaggtaaaaacaaaaagtcatccattttgatagtttttgtagctcataacaagagaactttccacttaataaatcatcttatcaaattcaaacgttacagatcattattgaatgtcttgcgaagaaagtaatgggggagatggaaccagatgcagcaaaagaactcacactctgttggacatttttcccaagggaatggtttggattcgcttggaatatcccggggactggtgtctatcgaatggtgaaggtgcatattttttgatcatctaccttaacaagcatgcataggattgcatgctgtggtttcaggctttgttccagaacctcttggtatttaaaaagtaataatactaagcatgcataggattcgggtggaaaaatatatgcgattgtgtattcatgttttgtcgcaaatagccagggcctataaccctttttcaaaaaaaatattacacaaatatttaacattcccagagggccttcattttgtcttgaactgaggaagtgtattttgtgataggcaagaaatcggatgatgaaggtactaaaggagacggtacttaagaaaagagcatcaggagaggaattgggggactttttcaagactatctttggagatactgaaagaggcgtgaaaactataagtttagagagtgccaccgagtacatatttactctgtttttgcttgctaacgaaacaacaccagcggtccttgcggctacaataaagctcataagtgaccatcctaaagtgatgcaagagttacagagagagcatgaaggaattgtccgagataagattgagaaaaatgagaaagctgacctaacatgggaagactacaaatcaatgacttttacccagatggtgagtatccaacaaaatcatttctatcatcactttcaaaatttatttcaattgtaaagcaagacaataatatacttaatcaaaattttaataagtcaaaaatttcaaattaaataacaaaacttagatataataaacattttttttatttttatgtaaagaaaatgttaatttattttaaataaaattactctcatgacttacatatatgtcgttttggtttaggtgataaatgagtcgcttaggatcacaagcacggtaccgacggtgcttagaataattgatcatgagtttcaatttggtgagtatacaattccagcaggttggatctttatgggttatccttatgtgcatttcaatgcagaaaagtatgatgaccctttagcatttaatccatggcgctggaaggtaatttaaatttcatctttatcttttaattattcttaatttacactaatcacattcttggaatttaaacatgcatatattaaactaaattatcagggaaaagacttgagcgcgattgtctccaggacttacattccctttggctcgggttctagactatgtgtaggagctgaatttgttaagttgaagatggccatttttatccatcatttgtctagatacaggttcatttatttatcacttaattactccacgattcaatttaattttaactgaagtcaaagtttattttatttacgtttctatacctatggtgtgaaggtggtcaatgaagacagagactactttacttcgaagatttgtacttatacttccacgtggatcagatgttcaaatcttagaagacaccaaagctaaataactttgttggttacttggttattagaatgattgtattacattgtactatgttatgcgataataataaaattcagtttaaaacatttctttaccttacactctttctcctcaactttccgcaccaaagtcgttgctaattgatatcctttggttccaaaaatggaaagtgttgactttgtggggttcatgtggttcacctcctatgtggtctaatgtgtcttcatgtttccatatgaagcattgaggcgagtccaactgaaaataaggagagcttccttatatgactccaagtcgcctgagacggatgcagatatccaggatttttaatggtatctggatctggattcttcggatatatgtttttgatatccggatccgaatgcgtggacagcggatttccggacgtcatatacccaaccaaaaattcgtaacccgacagatatttggatccggaattagatccaacaaaatttcttaacttttatactatttgggcttttgataagtagaatatatttttgtagagttgaaactctcggtgtccaccgggttcgaatcagttctcttcggattttggattctcgtgttcatggatccgggatcaaagattttcaatcattccgacaattttaaaaatttgattccgtttagtattatttgaattgtgatcgatttaattatttgaatgttgaatgtagaagtagaagacatttcacccaaaatggtgagtttgtgccataatcatatatatggtcacaaaaatcacacattaatatatcaatttactcataatcaattagttttgagttttatgtccatcaatcatgatatatatagtagtttaaacaaagggtaatattaagcaatagccaaatttgacatcataataaagaaactaactatgtgtcagatttttttggtaaatgactctttttgtagtggagtaagggtggaaaatgagagagaagacgagaaagaagatgtttcagtaattttatttgcttttgcgacaagatactattgcccatagtcatttactctattcttattgatttcatggttatttcttacatatactcttaaacgaatatggtgtttcatttcaggtgataaatgagtctcttaagatcacaagcaccgcgcctacggtgcttagaataactgatcatgatttccaagttggcgattatacaattccagttggttggatcttcatgttgtgcatctattgaattaatgatatacgcttaacacttagtataacatgcatggtggtcgtgtaattatcccaaaacaaaaaaaaatgattcatcataagttagtgtacgatgggtgaggtagaattgattttaaatttaaattgaccaaactcaatatctatatcttttaggcattttacgtcagtcttgtacaagccttaaaacaaccagacccatgaaccgtgcctattggttaaaaactaagaaaaaacattgaaggaaatctacactaaacacttaaattatcatgaagtagttattagtaactggaaaaacaaattgacaaaacaaataaccatatagagtacaaacaagatcaaggtaacatataaactgaattaacatggaacttgaaatgattggtcactttattcaaatcacaacgaaaagcgaaagccaataattaattaaatccagcgtagagcaattggtagtagtcttgtttatgccacgaccgggggatttaggacggcataagcaagcaactcttggtcatcgacaaacacggacatgtcttcctcaggtaagcttatccatgcttctacaccatcaccttcttttgaatcaatcaacacgacacccaccatgttgtcgtaaatggtatgtgacgcgtatcccacccagaccggactacccgatccgaagtcaacctcgtagaaaggctttctgcaccagctagacattatgtatcggtctatctccgttgactctgacacagtttccgccatcaaactcaacaaactctgaccaattgtattgccttgaagactctctttgatcatctcgttgactctctctttgttcttcctgaatgtggccacgatttcagggatctcaaactcgctctccgcgtctttcttgagagaaaatccgctttgtaggttaccaatcacgtcttttggcgcaacactagatggaatcctaagtcgaatgtccatggcctgccacatgacggcttgccttggaattaacaagttagagcgtgaggagtttctagcacatctccagataagtgacatgatagcttcaacacgtgtaggcacagggacgctttcgctagcggccttgtgtttcagctcagcaatcttagaaggttcgaagacgaatcttttgagtacgtatttacttgtgatgttagaatcggaatccgttgatgggaactgttcatacatatgagaaggaggaggaggataaatagtcgtttcagcgaactcgatagtactgtttgacttccctttggccgtggtggtagcccagtcttttacaaaggtaaccaatgaggctatatcacagattttgtgagagacagagacagaaaccgccactcctgatccagacccgaagaaagtgaccttgacactcaacaacggccaggccgctggagattctccagcagctagtgtcgggaggaatcccgacagggagtcagtgttgaggtttctaaggaaatcaggaagaaggagatcggtgcgtgcctcggtgaagacggctccttcgtcgttacagctgatggaaaggccttctattcgtccagctagtggatagaagcgtgagagagtctcggacagagagagtttcagattttccgagaaaacctccgaggactcggtgatgagatcgtagaagaagatcgtcgacacgtagattccaggacaatagagatcaaggatagagagctgaaggcgatcacgaggtgatggtgaagcaggtttgatcacttctttcccggtcacctctagcttcgcttccatcgtcttcctttaaaagtcaacgggttacaagattgaagtattgaggaaactttgacaagaggagaagatggaagagacaaatggatcagagatgtgtccttttaaactggtagttgaatcgttgatacaagtttcaactcctatccatgtgtccacactaggaacaaaatttaatttaagaaaaaataaagtctgctaacaatgtttatttaattcattcatattagtaaattaaataaaacttcaaatgcttaaaatagacgactatgtaatatttaattggtgatagtaatataattcgacttctaaacaaacaaaaaaaaacatatattgaagattgatttaattgtatttaaaattttagagagcgtttatgaattataaaaggggaaataattttgaaatatatagttatatatatagaaataaaataaaaaatcagaaagaaaatataaacgttatgagaaagaaaaaagagcaaatgatagtggcatataccaactggtaaaacttctaagaggattgtttgttaaaagtctcacatcgaatatgagactgagccctagtccaaaaattactaaaatggtcaaaatgatttgttcaaaaagggggtatggaacctcactaaaataatagtggttgcattttagtaagtgaggttagactaatggttgaattttagtaagccaaaaactttccatcagtaattgctaattggatcaactaaatgccatcacacaaagaaactattgctgaaattgaatattgatattatcaaattttggtatatctccaacaaccatagtcctcaacaaacatagagtaagtctagttcctaaattttcaatatctagctgtttttttcttttcaatatccaacttagtaaacacattgttcagaaacacgccaaaaaaaaaaatcaacacatctcaaaccatcattatccagaagggtacagtaaatccagttcctagttttcgatttctaacttcaaaaatgctctctttctacatacacttttttacaagtctctatcacagaatcggaacatgtggatagagcaatggttagtagactcttttccccgaccactctttgacgttcctcgataaatccgaacctaatgatcaatgaacacgacgagtcatttatacaaaggcaacaacaaaatgtggtttcttctcagtttgcttccttgaaaatttagctgttatatactaaaaggccttttgtaaggctaaaaggccaagcctttgggcccattaacatcaccgtttattcgaaacgtatgttgttaagacttgagagaagtttgacggtgaaaaaaggaaaatatttacatatatatagtaaaattaaaatagtagaaagaaaaaaatcagaaagctacgaaagaaaaaaaaaacaatctagcaacagaagaagcttcgagaagacgatggcgacggagacgaacgagaatctgataaactccttcatcgagatcacttcttcatcaagagaagaagctaatttcttcctcgaaagtcacacttggaatctagacgctgccgtttcaactttcctcgataacgatgccgccgcagccgccgaaccaaaccctaccgggccaccaccaccttcttctactattgccggtgcacaatctccttctcaatctcactctcccgattacactccgtctgaaacctctccctctccttcccgatcacgatctgcttctccgtcttctcgcgctgctccctacggtctccgatcgagaggcggtgctggagagaataaagaaactgagaatccgtcgggaattcggagttctaggagtcgtcaacacgctgggaatatccgtacattcgccgatctgaaccgttctccggctgatggcgagggcagtgattcggatgaagctaatgagtattataccggtggacaaaagaggtacaattttcaacagatctgatcatagtttggaaaatacttagatgataatactgttgagaaagtgaattagggcaacatgatcatgaacttgagcaatgtgcgtagatcaatgatagtttagggattgaccatatcttgtgtatgtagctgaattgtctttcttgaaattcttatatagctggagaaagtgtatgtttgtgtcgctaatagagttttgtttttggattgtgtaatgtgttgtagtgggatgatggtacaagatcctaagaaagtgaaagatgttgatgaactttttgaccaagctaggcagtcagctgtagacagacctgttgaaccatcaagatcagcttctacaagcttcactggagctgcgcgtttgttgtctggtgaagctgtttcgtcttctcctcagcaacaacagcaagagcagcctcaaaggattatgcacaccatcactttctggttgaatggtttcactgttaatgatggtccgttaagagggttcagtgaccctgaaaacgcagcctttatgaatgtaatgtccagattttctctaattagtaactacaattccatggaaatcaagcttgatacttgtctttactcacttggatagtctttgaatccctaatatatatgttgtcttttgcagagcatctcaaggtcagagtgccccagcgaactcgaaccagcagataagaagatccctgttcatgtcgatctggtcaggcgtggagaaaatttcaccgtaagtctcattcccatctatcaataataatctcgttaacctattctctggagaagccactcataggattcttttaacgtctgtatcttttgactcacaggaaccaccaaagcctaaaaatccattccaaggtgtaggaagaaccctaggagccagcggatctggttcaagttcagcaccacaagcttcatctgccccaatgaacgtagcaccagcaccatcaagagggctagttgtagatccagcagcaccgacaacctctatccagctcagattagcagacggaacacgccttgtctccaggttcaacaaccaccacactgtcagagatgtacgtgggtttatcgacgcttctagacccggtggctccaaagagtaccagttgctaaccatggggttccctcctaaacaattgacagaattggaccaaaccatcgagcaagctggtatagctaatgccgtcgtcatccagaaattctagacttacataactcatcccttcgatttatgtctctctttttttttttttgcttttgtgtttttgaacctgatcgttgactttagtctctaactatctggtcaacgctctagaggctttggattttcgtagatttatcaaactcttttcttcagatttattaataactttagcagtttagcttttgcataatttatttatttcttcaatcgactagctactaccatatcttttagaaagaataatcgaaaaaatattatccaatgagcaaattacttatatccttggactcgtgaattgacgaattgaccagcttctgcataaattccacacacatacgctctcctaatatcagggacataatggtaattaacgtacctgcccatctgtcattttccttgttctcttcaaaaccttttttttggaaaattaattttatttttttgtaaacagttctataatgtctgttattcggaatccaaagaaagccagagatattgagatttacagtgaaaatctacagaggaagagatagcgaaggacaattattaatttattttcctattttagttttcattacaaccttaatcttcgtgttgtgtgttctgtaacttcccagattttttttttctctttgctgggcttcgttgccttttcccctttttttctctttcctctgctctcgattcagtttagggcgagaaaaagtagctgtttttacagggtttatcacaaagatccttccttttttacttgaagctcgccattttcttagggtttctcttgatttcattcatctccagtgcccagatctctctctctactcatctgccatttgtaagctcctcttcttcctcctctctccaaagtttacattttgttgttttctctggatcttcttaagctaatctttgattctgtttatgagattgtgtttccgattatgaatttaggctttgtctacatgcagggctgtgttcaatgattagggttttgatttagaaccaaagcttttgggttttactggtttagtttaggcttgttgcgaagtagagaaaaaaagggaagggttttggcccttttgtggggagataatttagggtttctgtaattatgatcaaacagatatttgggaaattgcccagaaaaccttcaaaatcttcgcataatgactcgaatccaaacggagaaggtggggttaattcatattacattcccaattcgggtattagtagtatctcgaagccttcttcgaaatcatccgcatcgaattcgaatggagcaaatggaactgttattgctccttcttcaacgagctctaacagaaccaatcaagtcaatggagtttatgaagcattgccaagctttagagatgttcctacctcggagaaacctaatctgtttatcaagaagttgagtatgtgttgcgttgtgttcgacttcaatgatccgtcgaagaatctgagagagaaagagataaagagacagactttgcttgagcttgttgattatattgcaacggtttctacaaagttgagtgatgctgcaatgcaagagattgcgaaagtggctgttgttaatcttttcaggacgtttccttctgcgaatcacgagagtaagattctcgaaacgcttgatgtggatgatgaggaacctgctttagagccggcttggcctcatcttcaagttgtctatgagcttcttcttagatttgtggcctcgcctatgactgatgcaaagcttgcaaagagatatattgaccattcatttgtcttgaagctcttggatttgtttgactctgaagaccagagagagagggaatatctaaagaccattcttcatcggatatacgggaaattcatggtgcaccgaccctttatcagaaaggcgatcaacaatatcttctacagattcatttttgaaaccgaaaagcataacggtattgcagagttgcttgagatactaggaagtataatcaacggtttcgctttaccgttaaaagaagagcataagctcttcctaatccgggcattgattccactccacagacctaaatgtgcatctgcttatcatcaacagctttcttattgcattgttcagtttgtagagaaagacttcaagcttgctgatacggtcattagaggacttctaaagtattggcctgtgactaatagttcaaaggaagttatgtttcttggagagttggaagaagttttggaagcaactcaagcagctgagtttcagcgatgtatggttcctttatttcgtcaaatcgctagatgcctcaacagttcacattttcaggtgcgactctcgataagttgttcatatagtctcgcaattttgcaggttatattcaaagttgcttcttttgtcaggtggctgaaagggctctatttctatggaacaacgatcacataagaaacctgattactcaaaaccataaagtgataatgcccattgtgttcccggctatggagagaaacacacgggggcattggaaccaagcagttcagagtctgactttgaatgtgagaaaggtaatggcagagacagaccaaattctgtttgatgaatgcttagccaagttccaagaagatgaagcgaatgaaaccgaggttgtagccaaacgagaagcaacatggaagcttttggaagagttagcagcttcgaaatccgtaagcaacgaggcagtgctcgtcccccgattttcatcttcagttactcttgcaaccggtaaaacttcgggtagttgaacactttctgctctctatcaccgagacatactttcaaacaatccagcagaattgtatcgatccgttcgagcatcaggatcagtccttgaagaagattaagcacgatgattaagaagggcaatatcatcagtgaatacttaattataacatttttttcaggtttatggaatcatgggttcaattgtttgttgcttctgatcctttttttttcttactcagctcttagttgaataacaatctgaggtgtaagaaatatggcttatagatatagttcttgagaggacgactaaacaattattcgtatttgtattgtggaatgaattgtattttatgctttgaagttcattaatttagctcccctactaaccaaatcataaccgaagttatcgaatctcggtttggttcggtatatatgcaacggcattttcgtaaacaagtcatgttttttttcgtgtgagttttagaaaatacaaaaatcatatataacactagattttaatttaaagttagtataattttttttttgcaaattgtatctatctataatatatttttattttatagtttacaattgttattaagtaacgtcctgccaaacccgtcccgccaaacctgtcctgtaaaaaaatcatttatttatattaatattgatcttatttatgatatgtttataaatcattctctaaatatttttgtcgatgcaggacattgaacccacacattgtttgccaattggttaatatatgttcatttttaaaattttgaatcataaaatgtgacagaaaaaattaagatttttttaaactctatatattatataatgatgttaaaaaattgtgatatatcaaactttttataagtttaaatattaataatgttttataaattttaaatatataaataataatatttaaaaaattaatatttttgcttataaggtaatgacataataactctaaaagcaaggatttagaagatttaaatctttaattaaatattttcattaataaataattaatgtcagtgacatgacattgtaaataagtttaaatacaaaatttatttatttaaacaaaaaacggttagtaagaataatatttatttaacaaaaaactttgttttaaaatattgttaacaaatgtctatgctaattttaagggattgatttgaattttgttgggattaaatttgattgataatgtgattgactatttaaatcaaaaatttaaaataaaattaattattttggaaaaaagatttaatgctaatggcattagattgtaaataagttcaagtccaggatttatttgctaaaatggttgcaaaaatgtatatatagatagtgtaaaaataaattgaattaccgatgtatttttaaaaaaaatcgtgaaatctaatttatttacggaaaaatattaccacattatttttgcaaatattgtgtatggtaatgaatccaatccattattctaatttgttcttagtcaatgagtggtattcaatttcattgtcccggtcccacggactgactactcagcaacccaatcttacaaagtcaaagtcaacttttattttgtttctctttttttccgtttccatcccaaattcatttctttataaattatttattcctaaaaggatttgtaaattaacctaatttgcatttcaaaatatttttatctattttagtattaaattggaataattgttatttttgtattaaaaaaacactaatatccaaaattgttatattgctttttattttgcttttttctatttttaatttctattttttaatagcatcgccgtatcgtcgcatcgatactcggatttagtaaataagtgttttttagcaagagtttatgcaagtccgcttcgattaaagtatctaaaccaaaatccaaacacgtgggagtttccgttttaatttctagttatattatacccttcgttatttaagatataaaacagcaatttattatcactaattgataaaaccttcattgcaaatataaactagattttaaaaataaaatttgacttttaaaatacaatgtaatattattaatgatataaaaacaaaaaacctaaaatggtattgaagtgtcaaacagaggaagtatatgatatatatgtaattaactagtcaaaatctgctgtgataacgaccaattctaaacaattataaaatcttctaaaaattaatgagaatctactatatttaataactaaaataatagaaggatgacaattgacaactataacaatattgaagaagtcataccaaatatattaagacgtgtataaaaagggtatcataaccgaagacttaagatgaacaagacacaaacacaacagaaacttaaccaaagacatatctctctctcctcaaacccacctcttgtctctatgggatcgcaactctcaaacgcaatcgacggtaaagataacaccaaaaccatcggatcagcggatccggaccagcttatggagatcgaatccttggagaagatcttaaattacaagttcaaagacaagagtttgttgctgaaagcgttcacagacgctagttacgttgatgacaagagtgaatcgtacgaactcctagaacttttaggagattcgatcctaaatatgggtataatctatgattttattaagctctaccctaaagaagcacctggtccgttgaccaagctccgagccgtcaacgtagataccgagaaattggcacgggtcgctgtaaatcaccaactctatagctatctccgtcataagaaacccttgcttgaggagcaagtaagttacattcttaaaaaccctactcaattatcatctttgaaatccctagtatttaaccgtgtcaaatcttataaatttttatttattaattacttcgatcatgtcttattgcaatttggttcattattaaaatccatggaaaataaactttgtcaacctttttttcccattctctatatcactttcatccacaatttgtctcaatgaatgtgttagtttattccataacccatgggcctaattagaaatttaccaacaataatctttaataaaaacgtttgtattggttgtgtgtaatatgtgaatcaatattattatatgcagatactagaatttgtggaagccatggaaaaatatccattacattcaaatggtcttttaaaagttcctaaagttctagcagacatagtagagtctaccattggagctatcttcatggactgcaactccaccgagaccgtctggaaggtaacttactatacatttagttataaatatctagctactagactaaggcaatcgattaatccatgactcttttggtgttgaaaccattgttgacaaaaccattgttgataggtgataaaaccattgttggagccaataatacatttagacaaaatgaagagccatccaatgacagaactcaatgagatgtgtcagaagaggaacttgaaattgacgtccaaagacacttgggaagaaaatcaaacctattgtttccatattgaggataagtttgttggatgtggtcaccatcctgtcaagaaagaaactgctcgtaatttcgctgcaaaaaatgctattgacaattttgctaaatttttcggagacctttagatatatcgaaaagaaaaagaaaaattatatttttataaatttttacagtataaattgtaatatctttctgttttctttttgttaaaaaaaaaaaaggcaaaaagaaaacataaagaaatatgtactgtctttgtattttaaccagcttgtattcaaattcatcatttcatttttcttatgaatggtgcgaaagacgtaaaaaaacgaaaaaggaaaaaatagaatgatgtgaatgaacctagccaaatgttataagcatatataagtgttactcgagaaccataggatatcatttgtaaatcttggttagagacccatattacctctgatcatggcatagcacacaacaaaatagtttattcataaaagtaaatatagtttattcataaaatacaaagatttccaatcacacaatgtaacaagcacaaataagtatacttttacttataagaagacatcggatgtacgtagacaaacaagtatcaaagtatgttcataaaggaaaacaaagttcgcattcaacaaggtgggttaataccttcacgcatgcacaagtgatggaaagcaatacaaatactcagatcaacaaaatgacaactttttcagcaagcaatacaaatatacaatataaaaaatctggggtttcttggttgggcttgaatttgagaaaggcccagatccttccagatactctttatttgactaataaatatcacaaaaacaattttctcttaaagcttttcttgaagaacaagagaaatcagaagctctttcctttgttttttttttctttttcttccaccaatctacagatttcgaatcatcagaaaatggatttcgagcttagatcagcgaaagagaagcttgaaagagagcagagagagaggaagcaaagagcgaaactgaaactcgaacgcgagaagaaatcaaaggaagctgcgattaagcaacgcgaagccattgaagctgctcaaagagctagaagacttgacgccatcgaagcccagattaaggtcctctatctctattcttactgggtttttagaatttgacaattttgcgtttcttctgtatggtaaatgctctcctaggtttttggattcctcgtaaaattgtgtaggttctgcaattgggattttgattttgtagaacagtgtgattctaatctagttcaccagattcgtatatgtattacaaatgggtattgttcatttggggattattgtagattttgatgcatataactttgacattgaccatcttgctttgaaagttcatagtttgttgttagttttggtagcttgatgtgaaacttatggagggctctctctctgatgatttgttattgtcctgtgtttaggctgatcaacatatgcaagagagtttagtatctggagatggaatagtgtttgaacgagtcttccaagctgtttcttttcaaggaaatggagataagattaaactaccaccatcatgttttactgagttgtctgatcaaggagctttcgataaaggtcctttgtattttgagctctctgttgttgaccatgcggataataaaaagacaacacattctggtgttcttgagtttactgctgaagatggcactattggacttcctccacatgtgtggagcaatttgttttcaacgcatgatccaatggatgttcctttggtggaaattcggtatatccgattgcctaaaggcagttacgcgaagcttcaacctgataaccttggtttctcggatttgcctaaccataaagcaatacttgaaactattcttcgtcaacatgctacactttctttagacgatgttctcttggttaattatgggcaggtctcttacaagcttcaggttcttgagttaagacctgccactagcatttcggttctggagactgacattgaggttgatattgttagtccagatatagtttcagatcaaccgaatcagcatgtgctaaagccgcttcaatatgggaaatctgaatctggaacagttgaggaaggtcggtatgattactataagtttgtgattgacgaggctactgtagaaaaagtaatggcaggaagcgtcaaagttattgtaaaggtagatgtggagaaagttggagcggatacggatctctatgtgtcaaagcacccggttctatttccatctcttaatcaacacgagtggtcttcacacgacgtgggttcaaagaccttgatcttggtatcaaaggagagggctttgagctcagggacttacagtataggtgtttacggcttcaaaggaacagtcaagtaccaggtctcagtactggtccaagaaagcattgatggagctaaggttggggaacgggctgtatcatcttcgtcagatgttgatacagtagaatgtaggaactgtaagcattcaattccaagcaggagtatcgcgttgcacgaggtgtactgtagcagacacaacgtggtttgtaaccatcacgggtgtggaatcgttctcagagtcgaagaggcgaaaaaccatttgcactgtgaaaaatgcgggaaagcattgcagccaacagagatggagaaacatttaaaagttttccatgaaccactcacttgtggctgcggaatagtacttgagaaagaacagatggtgcgtatataaaaatggttgcaatcattgttcgttctcattaccttgttgtgctagaacttgtaaattaacatgagattgtgattctgttgcaggttcaacatcaagggaaagattgtcctcttcgcctaatcgcgtgtagattctgtggagatatggtggaagcgggtaactctgcagctgatactagagacaggatgagaggaatgtctgaacatgagagtacttgtggttcaagaactgcaccatgcgactcatgtggtcgatctgtgatgctcaaagacatggacattcaccagattgctgttcatggcaagagtagctgatttctgtatccggtttccaccaattgttattgaaaactgattgtaatattgaaagtgtcaaatgtttgaacagagaagcatcgaaccatttgtattatttatgacaccatttgattcttcaagtcacaatccgaaatattttcacgtatggatttagtagagcccagagacttaaattgtccaacttttgacttaccaaaaatgtcgacaatatatacaacgaccaaaaaaaaaaaagacaatgatgcttaatgtgcaagtattattactgtgggtcagaagtagtcacgacaatgattgagagtgattgtttaatagaaaggttttaggaaaatagagaccaagttgcttggtgagagtttctttatgtatgatttctattttctctctaagtcaacttctgtggctgaaaatagagtaaggaggaagagctttcgtactttgcaagttaccaaaacaagttttgaaacaaaaaaaaattaaaattgaaataaatccttatatcaccaacaaatgtcccttcaagtattagattaacttctgaccacgcattatttagtactagctataaccattataatgctaattaatttcttgattaattcaagtggatccagatctttcttcttaaaagcagtaaaacgaatatctaattaataattatttatattcccctaaccttttattatggctggaaacatgtattcaaagagctagtgatagctgaaaagatattccaccgttaactttattaccatcactattcactagttcactacaaaacattagtagtggtagaaacataattaatgacatagatgacattagtttgaagtttattctttgttatgcaacttagaaaacacaaacgatgcaaatattggtttgacaaatatcaactctataataatgagtatagtacctatcattttagcttatgtttatttgtggtacaaatatttatgacgagggagcaataaaaaagttacaagaaacaattttatttgtatcattagtattcacgaaaaacgaatctacgtaatgtacaccatattcataatgaacatattcacccataaggccgtaacacacaagattacgatagatagatttacttattgatcacgatgacgatcacaatgcaatgaacatatccgacaagcttgtttctattttataaaatacaaaaaaaaaaactttgataagttttggcaataaccacgatattaaaatacggataatgaagattggatctaaatttatatttttggcaagagagtagattcggacccactttcttacaaacaaaaaaacttcgtcacctttacaattttcaattatccacccaaaaacaaataattaaaaatgccttaaaaattcaaaaatagtggttgtgatatttttcaaacatgttcacacttgctaaaagaactaataaaggttttttttttttgaagtgtccatcaactttatattatccacgtattttaaacacattagattaggaatcaaaaacaccaaaataaccatagccactagttgtttacccactgaacaaatcaaaaatttccaatatttttctctagaagggaaataaacgttaccagacaaaatccaaaaagctcactaccatctactattgagttttcttgtcatcttctttttggtcacggttttagtttactcttgagtctctttcatagtttcatagcaagagcatcttattatttctttctttctttctttcatagttcactgtaataaacttagaaggctcacattttgccaactcctcaacactttatttttctcttttttcttcacggatttataaaccaataaatttgcagtaatctttttagtcgaatgatctttgaacatatttcctaaatacccggcaagaaaaaattctgaatttttctcattaatttctccaaaaatacaaacttttcttcttcctctgtttcttcttcctcctctgtttcttcttcttcttctgttacttacaagagcaataaagctttgtcttttagcttttctagaaggtatttgaattgaatctgatcttttttctttcttcagtgttgtttgtgactgtgacatatagttcatgtttctttttggatgctctctgtgtcaaacaaaaaaacagagcaagttgagattttttggaaatttcctacatcaacttgcaaagtctgaatctgtgtctgttgaatctttttttacaggaagagtagtagtatcttctttttcacagtctcatggctacaataaacgatattggagtagcagcagcaatcaatatagtcacagcatttgcttttctcttagcttttgctatattcaggattcaaccagtaaatgacagagtctatttccctaaatggtatctcaagggcttaagaagtagttctatacaaactggtggctttggtagcaaattcatcaatttggacttcaggtcctatattcgtttcctcaattggatgcctgaagcacttaaaatgccagaaccggaactcgtcgatcacgctggactcgattctgttgtctacttgaggatctacttactcgggtatatatatatatactgatctatcccccaagccctcttcttttttttttctggtttaagagatttgagttcttaatggataatttgcaggctcaagatctttttccctatagcttgtgttgcttttacaacaatggttcctgttaattggacaaacaaaggattggatcggttaaggcattccaatataagtttcagtgatattgataaactctctttatcaaatataccaaatgggtcacctaggtaagagatacttctccgagtttggtggctttttctttgtttcattatggttacttattcactggatcctcctcctcatcttctgtagattttgggtgcatttgtgtatggcttatgcgattaccttctggacatgctttatcctgaaaagagagtaccagaatatagctttaatgagactacagtttcttgcaaatgatcaaaggagacctaaccagttcactgtaatgaaactttgctacctgttgatgttttttactctatgacaaaaccatttccccatagctgaaacttgttgaactgtcttcatcttaggtactggtaagaaacattcctgcagatcctcatgaatcaatatgtgaacttgttgaacatttcttcaaagtcaatcatccagatcactatctcactttccaggtataatcatctttggattttctattgtatacatctctgacttgatttctgagttgatgatggttgatctgcttttaactcaggcagtccacgatgcaaccaaactctcggaattggttctgacgaggaaacaaatgcagaacctgcttgattacaatataaacaaacacatgaggaatctatctaacaggccagtaataaaggtaaaactcatatttgcaaatcacataagcttaactttctcatttgctgtttctcttaagactcatttcaatgtccataagtagatgggatttcttggctgctgtggtgaagaagctgatggaatcaaatattacacgtccgtcgttgaggtctaacaagagaagtaaagcattttaacttctctaccctattgcttttattctccaacctcatttgcaacatatttaatcaaactttctttggatgtttcagatatctgaggagaaacagaggttaaggaccggcacaaagtccatagtgcctgcagcttttgtatctttcaagagccgttggggagcagcggtttgtgctcaaactcaacagacaagaaacccaacagaatggctaactgagtgggctgcagagccacgtgacatctactatgacaatctggcattgccatatgtagaccttaagataaggaggctcatagtcggcgtcgcatacttcttcctcaccttcttcttcatgataccaatagcatttgtacagtcactcgccaacatcgaaggcatagagaaggcttttcctttcttgaagccccttatagaagtgtatgtctctgtctatctcaacatgttctgtcccgctgcctagtagataaagtctcttaccatttttggtctttgtgaacaggaaattgttaaagtcgatcatccaaggtttccttcccggaatcgccttgaagatcttcctccttttcctcccaagaatactcatgcagatgtccaaatttgaaggttttgtcagcacatcctcattagaaagaagagctgcaactagattctacatgttccaattcatcaatgttttccttggaagcatagtcaccgggactgcgtttcaacagctcaacagtttccttaaccagtctgcaaacgagtatgttctttagacctttctttgtctgcatttcactgagagatatcatatctttctgactttttcatttctgcagtattccaaaaacaattggtgtctcgattccaatgaaagcgaccttctttataacatacataatggtggatggatgggctggtgttgctggtgagatattgaggttgaagccactcataatctatcatctaaagaactccttcctcgtgagaaccgaaaaagatagggaagaagcaactgatcctggaaccataggattcaacactggtgagcctcaaatacaactctacttccttcttggtcttgtttacgcagcagttagccccatccttctcccttttatcctcgtcttcttcggcctggcttttgtagtgtaccgtcatcaggtgaaataactgaaccttccgcttcctttttcctccaaagctcgagcattgttaagtaacaatgaatgctttatttgcaggttataaatgtgtataaccaaaagtatgagagcgcagggaagttctggcctgacgttcacaggcgtgttgtgaccgcattggttgtttcacagctgctcttgatgggtcttctaagcaccaaacacgcttctaagtccactcctttgctgcttgtgcttccgttgctgaccatcgggttccacaaacactgcaaaaaccgttaccaacctgcctttgtcacatacccgttacaggtcagttaatacaaaaaacagaaataactgaagatctctagtagctatacgtaaagcgtgtaagctaacctttttcttgtttcgagccaaagcaggaagccatgatcaaagatacactggaccgtatacgtgaaccaaacttaaacctcaaagctttccttcgagacgcctacgcccacccggagttcagggttggagaagatccagagcccgaggagaagctggagtctgatatgtcacctccggatttagtggccactaagcgttggtcatggaggaacactcctttgcctagcaaagatagctgccgtgaaataccctaatccttgctctgttctacctttaacggtgattcttttatattcttacacaagttttcctctcattagaagaaatgtacatatatacgattgtattatatgcaagaaaaaaaaataccatttggaaaagcatacgagaagtttctgttagaagtgtatcatatgattacaaaaagcagaaaagataatactcaggtcatgacttctataaatcctcaggtcaatgccatctaatgaagtaagtatggtactcctgcatggctgcatcctgtagcaatcatccttctatgcaaatctagagcaatgcccatttcgtcagtcacacaaagcatacagataactagataagtgtcccatagagagaagaaacaccactctctgagacattttatcaaacacttataaatcactttcccttgagaacacaaaccagtcaccaaaatgtcaacttttacagatcagattccatacctcttggaatcttaataacatcacaaagaacacaaaaattccagaatcaaattgcttcaaccgaggttatcagtcataatcgtcctacaacaaatgaaaagtttttacttgattattactatttgtaacttgtaagcaagcccatatcaaaatttgattatgggcctctggcctttaagaatatccaaatattatatctttagtatttttgcatggagtttttgacggatggggcaaaatactgtgagatcttagagatgctccacccgtttgtagattttgttcataaaaaaattaatcgatcggtttaaatattatctgactcatataccagatattctatatttaataatatttatatttaaaagatttgattaagatttaaaattatgattttcctattatttttgtttttttgaaaatatttgaataattatattatatatcaaataaatgtgatttgaatttttaaaaacagacatatattatctaattgacaaaaaatgtgtttgtaacgtttcacatcgactaaaatatttagataattgttcagaatcatatcatataaagaagatcaacattaataaactaaatgaattttttctggactgatttagtcaacccaaccaatttctcaagaaatgattgaaaacaaacggaaactattttcgctaaaaatctaaaacgtgtaataagaattgggttgttgaaaaactcaaaccaaagaaaattttaaaaaactacaaccatgcatatctagccttacttataagcttttcagtttttattgaagtatactaaatgttttgattgttagaagagatagaacatgtacatattggacaatttactatccaccgttagaacattgcgtgaacgactcagtcatagtactagtcaggtttgtagttatagacatatcaagatttctgtctagttcatgtctatatcaaaggttgtggtatctctgcattcgaagacttatgtttctttttttgtccgtaaatttttaagatttatcttttcttgatagatatatatgtatcacaatgcatagcaatatcgacgtgattggcccagaatcaagtcttatctttggttgtgttcaataatgtaaagtccctttataagctggtacaatatgatggtgcagtgtttggaactatattataaaaggaatgatgactcagggaccatgtaaagcgttagtacaaatgtgtcgttgagacttgaaacttacttgggaccataattatgtttcttgggtttctttttttcagtgctagtaaactttctcatcagtttctctctcgttgattacattctaaaaatttctccatatatgctcatagtgaaaacgtaaatcatgtcttctgagtcgtgaaagctgaagtcgaaagtgttttagtttagggtaatttctgaaatgggctttgcttcaggttgctggaggtggaatcctaggatatttacatatttggagagaagcaaaagttatagcttataagatttttgtcattgttatgatttatcaattcttaagttgtacgtataatttatatttgtcttcggttaataagttattctcattgtttagaactacaactctttctcacattgctctgaactgaatcgcctagaatttgcttcttcttgtttcttaaacgctaagtggtaactaaacattattcatagtgtctgagtattatcagttaaacaaaaacataaataatcgtttcatttttaccaaaaaaagaccattaatggttcttaattccaaattgtaaatacaaaatttacacaagtaatgtcatgcttctaaagtctaggactactgcatgctaaactattcgttttaaaatttaaaatacatcaaatgaaagaaattagattgaataaaaaaatcaaatataaccgagcttccagagtttctctaagtaaattgagaacgcaagccatgaccaatctggtgaatatgaaaaaaactcaaatatttatcatttacatacaatgcacactagatacatatgaagattttaactagtttagtataagataaaaaacacaattttccatgattatttcattaaaaatcttaaaatttgctaaaaacaatcctgatactttgcattattatcattcatattacgttgttttacttttcaaggaactgttttatctaaacatgtataaggttatcaaatgattaacgtcaaatctgaaacaataatgtaaccaatatggaatttcgccataacgtggatacttggcagtggttacttggcttttcctttattttcttttggacggaagcggtggttactttgtcacacatttaaaaaaacacgtgtttctcacttttttctattcccgtcacaaacaattttaagaaagatcgatctatcgtgatctttctatcaaacaaaagaaaaaaggtcttcatagtaacgctacaacatcaaatatgtggttgctctgacatcagtcgggaaaataaggatatggcgccattggccacatctattggggtcccaacttcctttcacaaaaaaattaaattgggtgtcccaacttttatctttgatatagtgacatgagtatcgggagcattggacaatggataaaatgagaactaaaaaaattctggttaatttttgatcattgttatttaaaaggttattttatctataatctacccatattgatcagttttatttaaatttgtttagctaccgctcctcgagagagatcctcatcttaaaaatggaatatggaaattacacacgaccccaaaagtatattttttctctggagaatgctatttagagctttgactatatggtctgaattagaaagacgggaaataaaatctgctaagtgatataagctctaagtaggcgatgtgtgatggagaacaccttttctttaacagtcttcatgttttacagattcgcgaacttcgaatatccctatacggtctgtctaaccctcgtgtgtcttttgagtccaagataaaggccattattgagtaacatagacatgctggaatccaaccattgaagtcacaactgtccatgtagattctttggagaatctgaaaagtcttaataaaggtggtgtttcaaagaaaacaaaacaattgagttaagaaaaaaaaatatcatgtagtggtcgagtattatgttatttattgtgtagctaccaatctttattctttaaatctgacataaaatgctacaaactttttacctcgtctatagccccaaaaaacctaaccacggttctaaaaccacacacagtgattttggttgacgacaatgcctctccttcctcaaaacgatttatttacattttttaaatcaaatgttacattttataccataattaagtctttttacagaatacttagatggaagagatgtataaaaaaggaggaaattgtaaaaaacatatttcgatcaattaaaccaggattcataaaaatataagtatatatataaatgatgtttcgtttagcgatgaacttcactcatatgataatacttaacaatataagtacataaaaaataaaataaaattaattgtttacgaaaagtctacaaatactgcatgtataattaatgttctctttatttatttatttataccttaccaagatatatctataaccgcatagaaatagaaggcgaagagataatttccaaaaacaagaaaaacctctaagctcaaaagatgttgttgagaacgatggcggcgacttccccgcggccaccaccgtcaacatccct

SEQ ID NO: 584 - DNA, 205065 bp, Arabidopsis thaliana
tccttgctctgttctacctttaacggtgattcttttatattcttacacaagttttcctctcattagaagaaatgtacatatatacgattgtattatatgcaagaaaaaaaaataccatttggaaaagcatacgagaagtttctgttagaagtgtatcatatgattacaaaaagcagaaaagataatactcaggtcatgacttctataaatcctcaggtcaatgccatctaatgaagtaagtatggtactcctgcatggctgcatcctgtagcaatcatccttctatgcaaatctagagcaatgcccatttcgtcagtcacacaaagcatacagataactagataagtgtcccatagagagaagaaacaccactctctgagacattttatcaaacacttataaatcactttcccttgagaacacaaaccagtcaccaaaatgtcaacttttacagatcagattccatacctcttggaatcttaataacatcacaaagaacacaaaaattccagaatcaaattgcttcaaccgaggttatcagtcataatcgtcctacaacaaatgaaaagtttttacttgattattactatttgtaacttgtaagcaagcccatatcaaaatttgattatgggcctctggcctttaagaatatccaaatattatatctttagtatttttgcatggagtttttgacggatggggcaaaatactgtgagatcttagagatgctccacccgtttgtagattttgttcataaaaaaattaatcgatcggtttaaatattatctgactcatataccagatattctatatttaataatatttatatttaaaagatttgattaagatttaaaattatgattttcctattatttttgtttttttgaaaatatttgaataattatattatatatcaaataaatgtgatttgaatttttaaaaacagacatatattatctaattgacaaaaaatgtgtttgtaacgtttcacatcgactaaaatatttagataattgttcagaatcatatcatataaagaagatcaacattaataaactaaatgaattttttctggactgatttagtcaacccaaccaatttctcaagaaatgattgaaaacaaacggaaactattttcgctaaaaatctaaaacgtgtaataagaattgggttgttgaaaaactcaaaccaaagaaaattttaaaaaactacaaccatgcatatctagccttacttataagcttttcagtttttattgaagtatactaaatgttttgattgttagaagagatagaacatgtacatattggacaatttactatccaccgttagaacattgcgtgaacgactcagtcatagtactagtcaggtttgtagttatagacatatcaagatttctgtctagttcatgtctatatcaaaggttgtggtatctctgcattcgaagacttatgtttctttttttgtccgtaaatttttaagatttatcttttcttgatagatatatatgtatcacaatgcatagcaatatcgacgtgattggcccagaatcaagtcttatctttggttgtgttcaataatgtaaagtccctttataagctggtacaatatgatggtgcagtgtttggaactatattataaaaggaatgatgactcagggaccatgtaaagcgttagtacaaatgtgtcgttgagacttgaaacttacttgggaccataattatgtttcttgggtttctttttttcagtgctagtaaactttctcatcagtttctctctcgttgattacattctaaaaatttctccatatatgctcatagtgaaaacgtaaatcatgtcttctgagtcgtgaaagctgaagtcgaaagtgttttagtttagggtaatttctgaaatgggctttgcttcaggttgctggaggtggaatcctaggatatttacatatttggagagaagcaaaagttatagcttataagatttttgtcattgttatgatttatcaattcttaagttgtacgtataatttatatttgtcttcggttaataagttattctcattgtttagaactacaactctttctcacattgctctgaactgaatcgcctagaatttgcttcttcttgtttcttaaacgctaagtggtaactaaacattattcatagtgtctgagtattatcagttaaacaaaaacataaataatcgtttcatttttaccaaaaaaagaccattaatggttcttaattccaaattgtaaatacaaaatttacacaagtaatgtcatgcttctaaagtctaggactactgcatgctaaactattcgttttaaaatttaaaatacatcaaatgaaagaaattagattgaataaaaaaatcaaatataaccgagcttccagagtttctctaagtaaattgagaacgcaagccatgaccaatctggtgaatatgaaaaaaactcaaatatttatcatttacatacaatgcacactagatacatatgaagattttaactagtttagtataagataaaaaacacaattttccatgattatttcattaaaaatcttaaaatttgctaaaaacaatcctgatactttgcattattatcattcatattacgttgttttacttttcaaggaactgttttatctaaacatgtataaggttatcaaatgattaacgtcaaatctgaaacaataatgtaaccaatatggaatttcgccataacgtggatacttggcagtggttacttggcttttcctttattttcttttggacggaagcggtggttactttgtcacacatttaaaaaaacacgtgtttctcacttttttctattcccgtcacaaacaattttaagaaagatcgatctatcgtgatctttctatcaaacaaaagaaaaaaggtcttcatagtaacgctacaacatcaaatatgtggttgctctgacatcagtcgggaaaataaggatatggcgccattggccacatctattggggtcccaacttcctttcacaaaaaaattaaattgggtgtcccaacttttatctttgatatagtgacatgagtatcgggagcattggacaatggataaaatgagaactaaaaaaattctggttaatttttgatcattgttatttaaaaggttattttatctataatctacccatattgatcagttttatttaaatttgtttagctaccgctcctcgagagagatcctcatcttaaaaatggaatatggaaattacacacgaccccaaaagtatattttttctctggagaatgctatttagagctttgactatatggtctgaattagaaagacgggaaataaaatctgctaagtgatataagctctaagtaggcgatgtgtgatggagaacaccttttctttaacagtcttcatgttttacagattcgcgaacttcgaatatccctatacggtctgtctaaccctcgtgtgtcttttgagtccaagataaaggccattattgagtaacatagacatgctggaatccaaccattgaagtcacaactgtccatgtagattctttggagaatctgaaaagtcttaataaaggtggtgtttcaaagaaaacaaaacaattgagttaagaaaaaaaaatatcatgtagtggtcgagtattatgttatttattgtgtagctaccaatctttattctttaaatctgacataaaatgctacaaactttttacctcgtctatagccccaaaaaacctaaccacggttctaaaaccacacacagtgattttggttgacgacaatgcctctccttcctcaaaacgatttatttacattttttaaatcaaatgttacattttataccataattaagtctttttacagaatacttagatggaagagatgtataaaaaaggaggaaattgtaaaaaacatatttcgatcaattaaaccaggattcataaaaatataagtatatatataaatgatgtttcgtttagcgatgaacttcactcatatgataatacttaacaatataagtacataaaaaataaaataaaattaattgtttacgaaaagtctacaaatactgcatgtataattaatgttctctttatttatttatttataccttaccaagatatatctataaccgcatagaaatagaaggcgaagagataatttccaaaaacaagaaaaacctctaagctcaaaagatgttgttgagaacgatggcggcgacttccccgcggccaccaccgtcaacatccctaacatctcagcagccaccatcacccccctcacagcttcccctccgtacaatgccgggatcgtacggctggccgttggttggaccattatcggaccgtttagattccaaggacccgataagtttttccggacaagagctgagaagtataagagcactgtgttccgtacaaatattcctccgacgtttcctttcttcggcaacgttaaccctaacatcgtcgccgttcttgacgtcaagtcttttagccatctttttgacatggatctagttgataaaagagatgttctcatcggagacttccggcctagccttgggttctacggcggcgttcgtgttggagtttatctcgacactactgagccaaagcacgccaaggttcgtacatacgttgctttgctactattacgtacgagtatataattaattaatacggtaacaacaaagtaaccaaatctttggtttgactggtatctagaataaattttaatcaaaggtccgacactttctagaccaaaaaaacaatacgtatatagattgtaccataaataattaaaccatagtaagagatgtactttaagagaatttttttgaagttttcaaaattaatcgaaccaaacctaactagttagttattatgagtgtggctttttagtgactggatttgatgtcaagtgattttactataaattgatcttaaattgttttggaaaatcttaagcggactaatgggattttatctcagatttggagaattcatttttgaggcaattaagtttttctgatattagtatattgctgaaaaaatgaaaaacaataattataaaaaaggaaactataagttaaaaaaaaaaattgttggcagtctttaattgtaccaatcctgtgagactttattattacagactagatgatcacccgcgctacgctgcggttttttcggatttttttgtattatttaatttaaatttaatttttatttatctaatcattcactcatgcaataagtaattactttaatattaaaaatatttttttctaacaacattctcaacaatgcatcatacatataattcataaacaacatttgtcttaaaccaatttaagagagggtagggttggattctagaaacctgagaatttgatgatagagctccttacgtattcatcagcctcagtgatttattatataaatatcataagagaatataaatatcaatttaagagaataacttactcaaatcactaagtaatccacgactattatacattcatactttgagtttggattaaaaaaaaaatcttcaagtatgagaaaactattaaaatagttttattgaaaaatcatataaaataaaaataaatttagtaataatataattaaatatgtaaaataaaattaaataagaaatatatcattaacctataaattagaagttgaagaacttacattaattatttaatagacacatgtcaaatgctaaagtgatgatgtgtcaatcatatggagagagttgaccaacttttcatatatatgattggtaagaaaagttgtgtgtggttgtagttgtactacaagcttagtagaaacaaaagtattattgtgtaaagcatattgtatttttatgtattaaaatacagaagaaacgtgatacaaaatttggcgttttccactaaatcaaaaagtgagcaccattgtaatcgatgaacagtagaatttttgttttttctttacagttgaataatataatactaaatactaatgaactcaaatttttacatgtgaattttatgtttgttacatgttataaactcagataaaaggtttcgctatggaaacactaaaacgaagctcaaaagtatggctacaagagcttcgttcaaacctaaacattttctggggaacaatcgaatccgaaatctccaaaaacggtgccgcttcatatatcttccctctccaacgttgcatcttcagtttcctctgcgcctctctcgccggcgttgacgcttccgtatcgccggacatcgctgagaacggttggaaaacaatcaatacttggcttgcgttgcaagttattcccactgctaaacttggcgtagttcctcagcctcttgaagagattttacttcatacttggccttatccttctctcttaatcgccggaaattacaaaaagctttacaatttcatcgacgagaacgccggagattgtctccggttaggtcaagaagaattcgggttgacccgagatgaggctattcaaaatcttctctttgttttaggttttaatgcctacgggggcttttccgtcttcttaccttctttgatcgggagaataaccggcgacaattccggtttacaggagaggattagaaccgaagtcaggagagtttgcggatccgggtcggatcttaatttcaagacggttaacgaaatggagctggttaaatccgtggtttacgaaacgctgcgttttagtcctccggttccgctgcaattcgcacgtgcgaggaaagattttcagataagttcacacgatgctgtttttgaggtcaagaaaggtgagcttctttgtggttatcagccgcttgtgatgagagacgctaatgtttttgacgaaccggaggaatttaaaccggaccggtatgtaggtgagaccgggtctgaattgctgaattatctctactggtctaacggtccacaaaccggtaccccgagcgcgtcgaacaaacagtgtgcagctaaggacattgtcactctcacggcttccttgctcgttgccgatttatttctccggtatgatacgattactggtgactccggttcaattaaagctgttgttaaagctaaataagttaaagattgattagtgtttaatgttatgtaatcaatcttcaacggtttcatttgttcggagtgtataaattatatgtaaactaaaataatccgaattgaaactcaaattgttatgttagatggtgttgctatgttagagagattttaactgctttttacattttattaaggatatatgactctaatttttatgatagcaagataatttttgtaatacaagaaaataaatacaaagctcagtagtataatcataaccacaaagctcagtagtataatcataaccacaaagctcagtagtatttagggttaccaagcaatataataaatgtaataaatttgtgcgatggctctaaaaaaatgtaactttgtgtgatcagcagtataataaatttctgatctaaaaaactgtaactttgagagttgtctcaaaaccaactctctttcttaacatttatgaactattaattaatcaaaatcgatttaggtcttagtggcaatctaatttttttcctttcttacatttcaatctcttttggatttactttcaagtaagccatcttttatgttgaaacaaaatcttatggatgagcttctttaaatgttttagccatttatcaagaatgtattgcttaaagagtggtgtagttctaataataataaatatatatatatatccagatatttttgttagtctaaaataatccttcttgaaacacaaattgccatgtcggtaggattcgtaattattttaaataatttcttgaaattgccataataagagaagacaaatgtggtcatgttgggggtcctagaataaagtagtttgcctcgattaacaccgaaagtaaaaacattgtataatcaattcctcttttttgttttctatttactcgataagattctcctaaaaccaaaaaggaaaaaaaatttcaatcaatcttgagattgtgtcaagaaacctcaagagtgaaaatgagttttttcagatcaaagacttcaaaaactgaaacacaacaaccatcatcgtatggacaacaacaagacgctatgtactcatcttacggaaccgtgagtgacgaagtgttattacagattcatggatgcagagctcatctcatcaacggatccgaagctgtggagctagccgccggagacttcgagcttgtacaagtcttagacagcaacgtagccttagctatggtcgtgaggatcggaaatgacttacaatggccggtgattaaagacgagccagtggtgaaacttgactctcgtgactacctcttcacgttgccggttaaagatggagagccacttagttacggcatcacgtttttccctattgatgaaaatgacatcgtttttgtgaatagtatcgagttgctagacgatttcttgagagagaattcttgtttctcttcgtctccgtcttcttcttcgtcttcttcttcgtcttcttcttcgagtgttaacaatggaattgattggaaagagtttgcgcctaagattgaagattataacaatgttgtagctaaagctattgcaggaggtacagggcatatcattagagggatgtttaaatgcagtaatgcttacactaatcaggtttataatcatcaacctcattagagttcttattatttgttaatttcaaattctgaatcttgggttttgttaaataggttcataaaggaggtgaaattatgattacgaaggctgagaaaaagaatggtgcctcgtcaaaaagaaatgcaaccacaaacaagaatcaaatcaacaagaaccttcaacggtataacaattgatgatcttttaaatccgattttaactggttactaggcttagaaacatagttacctaactaataaaaccgatatggaagtgatcactttggtatggttttggtttgatttttttttttttttttttccgttctgttggatttggttttaatttttggtaggtgtaagaaatattaaaactcaactttggtttatggactaaattttttttgttcgatagttggtatataatgaactcagcatacagcattcctagttctttgtacattttttatcttataaaccatagtctttttggtggtaacacatgtatagagtaaggaaattgtctagggcgacggagaaattgagcaagacaatgttgaatggtgtgggagtggtgagtggctcggtgatgggtccagttgtaaagtcgaagccagggaaagcttttttctcaatggttccaggggaggttctattggcttcacttgatgctcttagtaagttaaatttatatttattagctccacattgacattagattagattatctttgtaatgatgaactaaaaatagtttgatttgatctttgaaattagataaattactagacgctgctgaagccgcagagagacaaactctttctgctacgtccaaagctctacaagaatggttagtgagaggtaagtttcacagacaaagtcctcaattttgcctcacgtttagtgtaaatgtctcacataagtgaggttacattaacaggttaggtgagagcgcgggagaagctacgaaagatgtactaggcacggttgggcacgcagccggcactgcgtggaacgtcttcaatatccgcaaagctttctctccttcctcttcagtcacatcggggatcctcaaaaacgcttcacgaaagtgatatttggtgtttgtatttatttgtgggcagagaccataaggttaaaattaagtcagaatatgcaaatgtgtaatcttgaatctcaaacaaaggaaacctctcttccttaccaaatttatccctcatgtgtctaaggaatacacagactccaaacatatcaaacaacttaaccttaaaccaaaagctttgacccaaaatgaaaaaaaaactaccaaaatcaaatcatgaaatttaaatatatcaaagaaaattgagctttagttaaataaaaaaaatatgatcatgaaaacagttgtagatccatcgacaaagggaatagttagtgtagagcctccgttcctcgtcgctggtcgatgaaccataccaccacctcttccgatcccatgcccaccttcttcttctccatgtccgccaccgcctccaccagcatggcctcctccttcaacagcatgaccacctcctccactagcatggcctcctcctacactagcatgaccacctcctccactagcatggcctcctcctacactagcatgagcacctccgacactaacatggactccacctccaccgtgagcgcctccaccaccgcctttggcaaccacggtggtacaattgactaaaagtaaagtgataattagaaggacggcgagtttcgctgcataattggtaacaaagtgtgctcgagtcttcgtgattttcatgctggtaatatcaaacatacacctttatcaaaacaaacaagttctatatcaaaattcaaaacataaacatatatgcgtagttgcgtacactatctttgattcttaaattgctgtttgctaccttaaaacggaaaagaggaatttgttatcgtggggtgagatgctttagaaaagcctctattgtatatatgtgtaggcaatattcaagatttttttgattcttttactttttgttgtgtttaggataagttgtgagtaattctaaaaaatactctttgtatttatttttcctcaaaatatggatttagatattgtgtataattatcattaccctaattaatggaaaagtaagtttcacaaaacctttgtaggttatcattaccctaattaattatcattatatttttgtaggttataaaatccataacaattattgtagcatgtagcaaaaatgaaaacgaaaagcatgatatatcattagaaaaaaaatataattaccatatgctggaattggtatatttagagtttgatgggaaagtttaacctaatcaattcgtcaattcaaaattcaatatagattacattggtgctaaagttttaacacgtgttgcttcatatataacttactatgtttaagatggtaaaaatttataatgtttacaaacacatgctttctcaattattctatacttcatagacgagactagcattttgagattagacaaaagtatcttattatataaaatttggtttcttaaagttacgattagacgtgttttcctatttttatttgaattggatttgattatttttttcattatttaatatatttctattttcacaaaaattccatgaaatgattattctgtttctctttgaaattagtttttttttcaccaaaaaagaaaaatttgaaattagtttactttttaatattaatcatattttcaaaatttatttatttatttcttaagtatgttaacaatttaacgataaagtcatatcatatctacgacataattaaataaaaattggaactgcaactaatacaaaacttaccaaaataataagaaaatgtgcatgcatgattgcatgtgatgtgtgtatataaaacactatttactggtgcgttattgtgaatccatgtcctaacttttatattttgtttgtataaattttttaaatttaatttgtaaatttttggaaatcttattatttgggtttcaataaaattttaacttactttttaaatttgactttcatatatctcattgctttccaatcaaaatttgtcacatgtttttagttatttgacgaagaaagaattgatcgagtataaccctaacccaaattgttattcatttaatttattctaactggtttaaatgttaaataaattatgggatgaattgtttggaataatccatgttcatcaaatttaaattaattgaccaatttatacataaatttctacttcacaaataaaaaagagttaaatatgtctacccatgaacacagaaatatgtttcctcaaaataattaacagactttttctctattggtctttcatataaagctaacactaacagcgttttagacatgaataatacaacgcgttatcgtaacaaatcatgtccgttcatgttgccacgtgtacatcatattgttagattagagggaaatgactcgtcgccttcgtcaacacagaatatataaatctcaaaattctataattcgatattttttcccagaatcaaccagatctgctttcgaagacgaatctagctattagccatggacaaaccgtacggatacgcgagcgtgagcatgagcggcatagatcgttccgccggaaaggatattgatcttgagatgggagtcggagaagcgacgctttatcctgggctaagttacggcgagaatcagctccgatggggatttattcgtaaggtctatgggattctctcagctcagcttcttcttacgacgcttatctccgccgtcgttgttcttaatcctcctgttaacgatctcttgaccggatctcctgggattcttctcttcctctgcatcgttcccttcatctgtacgtagatctcgttctttggataagattttcatttcatcttcgtagtttttcgttgatttgatctggtaattaggaattcttatggttaggtcaacctgattctgatttgtgcatttatgtcccttatgtttatgcatttcttttccatttctcttcatggattgagtttcttctcgtaactagatttatatcctttactgtgtttattatacatttgattgtttaggtatatatatggaggatggattgaacaatgttttatatgatgattgacagattgatgcttggtgtgatgatatctagtgtgttggtgttaggattcagaattgactttacttgatctttcactgaaacatagaacaaagaacagaccagaaacctaaggagtaattctggagaatcccttaccctcctgagcccaaaccgaccaaaatcttgacaactcacaaatctgttatatttcctattgatcctttttcttccctctaactatctcgtcatgtaacagccttgttctcttttttctattgatcgtttttcttttgtcaccttagggagaattttcagatagcttgttctctatgagttttgctttgttgacctctcatttgatgttggtttacttgcttcagtacttagttttgaatttgttagtactgagtaccttgattttgtgttgcacagtcgtacatcagctatttattttatgtcatatttgttgacaagatttattgctcatgtgattgattactgggagttcaattttgtagtaatctggcctctgcacatttaccaccagaagcatcctgttaacctgatcctccttgccctcttcactgtttcattgagtttcactgttggtgtcagttgtgctatgacagaaggttgttatctcgttccctttcatatcatctgattctaaccaataatatgtgatttggttgctgttccagccgcttcttaactcaccttattgtcacaaagaacaaaatttgcctgaaacttggaatagcaaagcctgtaaaagttgtgtgtttactaacaatctattgttctttcttctacgtgttttaccaggacgaattgtgctacaagccttgatattgactctgtctgtggtcggatctctaaccgcatacactttctgggctgcaaagaagggaaaagacttcagcttccttggacccattctcttcaccagcctcatcattcttgtagtgaccagcttcatccaggtttgcctctcagaatcctccctcctcacctatatcaccaaacacccaatagttccacacatacataaaacaaagccttaaatttggtttgctgtcgtaatattgcagatgttcttccctcttggcccgacttctgttgccgtatacggaggattcagtgccttggtattctgcggatacatagtctatgataccgacaacctcatcaagcgtttcacatatgacgaatacatcctagcatcagtagctctctacttggacatcctcaatctcttcttgaccatattgcgtatactgaggcaaggcgacaactgaaaggcataaaacgatgcttcagtgatgtgatccagtttataactataagagaatccaaaagcctttatgtgtgtatatctgatttctgtttggagaattaagtatatgatgctatgtggttaaacgattgatataaacaaaatcaagcaatgtcgattttcaacttcaaataaatttgttaattttggcggaattttgatgccttttgtcgtatccatttcgatattctgattgcttaagagcaaaagcaaacattgataccaaacgtttgaagatttatttaccatcatcgataaattgtttttactttgctctcctttttttttaaactcaaccatacacaaaaaaagcgacctcatcttacccaccgatccgccattacagacgaagaagaatttcaactgcaatctctctctgaaccatgagaggtcacgatcggattaacaattgtttgccggaggaacttatcctcgagatattccggcgacttgaatcgaaaccgaatcgcgacgcatgctccctcgtctgcaagcgatggttatctctcgagcgatttagccgcaccacgcttcgtatcggcgcttcgttttctcccgacgacttcatctccctcctatctcgtcgctttctctatattacctctatccatgtcgacgaacgtatctccgtctcccttccttccctctctccttccccagtatgtttctctcatcgaaatttttctgttgaatttgtgatcggatcgagcagtttttgtgtagtatcatgaattcgattgaaatgttaaattttgtatcgatctggatttgagcttagttgagattagcgttatttgattctgaattgtatttggatatttgagttatggtttacacttatcaattatatttgcagaaaagaaaacgtgggagggacagttcgtcgccatcgtcgagtaagcggaagaaattgactgataagacacattctggagctgagaacgtcgagtcttccagcttgactgatacgggcttgactgctctagcgaatggatttccaagaatagaaaacttgagcttgatatggtgccctaacgtttcaagtgtgggtttgtgttcccttgctcagaaatgcacttcacttaaatctcttgatttacaggtaatttaacagccgttgtcgcttatttagatctgttaatattcatttcccatatcctcttgataaaaacaataggatctcatatgcttaggatgtggtctttagggttgctatgttggagatcaaggcttagcagctgttggaaagttttgtaagcaacttgaagaactaaatttgcgcttttgcgaaggcttaactgatgttggagttattgatcttgttgttggttgttccaagtctttaaagtctatcggtgttgctgcgtcagcaaaaataacagatttatctctggaagcagttggttctcactgtaaattactagaagttttgtatttggattctgaatacatccatgataaaggattgatagcggtggctcagggatgccaccgtttgaaaaatctgaagcttcaatgtgttagtgtgacggatgtggcttttgctgcagtgggagagttgtgtacttcgttggagcgattggcattgtatagctttcagcattttactgacaagttagtgatcctgttccgtttaagtgtctttggatttttgatgagcacaatccaatccttctagtacctaaattttcaactattagagaagtcaggggatgaggaaaatacaggctttggtctcatcttgtgtgcttctattagatattgtcttctgaaattattgcccagtgttggttagaccattcgaaggacatggaaggacacttgccttatagagagacctttgtttatctttgggatggccttgtgtaggatgatcgttttacttgatttttattttgtatttcaggggcatgcgagccatcggtaaagggtctaagaagttgaaagatcttactttaagtgattgttactttgtgagttgcaaaggtttagaagctattgctcatggttgtaaggaacttgagcgtgtggaaattaacggatgccacaacattggtacacgtggaatagaggcaattggaaaatcttgcccgtacattttcttccttactttctttatttcttgttgacagcatcagagatcactatgggatggatcattgattgaaccgttattttcgggtgtatgcaggcgcctcaaagagttagctttgttgtattgccaaaggattggtaattcggctcttcaagaaattggaaaaggctgtaaatccctagaaatacttcacttagtagactgctctggcattggagacatcgctatgtgcagtattgctaaaggctgtcgcaacctcaagaaacttcatatccgcagatgctatgaggtataatctctcatctcttaaaataaagtattttcttaatctattgacatagcaactggtatatgcgttttttcttatatacagataggaaacaaaggaattatatctattggaaagcattgcaaatcactaaccgagcttagtctccggttttgcgataagtaaatcctgcaactcgttgaatcttgtttcttaaacagtactggaacaaaagctaatcatttcttttatcttattcagagttggaaataaagcattaatcgccattggaaaaggttgctccttacaacaactaaacgtaagtggttgtaatcaaatcagcgatgctggaataacagcaatcgccagaggctgtcctcaactcactcacctcgacattagtgttcttcaggtaaatagaactaacattttctaaaagcgtgtgtgtttgtttgttatcgagatctcaaagctgggacgtttgatcacaaatttcagaacattggagacatgccgttggctgagcttggagaaggatgtccaatgctgaaagacttggtcttgtctcattgccaccatataacagacaatggtctgaaccatcttgtacagaagtgcaaacttctggagacttgtcacatggtttactgcccagggatcacttccgctggagtggctacagtcgtctcgagctgtccacacatcaaaaaggtgttgatagagaaatggaaagtgactgagaggacgacaaggagagctggatcggttatctcttatctatgcatggatctctagatcgtaatttcaaggtcagtttctaagatttatgtttatgttttcttaataaaagtaataacttatagtccaaacttatggtgagtcatggttgtttattgtatgtttatgtgaactggttgtacatggatgaaaactttgtcgggatacaaacatgtgccgaagccgaacattgaattaatcaattacaccacggttaccaactacaaaacaagcaatctttagaatacaccaagacaaagatggaacagtaataatgcattatcaaaatagaatatagacagtcaaagacttttgcctagtatccattatctttagtcttcgttactcccgcacctaacttctccacaaactccctaaaattcttatccgacgaacctcctggagccaccgctgcttccgcctccgccttccatttcaaagcgttctttctcaactcctctgccttctccccaactgtcgcttccaaaagcttctccgccacttcctcccttggcactaccctctcctcggtcgctccacggcctagtctaaccccggtcttgaaaacatcgatcaaatacactgcatcagtcacttgatctccccattgcggacaacaaaccaccggaacacctgaagacaaagattccattgtcgagttccatccacaatgagtcacgaagcatgccactgaaggatgagacaagacttgctcttgtgggcaccaatccacaatcatccctttacctttagcactactctctttaagttcttgaggcaagacatgtgtctcgaccttcagatcgtgtggtggaggtctaatcacccacaagaacgataaacccgacttcaaaactccgtgagcgatctcttcgatctgttcttgcttcaaatatgcaactgtcccgaacgaaatgtagacaactgacgatttaggcctcgagtctaaccactcgaggcatttatctgttgatttgcaaatgtcaccgcttacgtcagaagtaactgtcctagcaactttgaaaagcggtccaacggttttaaccggacaaagacttgacatgtaatcgataacttcttgttccaatgagtcaaaagaatcgattagaacacagaaggacttgctcagattcttgaattgcccaagaatcgcttgtcgaaaacccgtgaacctagaagaaggatggagaaagctaggaatctcgtcgttcttcaagacaggaacacaaggaagcttcacatcgagctcaggctctgtttccgtagggaatgaaacagagccatcttggtaatggtaataagcagagaaacaagcacaagactgaacccagagaaccgcacaaggaatgttgaactcttccgccacgtggcagacccatgggataaacgggttattgataagacacgagacaggctcgttcgcttcctcgtatcttctcacaagcttagacacttctcgtatcccaacgctctctaggtgagcaatgtacaaagagaaatcagctctccggtcatcatcctctgcccattcttcatcaaagaactcaaaccggattgaaccggaaccaaccggtttaagttcaccgtcaacgattttgttggcttgtctcattttcttgccccaaagctccgttgtaacgaaggtaacgagtaaaccctttgaagcaattaacttgccgagacgaagaagagggttgacgtggccttgtccttgaaacgagacgagcattacatgaattgggtttggagatggacaagtttcgaacaccatttctgatatggatcccattttttttttcttttggtgaagtaaagaattatttgtatgtttgtgatattctcacatacaaaggttcttaatttatataaagcgtcaacgcatttattcaaatacaaaggttcttaatatatataaagcgtcaacgcatttattcaacacctacttgctcactctctctcgaccacacatcttacttaccatccacgtacgtctcagtttgcattatgtgagattttcttcttttgttgcaaaattgacgtgttagtttcttgatcataataagatttttgtaaaatgttgtgtatagttgttttccatgaaaatgtttgtatcattatacaatagttgtttcttaatcatatattttgtttatatatctcactcatctatatcaaagcacgttcagctcaagatttcgcttgcgcaaagaattacgtacgtgattctataaaattgttattccttttaccaattatgtctaataagattatcatatgtacaatatatgtcatttcatatattatgataataacattattttagataaagagttaaaaataaataaatatactgccttgtattttcagtaaatttaataagagattaatgagtgatgttgcattataatgtatgttcatatatggataatatgcgagcataattgtttcatactaaaaataaggcaacacaagtatagaatgttttatcgaataaagaggaataaaacacaagatatagaattgaattgacataatgtggtttcgcatgttgttttaaaaacgagccaaccactttctgccacatgatcaagtgtagtaatttgtgatcacatcagtacggcagagtactaatatagggcagacgcaaaaatcataattgcgatcaattgtggcaaatgtaaccaactacatttaatgcgttcacaattattaggattagatttcaaatttgtactctttgtttgtttaaagctaaagctataattaaactgaaaatgaggctttacaaaaataaatgggtctaacttttttctactgagacaggtcgcgtatacacagaacattaaaggatcctatactttggacagtggactaacaaccctatttttcgttccgattttttttcttctgttaaaactattttttgttatgatacaagtccaggccagtgatacgtacaatgtagtatgggaccttgtggttatcaaaatccatacaaccattatggtttcgcaccgtcgatagcaaaattcaagcttcagtttcttagctaactttacgatttgagttgttagaaatcaagagtacaacaaaaagtttcctactaacttccttactacaactttcaagccggtggataattccgaaaaatggtttggttttattaaattttcatatatattattatatatttaaaaatatataccagtgttataaagagtatagaattattcatgtgacatatagatgatttaatagtaaaagaaaaaaaaaaagtttcataaaatgctcaaatagttaaaaatacagaaattgaccaaaactagaaaaatgaagctaaaactttgttcgcctctagtttgcaagaagaacttgagtttcaaagtgaagataaaccatgagttatatacttatatttgttaaattaaaaaaaaaaagtctaactgccaaaagatattacaacacgtgtccgtaccctacacggtgtgtgcaataaccaatcacttttagacacacgttcgaaacacatcaagtaaagattaatgtggttgaaaagctttttgatggaacaaaattttacattctttcaaaaaaaaaaaagattaatgtggttgatcagcatctatcattttgtatatgacaataaaactctgaaatatgtcttctaccattcagaattacggttttcacgatgatttttactttcatttaatttgcttttatccttggatcattggatgaggctaatattattatttcttttatttgggttgtggttaataatacatttgatatgtcaatttaaaattagattttaggaattttcagatactggcattgttcgtgaaaatgtctcaaccaatttttttgagacttcttccctagctatctaacgagagatgatgcctgaggtaattagtaagctaattagagttgattacatgttttttcgaatctttgaagagctaactatttggtaaccaaacagtaatcgcaagccattcattcaaaggtgataagaagacaatacgtaattattgatttcagaagtgagaaaaaacactttcgaaaaatgaaatgagattgatacgatttattgacaagaaaaaagaaaaggttgtagtggttaaggtttttgcggtacaacaaatagtcggatattttcgagacatcattatcactagtgttctccgttgtcttctctcgtcacatgtttcgtaaccaacttgtccacaaactctttaaagttcatatcagatgatccaccgtccgccacggcggcctcggcctccgccttccacctccgagcgttttctctcagctccaccgccttttccccaactgtggcctcaagcagcttctctgctacaacctccctcgaaacaatcatctcctcagcggctccgcggcctagtctcactcctgtcttgaaaacatcagccaagtacaccgcatcagtcacttgatctccccattgcggaaaacaaacaacggggactccggcagttaaagcctccattgtcgagttccatccgcagtgacttaagaaacaagcaatcgcaggatgagccaagactctctcttggggacaccattccacgattttacccttttcttcgagctctcgaggcaaaacatgtggttctacaaatgtcccttccatgggaggccgaaccacccataagaccgacaagccagagctcaaaacgccatgagcgatctcctccatctgctcttgcttcaagttggctatagtcccaaaggagatgtaaacgactgaggatggttctcttgagtcaagccattccatgcagtcactcgctggctcggatatatctcccttaacgtcagaactcaaggtttgagccatcttgaagagcggaccgacaggactgatgatggcttgaggacaaagttgtgacatgtggtccatgatgtctttttctagttcgcgaaaagtgtcgatgaaaagatagaaagacttgtggttttcgaatctctttaactggtctaaaatgatatctccaaaagctgtatacggagacgaagggtgaagaaagcttgggatctcgtcatgctttaacaatggcaagcaagggatttcaacgctgatgtccggctcggttttggtcgggaacttaactaaccggtggtggtaatagtaataagccgtgagacaagcacaagactggacccatagaacagccgaagggatgtgaagctcctcggcgacatcacatacccatgggacaaaagcgttgtttatgagacacgtcaccggctccttgttatatctcttaacgagattcttgatctcttgttttccgacagcttcaaggtgtggtcggaaggcatcgaagtcgaatcttttttcatcgtcgtcggcgaagccgtcagagaagaactcaaaccggatgaaacctagaccgaccggtttgagcacaccgtcttgaatcttgttggcttgacgcatcttcttgccccatggcttctctgtggtgacaaaggtgacgagtaagcctttagaggctatgagctttccgagacgaagtagagggtttacgtgaccttggccggggaaagatacgagcatcacatgagtatgacgagacgggtccatggatttctagtttctttaagaactagaaagtggttttgttttctttacactatcaaatttatgtgaacacctaaaacaaaatatcaaaagaaagtaacaaaacgagtggcaaaaacatacacttctcttcttctttgtcttttactcttcgtcgaatcttggacgatctctattctgagtccatgtatagtacatatccctttccagtgctttccatcaattataaagggaaatattttttttatctttttatgtatgtttgtttatatactaggatttgacccatatgaaattactgaaaagaaaaattcttttaattattagatattttacaatttgaatggtatcatatttttctaggttttagatacttttgattttttttttaattattattaacattggctcccattttcagaaataaaaatggaaaatattttaggctctaagattatattataggttccatgatcaagataccgtattttctatataactgccgaaattcactaacgaaagattataatagtataaacggaagagagaatataatagagagcagtaatgaaacacagaaaagaatctgtatattctcttagatctgaaatgtacgagaagatgtaaaataaatagaggactaaaatctagctgttacaaaaggagatgagttgcatgaaggagagagaaggcgtccatcaggcatggaggagagataacactccaataaattcttgcagactagatagagccgttaccagacttagacttcacacacttggacaaacttcaccaatcgtaccgtagtccgccttttatgtttttttggtcatttcttgagttttgtacatgttcaaggcacttatgcggggttttgatgttttctagcgttattaggcttatccggatcaagaatgttcgagaggagaagcatcaaccaagggaccaatccatccaaggcgtagatcgatcagtccagcattttcgtcgaatcttggaagatcactcttttcttagtccatacatatccctttccattggtttccatcagttataaagatgaacatttcaactttgtatgtatgcttgtttatatactaagacttcaatcataatcaatctctaaaaaaaaaaaaaacttttaacttcgagattttataattttaatggtaccatattattctgcttattcatttaaaaaaaatattgtttaccatatcatttttctaaaacaaaaaataaatctatataataataaaaattcgaataaatgctttttgcaattgtgaacaattgtgtctttttttggcaaaaaaaattacggtttttttttaaatagaaagttgcaatccaaattaatatcttctacagttttatctttttattgtaatttttcataaacggtaataacaatttaattgactcattgcaatattttagtttttacaagaataattacaactttaggtttatttataaataattaacaattgcagctctacataaattattattttaatttctaaaatataattaaatgaaattttatatccggatatgatcttgtagagcctgaaattttagtacgcaccaccacaatttagatgaaacatgttatcatatcagtgtaacgctccaaaaattttaaaatattttttttatgatatttattaaaataaaataagtaaaaatataaagtaaatgtcatctttaaatacaaaccatagttttgccttctcacttcaatgttccatctaaaaataattaatgcatcacaagtagagtaaataagtccttcttttgaagatttagatgtatcaaaaattgccaagtctaaataatagcaaccacatggtgtattaaatactctttaattgatatcagtcaatctcttttatatctttttttttttttttttttttagatccattgtcattgactcgttgtattgtcttttcacattaatcaaaggcccaattaagaataatcagtgtacataccacaaaaatagattaacaagttttttacgatgatcaaaagggtaacaaagcagtttttaccctgattaattaactgaatcaacggaaacattcgtacattggataataagagacatagactatttatggttagcatctaaattacttacagtcaagaataagattttgtcttccgatttccaataatcacagatttgatctcatatcgttaacgtagctatcaattaaatttatcccgaatttgtgactgatgtaatgtataacacgtagctaggtaatgataacaacttgcctaattaatgtgcttgcattaccggaacaaattccttaatcatttcctcatatagttttcattgctgtcttgaccaatttgtcacaaaatgttgttagttgtactattatataacaccaagagaatatattttcgagtacttattattctctttgtttattacctcttataaacacttttcaattgtttgattcgtttgcaatctcaaatctagttacatctcaattttcgaatgccttttgtaatgtttatgaaaaagatacctacaactaattttgttggtcaatgtataatatccagatggtggtattatggaccattttcaactaaatgatcctaaaccttgggtcaaatgtccccctaaccatattttgtatccgtgccatcatcatagattcaacataaaattgttcactttatatcgatgcatacaatttagtacatattaaacaattaaaaatcgtaatccggtaataacaagtatcaatatgatatttacgacttacacgacattattaatgtttgtcattgtcttgacatcaaccaacttgtcaacaaactcttgaaaattcctttccgatgttccaccgtaagccacggcagactccgcctcctccttccacctccgagcgttttctctcagctccaccgccttctctccaacggtggcctcaagcagtcgctcagcaacctcctcccttggaacaatcctctcatcggaagctccacggctgagtctcaatcctgtcttgaaaacatcaatcatgtacaccgcatttgtcacctgatctccccactgcgggaaacaaataacgggaactcctgaagttaaagcctccatggttgagttccatccacagtgacttaagaagcaagcaaccgcaggatgagccaaaactttctcttgttgacaccattccacaatcttccctttctcttcaagctctagaggcaagacatgcggttctatggctaagccttctaagggaggccgcaaaacccataagcaggacaacccggagttgagaatgccgtgagcaatctcgtcgatctggttttgcttcaagaaagccaaagtcccaaaagagatgtaaacaacggaggatggttctctcgagtcaagccactctatgcagtcactatctggcttggagatgtctcccttgatgtcagaccttatggttttagccatagtaaaaagcggaccgatggggttgaagttgacttgagggcagagctgggacatgtggtcaatggtatctttttcaagttcttgaaaagtttcgatgagaacagagaaaggcttgtgaagtcgcttgatctgctctaaaatggtacctcctatagaggacagcggagaggaagggtgaagaaagctagggatctcgtcatgcttcaatgttaatggcttgaaagggacgtcaacggttatttccggctcggtttcggtcggaaacttaactaactggtggtggtaatagtaataagcggcgaggcaagcacaagactggacccaaagaacagctgatgggatttgaagctcctcggctatgtcacaaacccatggaacaaaggcattatttatgagacatctcactggttgcttctcatatttcttgacaagattcttgatctctcgttttccggaaacttcaagtgatttttgtaacaaatcaaagtcttctttgtagacaaatccatcctcgaagaactcgaaccggagaaaacctagcccgaccggtttgagcacaccgtcttgaatattgttggcttgacgcatcttcttgcccaatggttcctctgtggttacaaaggtgacgattaagcctttagaggcaatgatctttccgagacgaagaagagggcttatgtgaccttgccctgggaatgatacgagcatcacatgaggtaacgacgattccatctccatatttttttttttgttggtaaaactcaaaaagaagtttttgtcttctttacaatatttccaatttagatacctcgatttatggaaggttgggtagagaggcctttccacggcgtgctatttttttatacaaatattgataataaatgtagaaaaatatcataaaatacagcatagacataggggaaaaatgtcaattaatcccccaactttcaaaaaatggccattttatacatcaacttcgtatgcggccgtttaaatcatgaatttaacgttgactaattttaaaaacgtgattattcgttgaccaggccaaagcagacatgtcgttatcagtcattaacggaacttctaacgtccgttatcatccgttaacaactttattagtcaagttttaaattgtggccattttaaacatcaagttcatatgtggccatttaaaacatgaactaaacgttgactaccatttaaaacatgaaaaattcgttgaccaaaccaaaataaacatgttgttatcattcattaaaagaacttataacattcgtaaatttataagtttttagtcaattattaaaaagataataataagacaaaacaaaattatagatacaattttagaaaaaaagcgtaaaattaagaaaaaacaaaaactagaagagaagtttttataatgattataatgatattaaagtccttgagcagatgacctacttgatttatttttcaacgattacctgctctggttataatggtattataaaccacgagattagcgacttcataatcaaccaatataagaactctcttatgatagtattaaacataatgtttaacggttgaccaaaaacaaaaattaacgagtttagaccaaaacatgtgactctattaatttgattaaattgtggaacagatcacttattatttttgtcgtaaactccatgagctatcccacaaaaattaactttccaacaaactctaagattatgcatatcgagatgatgtctccactgacttttggtttcgaataaaatgttattaaaaattagatattcgaatttggatctttatcaaattaatataaatttaaaatatgttaaattctaaattgattcttccgactactagaattatttagttcatctaatgatatctccacgtctactttaacaaaacaaaaaaaaaatctccaattgtttaatttttaaatgggagaaaagtgtttatagaagaatcgtacatgatagattgatagaggttacatatagttttgtagctaggttttgtgttaatgaatatgatcgacctagttgtgacataaaaagcttcatgaggctttttgggcgaaatgagatgatcacactaactcaaggatgtgtaggtggaaaacaaaagagtactagattgccgttctcaaataatctgcgcctcggagatggagatctagttgactgaggatgcggactcgtaacattgccaccaccataacacacttaagggaaggattctaatggattccaaaatcaccacatgcatgacagtatgactcgattagaattagatagaaaaatgagaagatccgtcttcagttaccggcgaggaatgccgaaaaccgaagtggaagatcggtaatttttttttagtgcagagaaaaattaagaaagaaaagagaaacccataaaaatagagatagtttctcaaaatattatttgcataatcatcatattaagcaaacatgaaaaaatctctaatatatgaaacaatatattattataattttactatctattttttacacaaatgaaatatattaattggctaaaaaattatttttaatcattttatcaaattatattctaacaattaaaacaaaaattactattgtaacatgactatttgttcaaggttgttctcgttaaaaatatttcgaaataatttatttttctttgaacatatttagttgattttttatcagtaaaattatttgtttttcctaatgatatataactcttataaataaattaaataatatatacatactgtagttccaacgtatatcatcaatatctatccaaagttggattttcttggttgacgttacccaaccaaaattctcaattttcccagtggattactcttacagtccaaagtttcaatttttctgagcttcaaaaatccactctaatggcttcatctgcatttgcgtttccttcttacataataaccaaaggagcctcaacagattctttcaaatcaacttctctgtcttcttctcgatctttggttacagatttccatgtaagctcacttctctcttctctgcttcatcggtggaaattgtgagactttgtagttgcccatttgatagaatctagaattgaataatgggtttacttcatttttgacacaagtctaacaaatccgaacctttttctatgttaatttattgaaattgaatatgaattagacctatataagtttgcctcttcggttctaatttccggcgaaaaaaatgacagcttttgttctccagacccatctcttccggtcctaaataccaatctgccaagtccgctaaaccggaatctccagtcgccataaactgcttaaccgatgccaaacaggtaaatttcaccacttgaagttttcaattttgtacattgtgctaatgaacaaagccacatagattttgcttggattgtttcaaatactaaatctttattagaattcatgctgaatctatgatgtaattttttatttatgattgtggtgtttgatcatctttatattgataccgtttctttaaggtttgtgcagttgggaggaggaagagcatgatgatgggcttgctcatgtctggtttaatagtttcacaagccaatcttccaacagcatttgcttcaactccagtgtttagagaatacatagatacatttgatggatactccttcaagtaccctcaaaattggatccaagtccgaggagctggtgctgatatattctttagagaccctgttgtcctcgacgagaacctttcagtcgagttttcttcgccttcttcctcaaattacacgtcacttgaagacttgggatcccctgaagaagtaggaaagagagtacttagacagtacttgactgagtttatgtccactagactcggggttaagcgccaggccaacattctaagcacttcctctagagttgcagatgatggtaaactctactaccaagttgaggtaagccaaagtcaagtaccaaactacatcctccttctgtgaattcaactgactcgtgtttcggttaatttgaaactgcgtagtgatgtgttgttcagtttaactccaatattataagcaacaacgtaataggacggcttagatcatttgatagttgagcttgattataggaaagatgttcttgtgcctattgctgaaacaaagtgtgaagctttatgtgaatttggacagaacggggccattacatttgtcttggtgatatagagttgcataagaaacaattgttttcttgatcaatcatagtagtgtaacatgtcttgatcaatcataagaatagttttcatgtcttggtcaaacatgtcgtggcgttgttgttgcaacatgtcttgatcaatcataacaattgtttccttgagcaatcatagtgtttcatggttggtgttgcaacatgtcttattttcagttcatttgaagctgctacatgaatataatgttttttcttgaagttagagatatggaataatagctcataagctacattggttttgaataattgaacaggtgaacataaagtcatacgcaaacaacaacgagctagctgtgatgccacaagatcgagtggctcgtttggaatggaaccggcgctaccttgcagttctaggagttgagaacgatagactctattcaattagactccaaacacccgagaaagttttcctggaagaagaaaaagatctaagaagagtcatggattcgtttagggtcgagaagatttagaagagctcacattctcaatgtgaatttcttcttattccaaaccaaaaaatcttgttgcttactacttttgattaccaaactaataaatgattttgattcaaattttgagatgtcattatgacatagttgagaaatattgtgcactaccaaaaagaagagtaaaccagtcgtaaattgaaatgaaccggttaaccaaaattgagaaattattaccggttatgtaagctcttcgttttttggtttaaggccttgacttgacaaaagccctcaccggaaaaaagaagtagaagacgacgacgatggcgggatttgagagctatgtggttgttcacaacatagcaaagcgtcacaacgtcggaactttagctcgtagcgccactgcctttggtgtgacggagctaatcctcgtcggtcgccgtgatttcaacgccttcggtagtcatggttcagcttctcacatccgtttccgccattttcactctctcatcgaagctcgcaactatctcaaggtcttaatttcactctgaattacacaaagtttggaactttctttatgggtcttatctactagatttgaatgtgttcaaagtttgagtctttttgtttgtttggattgattaggaggagaaagattgcgatatatgcggcgttgagattgcagatggagcttctgcggttaatgaacatcctttcaaaagaaacactgcgtttcttctcggtaatgaggtaatcaaaagatctggtttttacaaaacttttgagtgttgcaactttggttagttttgtgaacttgggtacttttgtttggtatgagatcataatctctattacacttcatctgtgagcttaatttcagtgatttgaaagacgttttctgattcaagaaactggaatctagttaggtatcttcacttactaatgtgagagttagtttacttcttcagtttgaatatggatctcactttatttcaaaacacagtgtgctacatgatctttagtaaaattcatctgttaacagtaatgagggaacaagtagataacagaaacttcaatggtttgaaacaaattttacaacaccagagattgtagtgaagttacttatctcaaagttaattgacttctcgagctttcttatgtaatcctctccctatgcgattctaactctttttattttgtctggagactattgcccatttaatctttttggcttcaatgattgttggtctctgccattagctaaatggtaattataagcattcaagatttgaacaaattgttactaaaggaccaagttttgggcttctgtagggatcaggattatctgcgaaggaatacgaaatatgcgacttctttgtatatattcctcagtatggctgtggcactgcctctttgaatgttactgttgcagcttctattgttttgcatcactttggaggtatttttttctgtttttgttcccattttttatatgctgtttaagatttgaaaacacttagatggaaagcaagattgtagagaataataactcggcacgaattcttagtcatgtatagacattaaagatagattgatagtgttggttgcttaagaatagtattgttctattacagtttgggctggattttctgaacgtgttcgggatggaagcaaatttatagtggctgatagacccgtaagacaaggaagacgaaatttctgcgccggcacagaagaatccgtcattgaagagcggaagttgaggaaagaaagtgcagaaaatgggtttttcgatgacaatggaaatgaaaatggaagttcatcatccgaccttttggacggtttgttccttaacgaataattatcttttataaaagaacaaagtcttgatttgggttccaatcctgggaaacacatccttcaatatatattatcaagcaagttagcttactcacgcttgttcattccctagttaccgaatctttgtttcgcaagttgagaaagcttatgaattaggctaagttgattttgattatttgatctgcctttggtatgatactatgattatgaacatgtttgaaaatgattcagttgatagaatctcattacgctgtcttacattgtcttcctcatgtattctgtttagaaacaatggtttttattttattagcaattcaattattacatgaaggctttatattctacattctttagaaggaaacaaaaatagttaaatccaatatctttgattttgttcatttttatggaatagaaaccaaagcttttttattcacagaataacaccaccaagttttttcttcatcatgcaacaactacttgagcagctgcaagccttgcaattggaaccctgcaacaacaacaacaacaacaacaacaacagaaatcccaaaattacatcaatctgagttatacaatagtgttgtaaaaaaagtgtttattggtttggaaattaatcaattacctgaaaggagaacaagagacatagtcaagtcctgcttcagcaaagaatcccacagaagatggatctcctccatgttctccacatatcccaaccttgaggctaggcctagctgctcgtcctttttctgtcgccatcttgatcaattgccctacaccttgctgatcaagaacctggtccaaacacaaaaaaatggctatcaagattttatcctatggatagagagcaaacgaaatggtagtcattatacctcaaaagggtcgtgctgtaagattcctttggcgaggtaaatcggtagaaacttgccgacatcgtctctactgtatccaaacgtcatctgcgtcaagtcgtttgtcccgaacgagaaaaactccgcctctttcgcaatctgtcaaaagaaaaaggttcctacttagcaaatagcaacatggtttcaagtgcctaaaacacattttgtgtcttgttacatttacctcatctgcaatgagcgcggctcgagggatctcaatcattgtcccaaccttgtagctcacggtatgacccttctcagcaaatactttctttgcaactttacgaattacatcaacttggtgacccaattcctgaggagttcctacaagtggaaccataatctcaggaatgacagtaacaccttggtcctgcattgacgctgcagcttcaaaaattgcacgcgcttgcatctccgttagctctggatacgatattccgagcctataacgtacaagtttaccgatcatcagattgttcttcaggtgcaaagagacagagagaaacaaagagagtaagaaacctgcaaccgcggaaaccaagcattggattcacttcagagagtttctctatccgtgacaagacttcatcttctttcacaccagtttcttcagctagctcatgtacaatgttgtccaagtcgccttccgggagaaactcgtgaagcggagggtctaacaaacggattgttaccggtaaacctagaaaaataaaaaggtttaggcatgttttaagttgtgatacattttagagagacgactcaaaacatttaccatccatagcacggaagatcccttcgaaatccgaacgttggtaaggaagcaagatgtcgagagaagctttcctttgctctgttgttaccgccattatcatctttctcactgctttaatcctatctgctccaaagaacttaaaaaccaaaccaaagacaacattaaacatttggatacaaacaatctaaatcatcaaaaacatgaaatcaagtacagaggaggagttaccatatgctctgtcctacaaagcccgattccttgagctccgtttttcctagctgcaatggcgtcttcaggtgtatccgcattcgccataaccttatcggtcatcgaacatttgagttagaaagtttaaaaatatcaaacaagttaaaggaacagaaactcataaacaccttgagacgtctgattgcatcagcccaggacatgaaagtctccaaatctggacttaaagccggaggagccaatgcttgtttccctaatataacctcaccggttgatccgttcattgagatccattcgccttcattaatcgtcaaatctccaatcaatagaacctgaaaatttttaaaccctaactttagaaacaatcttcccctaacttatatgacaagtttctaaaatcgaatccaaaaaccttgtggttctcgtcgacacgaatctcggaacaaccagcaatgcaacattttccccaaccgcgagcaacaacagccgcgtgtgacgtcattcctcctctagccgtcaatataccttccgctgcgtgcatacctcccacatcgtcagggcttgtctcagttcgaaccagaatcacagttttaccctgagaatgccaagcttcggcttcctccgccgtgaacacaacctgtccaaccgccgctcctggtgacgcaggtaagcctttggccaccactttttcacgataccccgatggatcatgaaactaatccatcaataaaaaaaaaaaaaaaaaaccttcattgacctctgaatcaaaatttccaaaccctattcatcggttacgtgtcagacaatcatctctgcttttactcctaaaccctaaacgtcttaaacccattagttcttgttcaagtgaaccaatcattaccagtaagtttcgaattttggtttcaacatcaagtttatgactatgaaaaaagaagaagatgaatatttgagtttgtacctgtgggtgaagtagttgatcaagatgttgaggctccaccattttgatagcagaagatttctcaacaagcccttcacctaccatatcaactgctatcttcacggcgcctttacccgttcgcttacccgctctgcattgcagcatccacaatctctcttcttgtactgtgaattcaatatcctgcaatacacatttgagattttgtttaaattactaaagaattgttgatgaggactaattgaagtattgtttatgtgtatcaaccatcatgtctttgtaatgtctttctaagatgttgcagttctcaacaagttcagcgtaagcctcaggcataaatctcttcattgtatccaaatcttctggtgttcttatccctgcaaccacatcctctccctgtcccaaaaccaatatttaatgagtatgggcttacttgttgatatgagattcacacattgtgatagatgccaaacctgagcattaactagaaactcgccataaagcttcttctctcctgtgctagggttcctagtgaagagaacaccagtccctgaagtgtcccccatgtttccaaacaccatacactgaatgttaaccgcggttcctttcaatccagttatctggttaatacttctgtacttgttcgctctcgggctatcccaagaatcgaataccgcttcaatcgctagctccaattgcttctttggatctgcaattaaccccgtttaaacatttgtaactaataactaatttttatcacttgacctcaagtaggaatcaaaacaaacctgaaggaaactcttgacccttggcctctaagtaaacactcttgtactgctcaaccaattccttgagatcagccgcgcttaagtcagtgtcatttttaactcctttcctctccttcattctctctaacttctcttcaaacttggcgtgtggaattcccatcaccttttattgatcaagaaaacaattataaggtaggtcaaagaattttcttgtcatgcaagttacctgaaatagtattgaaaaacagaggacttacaacatcaccaaacatatcaagaaaacgccggaacgaatcgtaagcaaaacgctctccgctttttgcggccagaccaacgacgacttggtcgttcaagccaaggttaagtacagtgtccatcataccaggcattgagatctacaatgcaaaatatcgatcaaagacaagtcaatgtagttctgttttaaaaatagataaacgaaagatcttcattttctacgttatagtttgaataccaaaatcattaggtctttcaatagccacaaaacttattcattttctatctagtacattttaaactcttccaaaaacggccaaatggcaaaataaccaaaaaaatatttggatctcaacttcaataaaagaaatctaacaagtcaaaatctgcgtcaaaaaatcttcaaaagattaaagaaaacatagaaagaaaaaaaaacagaaatttaacattagaaaaaatccttaaaataaaaatagtcaagaaaaaaagttataattaacttacggcggcgccggagcgaacagagaggaggagtggcttggagggatcagcgagggaagctccaatgtcacgttcgatgaagctaagaccttctaagatctcttcccataaaccttctggaagctttttgccggcgatctgatactgctgacaagcctccgtcgatatggttagccccggcggcaccgacaagcctatgctagccatctccgccaggttggctcctttccctcccaacttcatacacaacaacaattaacatttttgataaatggttcttgaaaatagcaaacactaaattattaatgaattgatatgatcatgatgatggtattggtaacataccaaggacttcatgcccttgttgccttcgcttcttccttttccaaaggtgaatactcgctgcatcatggttttttgtttgtttgttttgattgaggtttagattgcagaaatgtttgtgcaagtttaagaacacatatacgtatctatatatatagtaaagcaaaaattggataaaatagattctgtctaaagcacaaagataaattgatcaaatttatccatcctaaatttgacatgtccattatgtaaaagctaaatataatgtttataatttaagctaaaaataaaataaaataaaaaataattattattatgatcatatgtacatcgaataattttataatataaaaacttgtatacagtcgaaatttcatatttaatataaatcatttatagttttgatggatacgtcatcaaaaatacattattatcttatcaagagatcattccaaaattccaacctcgaaatgctaaattgtaatataattgaccaaaattaaagaagtttcgttgcgatgactcgtcatagatgtgtcaaccatatctgatctcactcacacacttgctatctgccactaccgatgctattttcctttttaacaaaacttttacttaaccaaaacaatagcaaacaaatgtcatcaaattcaaccagttcttgtcataccatctctaatacatgaattctttatggtgaaggtgaattgtggatttaaactagtatcataatttttgtgttttacgccaagaatttgattgccgtttggacatattcacgtattctttggcacaataacaaaacgtggcattggtggatctaccaagtggcacaagagtctgacttaagcagcaaagtggtctttgaatacattaaagttgtttctacgaaaagtagggctaatgaatctagaggaaaagtttttttttattacaaatttcgaaaatacttgaatttaaataagttcatgtttccacaataatttaattcaaaatagtactttcataatttaggccagacgctatttggtattactaccgaaatgatctcacatcacatgtgtgtattagtttgaaccgttcgattgtttaaacaagagtaacgaaaccaatcaacatcaaataattaatcgtctcacaagatcacaaagcaaatgtcacaatggcgtaacctgttttgtattctataaccggtagggttataaccgataataattgagctgctagatggttcgacccaatgatcggtgatagtttctctcaagaatctcacgtcagaatcataaaacaaaacgtaataaaaaagtgtataaaattttatggtgaaaatacaccagaatgattgaaatggaaaggcttaccttttgggctatggaagcggccggatcggacacagggctaagtatggctcgagccttcgtctcacgatgcaaaccggtctttgctatgcttaaccgttggcaatggattgtaccggttctagggaaacggtttgatccatcacctagccggtttgatcgactaaccattcggttttctccgagatgatccgtacggaacactccatttcctttgaagagctccggcgttgtcttcacgatcatacttgtcattttctttcttatataaagcataaaccacttaaataaatataatatacttacttttaagagttgtatataaaaataaagaagttgagagaaaggagtgtataaaataaaaatatatatagcttacgtgatatggaaattggtgtttgatggttagctatttgcgagagtagaaatggcggttctataaatttcttctctgatcctaatttatttgatttttgttggttcttattagttacgtagactttatgtgatctatttttttatttatattttatgtatttttggaggtttatagattttggtttgacgagtgacgtgagtggatgaaagatagatgtggttatgattggctaatgtgtccattccacggttgttctttttcctttgaacgaccatataagtggctaccattaaaattgatctctagaagttgttaggttttgaataagaatcagtttccaaaattatgaggtcatatgtatatagttttattttcaaatagtaaaaaactttttcttaagttcaactccatcttattggtaaaatgatgttgcttggtttgttttccacatgttaagatattaaggaaataaaggagattgatggagtaggaacctaaaagtatttgtggttctgctcggtgtgaatatgactagccaggttccaggagagggatgtggtatacaatttaactatatatttacaaaaatttgtttgtatactgttgcatacatttttatatatcattttgttaagttattaaaagaatgttgaagagaaaaaagaagaagataatgaatgcattttttcttaatctattgattaagtttataatattaacttagcgatacatgcttataataatttatacaattacatctaaactgttaagacttttggggggggggggtaaatcatactaaagtttaattggggcttaattagtttaaaatggtttaaaaaattcaatcgctcatttgattactaatcggacaaaggaattcacgaagcaagcatgaatattatataacttgagaccattttttcaaaaatttgtaacatttatggaaatgcacgcatggcagtaaaaaaaaaagcattcaaagaatgaaaagagagggcttagaacttccgaagaatctggaagtgtcatatacattgatgctcgagttaactaagggacccaaatgttatgggagtgtgtggctatgtgccatgctctgttgaactttctggtgatgtttttggttagagtataactattagataactccaaagactcataaattgtggcaattacgtggaagatgtgagccaacgcttgcgtgccagactgccggtccaatgttttgcaataccatcatttaggtgatgataattgataaatgataattaggtgagataaccatcatttgatcaaatatatgataaaatgaagtgaatgactattaaatttaatggaagaaaatatatttttaataattaagtctttttcagtgtttttctaaaaattggtatatcttcaaagtatttgttttttcaaatttttacaaccaatggttcaattttcttacaaattatttaaaacatatataaatatttatatttgcatatgtttttttgacatttttagagattaatatttcaggatatttttgacccactcaattcaattatcttagaaagttaaacgagtgttttttttatcactgtttaatgtttatacagaaaaggttttttctaattaaaataaattattagtccatctgttctccattatgtaacatgattaagaagtaattttttctcattcattagatttttttgtttccaagtttctatgctttatttaattcaatttgatgttttatgattcctaatattctgcattattttttcttattggttgaattatttctagttgatataaatgattttcttaatgaaatatatataactatgtaattcttaaatgttgtgctttcaagtagaaaatctcatattaaaattgaggaacttttagatttttggggataatgtagacgttttgtgtatatttttttgaaccatttttattattttaatggaaaaaaaaaacacagatttcaaacactcgagagtcaagagtctcagacccacccagcttctggtttcgtttcgccgtcgcgcacggctgaacatatctgctatatcggagattagtgaaggttaatgctaatatattggatgatactgaaaatcgaagctttagtctaatttttgtactccaattgcttcaggttagttactattgattaaaggtttcataatttggggctaatctctctgcaaggtgacgagaaaatccactatccccttcccaagatttgttctctgaagatataaagtctcaatctttggataagaaagttcaaatggaaaattggaaacttttcttcagttgaatgaatgatttagctgaagaaaccaaagctagaatggggcaaagttcattgtcatggggtccctagaatattcgaatctatgatccttttggtgtaaagtattagtcaagttgagagatattttttacattttgtggtcactaatcatgtattggagttgattgcttctaaactcactttaacttgtgagagagtttctaagatatcaaataatctatcatgagagaagagacagtttcttggaagtactttaaaagagatgttgttccgttcactgcgatgatcgctatagagtgtacaacggttggatccagcatactgtataaagctgctaccttgagaggatttagcttttatgtctttgtgttttacgcttatgttggtgctacacttgtccttcttctactttcacttatctttggaaggtacttgatcttctcgaagcaactatgactcttgctaagttttaaagaatatgaaacttacttgttgttgaatatgcaggtcgagaagtttgcctacagccaagtcttctcttttcttcaagattttcttacttgcgcttctcgggtaattatatcttcatgtttctagatttatgagcattttcgggttgtttatcgctaacttgggggtgaataacaggctcacgtcgcgggtagctggttgtaaaggtatagaatatagttccccaactctttcctctgctatcagcaatcttacaccagctttcaccttcatccttgccatcttcttcaggttccactttctcctaaaccgggtgattccaatcttaaccatacaaaagatatgattttcacacagtaacagtcaatatgaaatgatatttttgtctgtgaattatggagtagttgtataagtatgagaaatgttggatagatatgaggtttgtttgtaactctaactttgatgacttgttctgcttccttgggtgacttaaaggatggaacaagtaatgttaagaagctctgcaactcaggctaaaatcattggcacaatagtttctatatctggtgctctggttattgttctgtataaaggcccaaaacttcttgttgctgcatcgtttacttcattcgagtcaagttggataattggaggccttttgctcggtctgcagtttttgcttctttcagtctggtttattcttcaggtagtacatacacttggaacagattcatgaaagagatttttggatttgttggtgacgcataagattgagctaaatttgtcacttccacatgattttagactcatatcatggagatataccctgaagaaatagccgtagtcttctgctacaacttatgcgcaactctaatctcagggacagtatgtctacttgtagaaaaagacttgaattcttggcagcttaaaccaggtttctccctcgcttcagtcatatactcggtaagtaatcaaacctcataagttgagaaatcaaatctttagctcagaaactaatactctgtttcagggactctttgatacatcattgggctcagttatccacacatggggtctccatgtgaagggtccagtctacatatccttgttcaagccgctgtctatcgcaattgcagtcgccatggctgctatattcctcggcgacacacttcatcttgggaggtaccatcttattaccttcaactttataatgtctctttcttaaagaaacatagtgatgataacttagttctaggtgtttgaaatgtttagtttcatcttcaaatacataatgaataataaaatgtgaagacagtaacaactaacaatcgatatagattttcggttgttaggtaataagatttacatgattggtacatataaatttgcatctatgtgttgtgggcagtgtgattggatcagtgatattgagctttgggttttacactgtgatttggggcaaagcaagagaggattcaaccaaaacagtaagtgattctgagcaatcacttttattgccttcacacgacagagaagaagattgaaaccttgtcatgaaaatatgttggagacaagtgtaatcgttttcttattttattcataattatggtcccattagatgatgatgatccctatttatcttgtaagttgtaagatcttatgacttgtacaaaaaaaatctaacatgatacattgaaatgtgaaaaatgatatacttatttgttgagaaaatgataatatttcttatagtataaggaatttatttacttttctagggggtaaaatccagctatgtccggattttcggtttgtttgcaatttgaatccggttttgtatccagtttgacgtttggaattggatacaatgtatttgtctcctcttatgtgtccaatgaattatagtcctatccattcatagaacaaaaacttggcttacccaattcaataccacacattatgtcatatcacttcacacaaaaagacaaaccatacgtgaccacatttctctttatccacacacattcacgtctatcaattcaatcatatcaacattacataaccgaaccggtatcaatcccaaaccggaattgtatttcccataacacaatagaatttagcgttgacataatgaagctttttgtaataatacagtctcaatcgatgaatattgatatgtaaaatcaagaaattgtttggtttagactcaaatttcggtttaatactaataccgggttataccgtaaccgtatatgaactcataaggtacaaaaaaaacacagaaaacgagaaatgtcagagatagaagaagaagaagaagaaggatcagcaagtgcaattacaggttcgagaagtttcgatcttcccgatgaacttcttcaagttctaccgtccgatccattcgagcagctagatgtagctcgcaaaatcacatccattgctctctcgacacgtgtctcagctctcgaatcagagtcgtcggatctccgggaacttctcgccgagaaagaaaaagaatttgaagaactccagtctcacgttgagtctctcgaggcttctctttccgatgcgtttcataagctttctctcgctgatggtgaaaaggtccgacccgacccggtttttgactttatttgttctgttttgacccgattcatttttactgattttgatctaattatcttcttccaggagaatctgataagagaaaatgcttctttgtctaatactgtcaagagacttcagagagatgtctcaaaggtaattttgactctgtttcaaatttgacgtcaggtctctttgtttctaaatttggaagtagctgagattttagggtttttgtttctaaatttgtgtgcagcttgagggttttaggaagacgcttatgatgtctcttcaagatgatgaccaaaatgtatgaaacttatactcttcatgttctctaatttgctttgaagtaacaaattcatgatcttgaattgattgtgtttggttttgtaacaggcaggaacaacgcaaatcatcgctaagccgacaccaaacggtatagttcttgtgaagattttagtgaaaacttgtgttcatataccaaaatggatggttcttattgtggtttattgtcattttcagatgatgatactccatttcaaccttcaagacattcatcaatccaatctcaacaagcttctgaagccattgaaccagctgcaactgacaacgaaaacgatggtatagtacttgcttgctctcaacgcttaagccactaaccttttgtgtttaatgcgttagtttgttttgtgttatatcgtagctcctaaaccaagtttatcagctagtcttccgttagtatcacaaactactacgccacggcttactcctcctggttctccaccaatcttatctgcttctggtacaccgaaaacaacttcgagacctatctctcctcgacgccattctgtatcgttcgctaccactagaggcatgtttgatgatactagatcttctatttcaatctcagagcctggttcacaaactggtaagttcaaaccaagattttcttgtggcgggttttggaacaacacctttatttacggtttgtttgttatcttcgttttcagcgagaactcgggttgatggaaaagagttctttcgacaagtcaggagccgattatcttacgagcaatttggtgcatttcttggaaatgtgaaggatcttaacgcccacaagcaaacaagagaagtaaggagaatcctctctcaatcatctttaccctctttcgattcaaaacttggattctgattcgacctgcaatgtcttttcttctttgttttctaggaaacacttaggaaagctgaagagatatttggaggcgataacagagatctctacgtcatattcgagggcttgatcacacgcaacgctcactaagagtttggcttcttcagttacacaaagaacttatatactcggaaactcaggattcatcagtctgcaacattcaatttcttttgtttccttggctgtcaagtaagaccaagtaaaactgacaatttgattgtatcatttgtgctctctcgtgtatctatctatctctctcttcttgaataaattacatttcatcatcttcaaaactaaccaatcaacatccaaaatactgtctactgtattgtgtaaacattgaaacagagcaaggaagaacagaaaagcggagtgttgttataatttctgataccaaaatcacatgtgctcatcgacaaaagctttgagatgattaaaggaagagcctccttctctcacagcctccgccgctaaatccttccacctcgtggcatttcctctaaactcctccgccttgtcttccataacttcctcaatgcaccgccgtatctcctcactatccaccaccacaactccttcttcttccttcttctccatcactcttacacctgttttccaacaatcttctaaaagcttcgcgttcatcatctgatcattccattgcggaaacgccaccaccggaactcctgaaaccaagctctccagcgtagagttccacccgcaatgcgtcacgaaacaacctatcgatctatgattcaaaaccctaaactgatcacaccatgaaaccaccattcctatctcatcgagctcttctctgaaactacttatgcaatcttcttccttctcttgctcatcttctttatttctgtacgacttatccgtaatcacccacaagaatggtctccgactttgtatcaacgctttacaaagctccacaagctgtttcttgctcaacacggcaagcgtcccgaacgaaacataaagcacagacgaatccgctttagtatccaaccactctatgtattcaccgcgactcgaaaaatccgttctcaacgttagtaacggaccgacagggacaatcttgaaattatctggaaccgagctcatggcttctggctcaagctcttggaaagtgttgatgaggatcttagggtttatttcttccttcagtgaatcaatctgttctcgaaacgcgggtagaagaaacgcgtagacattggaagagacaatgaaagaaggaatatcacggacagtaagcagtggcagagaaggtaatttaatagaactagagggggtattagccatctctgagattgcatcttcgtagccattgaagtaatggtaaaaaatggagaagactgttactggttggacccaaagaagagcagaaggaagatgaaactcacgcgctagctcagcgacccaagtgaggagaatcgtgtaaaccacgcaagtaaaaggcctgttttgtttccggttatcttcgattagttcggttagtgtctctttgccacgtcgtctcatctcagacatgaagtttccagtggcgtcttgacgagatttgtcggagtaagcagaggatttgaaaccgtcgtcgtggccatcggagtaggtagcgaagattagggtttcggggacgttttctgtagagaacatgcggcggttgtaggcagagattgaggcggcgaaggtgactcgagcaccagagattgttccggcgaggcgtttggctagctcgagagatgggttgatgtgaccttgggctggaaatgttacgaatagaaagtgtggaccggtgggagagttggaattgttgttggccatttgtttaattattggttggtgttgttgttactaatgaaagacaataacacaaaagtttggttttatagagagtttatactgacagacaaaatctgatctcagtgaaaataggaaagtaataatattaaacaaagacagaaacagagcaaaccccactaactaaacattgaacaacgcaattttgtgacgttagtgatgacgaaaaatctatatggattcagtggatacgagcacacgaccatttggcctaccatactttttttgttttttttgaagaaatcgatgcatgatatacacaagtttatcagatgtgtatataagtgatagtgatatttaacgaatatatgtgtaagtgataaataacgaacgagaacattcaactataaagccttttatcagtaaaaagaaaagaaaaagaactttcaacgtacgtgaaaaagtagaattgtttgacattaatttgaacgcattaatgcaaaagataaagaccgaattgactgagacagtcttaaaagcggcgttcatcgtgttattcattcaccaaagtctactggtttatatttgtctagtcaaatccaaagtcttagaaaaatatgctgaattgtagctagcttgtagggattgcaccatgtcaaacaactttctttgctatatatgttttatcaaaaaaactatcacttatgtatattttgggtttgaaattgagctatatcgataatatcagtacaaactctacctagtataaagataagatacgaatggtatagagccgtgcttactctgtaatgaaaagggcaaatgccctaagccacatcttatagcctaattttaggatgccacatttttaagaaaatgttagtgttgttggcaaaattacctcactaacagtcatttttccaaagatatccagctacaattccactaaaactttattcatttttttttttaatcacatgggcttttgacataaatcggaaatatttttgtgtatatttatgtttctatggtagtattttacttattctctactaatgtttgaaaagtatttagtaatttctagttgtccaatggaagttttaaaaaacaacaataaaataataatcaaaattaaatattttatacatatgagtttttagttaatttaaaaagaggctatgtttgttaaatttttgccgtaggcctcttaatcattggcacgacactaagttattagattaatgattaaaggtgaagtttttatgttttataatattcaagaagtttgacttcaatatttactcatggagaattaatttgatttcatatggatgaagtaattgatatctcaattaaaaaaaaataatatcttttgatagtgacgacatgtcatgcaaaaagattaaagaattatcccaaaacttgaaagataaactttcgatttttgtccaaacaagatcggataaaaaaaattcttaaaaaagaaagatatcgactatgacaagaaaacctgatcgtcacgtatctagccattttgtgcatcatcagatccattatgtaattaatcaataagaggactgcacagtcggccctaaaaaaatgttatgagttaaacatttcaaaacatgcttgcaaataaactgtgatagcaacattttattaattagttcgataaaacaagtgaatttgggttcatatataattatggttccattatttcctttttaatctcattctaacacaaatatacagatatgtttacacaaagttagaacacaataagattttctgtcttagacagaaagcttgataacaaattataagaaactaaagacattcatgttataagagtcttgtgagttctagacaaaaaggttcaaggtttacaaaataaaaagtagaacctttgagaaagacagtaatttctcacgttttttcggaaagttcagtcatcactatcaacacacacatgagtatacatgatatctttacaaaataattagtttctttatcttgaactttgatgtaaattgcaaatgattcgagataaaatgaattcttgcctaattatcttcgtgagtttagagaaatttgtgatcaattgagctccataggtcctacaggcccgacttaacacatgtgttaggagtgctagacgatatggtccaaaaaaaaatctttatttaattcatacaaaaagttctacttttttgaaaaacaaatagctactaattatgattatatgtttctcatttttacatccctcgttgtatagcagaagcacaacatgctgattattctggtacaagttaataaagcaaagttgtgttgaaaaaaaaaaaaaaaactacttatatttaaaaaattaaaaatattcttagttatctaaaaaaacagaaccactaatcaagaaatataccttaaaattctaaatttggtttaaaaaataaatatggaaatatccaagtttcttaaaagtaacatttctataattagaaaccacacttctttaataataatcataggccaatattttttttccaataacccttaatttttttgggtccgctctagcaccgggtcttgccaatatttgagccgaacctctttccagaacacaacttctactcgtaattttcattattctttccattgtgaagatacaaatttgttgtgttggaagatgtcaatgtgaacggatataatggtaggttaatgagaatgtttttttatggtagtgttctagaatcagtagagaagtcatatgaagtagatgatgatatacatggtgagatgaagggaaaacagttaccttttggaatagggttgaacctctccaaaaagtgaagttgatcactgataatacaaggaaatgataaagaggtgacattcgagtgatcaatgaacctgtttcctcctaaatgttgttagtaacatgtttgattgtatgttgttagaatggtttatcagagtgcattcgcacaactatccaatctctcgagatcttctctattcgttttgatattttgaactttttgaaaacctctcaatctattgataagacaacttttttatgaaaaaatcaagtttgagaactaggttttgtgtttattgatctagtttacttagtcatattcactaagtcgtcaatatggtatgctttcaacaataacatagtaatttgaatgcctcgtacattttaggcgattttctattacaatgttttggtagagaatacgtatttgtatatttatgatgtatacgtgcatatacattaattgttttgtcggtttattatgatcaaacaatagtttgtctgtcagaagattcaagaaatatctttgaatctgagagtttccaaaaaacgttatgatgaaaatttggcatatacgtatttctgacaagctgataatattgtcatcttgcatttcaagcagtttcgacaaaattttatccaactgttatattcaaactaattgaaaatcgaaaaaccaccattaaaaattagttaaaaataacatatcattttgaaaatgcaatatttaaaaatttaacatatcaatttaacatgcttgttttcttaataagttttgatatattataaaatgaaccgcgtgattacaatttttctttttgtgatggaactgtcgttagttaaacacttaaacttaaactttcatgtaagttttgtttattcatatttgactcaattgaaacccaataatcaagaatgtcaaatattatatgttttgtcggatttgtaacgtgattctcgctcatttaataatgtgataatatcataaaatttaatctatgtagttgtttaatatgatattaaactttattaatgtaataagatcgataatactaagttactaacccaaatcatacacttacgagttacgacactaccgcactatcttggttatattaaatactccttttgtttctaatagtttgatgtttatatcaacattattatttactttcatttgttaccgatagaaagaggagaaaattgttgacaaaaacaaagaaaaaagtaaaattaatattattaaattaataaaaataacaaactgtaaaagctatttttaaaaatttttcttgtaaaacatctaaaaattattcttgtagaaacagaggaatatcattgaagataatagtgtgaaattatatatatatatagaaatatataaagtaggatttttttctgtatacaaatatacgtttccaattttatcaaaaactgtaaagatttttttctttgtcagtacctgctaaacttgttaatttttttattaaaaaaaaatcaaattacaattcttctataatcattttaaattccatttctttataccacaaaagattatattgcctttatcgtctttggtatgtatgcgtgaatatatttatttattttcttttctttcattttctttttaaagaactttataaatgaaataaggaacaaacaatatacacatgtactaacgtatataaataatatcatcaatatctatccaaaacttggatttcatggttgacgtggcccaaccaaaatctcaagttctctgcggatgacgaaccatctcaccatctctttttttctctctcttttttttttttaatatcatcagcacggttacataaaattcgtgatccatgaagttggctttcttgtcgttttacttcatcaccccatttttttaaagtctccatctttatacttcttcaactctccaccaccaccattgtcaccaccacatttaaacacacactttcacttgtagtgggattcgaaagtgcgttttattcatttgttttactgtttttgataacctcaaaatttgcctaaattttattctctataaatccttatatgttttacttacattcctaaagttttcaactttcttgagcttcaaaaagtacctccaatggcttcttctgcatttgcttttccttcttacataataaccaaaggaggactttcaactgattcttgtaaatcaacttctttgtcttcttctagatctttggttacagatcttccatcaccatgtctgaaacccaacaacaattcccatgtaagttcacttctctcttctctgcttcatcatggaacttgatttaagaactatgagattttgtagcttgcccatttgctgaaatcttgaattaaataatgggtttactttgtttttgacaaaagtcaaacaaatttgactccttttcttagttactttattggaaatctgtggaaaatatagtgaaattagaccaataatattgcttctttggttctgatttctgggaactgattagagaaaatgacagcttttgcgatttgggttttgtgttgtggtacagtcaaacagaagagcaaaagtgtgtgcttcacttgcagagaagggtgaatattattcaaacagaccaccaactccattacttgacactattaactacccaatccacatgaaaaatctttctgtcaaggtaaagattctagctttgatgcatttgttttagctttcttacaaattgatggattggtggcatttggtaacaacttattgcaggaactgaaacaactttctgatgagctgagatcagacgtgatctttaatgtgtcgaaaaccggtggacatttggggtcaagtcttggtgttgtggagcttactgtggctcttcattacattttcaatactccacaagacaagattctttgggatgttggtcatcagtcttatcctcataagattcttactgggagaagaggaaagatgcctacaatgaggcaaaccaatggtctctctggtttcaccaaacgaggagagagtgaacatgattgctttggtactggacacagctcaaccacaatatctgctggtttaggtaatacaatcaatcattcctttggtgtgtttgccttgtgttgttgtgtttagacagtaaactgtaataagaaaacagaactgaatcagatatatgagttttacaggaatggcggtaggaagggatttgaaggggaagaacaacaatgtggttgctgtgattggtgatggtgcgatgacggcaggacaggcttatgaagccatgaacaacgccggatatctagactctgatatgattgtgattcttaatgacaacaagcaagtctcattacctacagctactttggatggaccaagtccacctgttggtgcattgagcagtgctcttagtcggttacagtctaacccggctctcagagagttgagagaagtcgcaaaggcaagtttattgcatttcttttctagaatggtaaagaatactggtctttatggacttgatgagaattttggcttttcttgcgtatagggtatgacaaagcaaataggcggaccaatgcatcagttggcggctaaggtagatgagtatgctcgaggaatgataagcgggactggatcgtcactgtttgaagaactcggtctttactatattggtccagttgatgggcacaacatagatgatttggtagccattcttaaagaagttaagagtaccagaaccacaggacctgtacttattcatgtggtgacggagaaaggtcgtggttatccttacgcggagagagctgatgacaaataccatggtaaaacaagttagatagataacgttttctctagttcctaagcagtgggatatatatattgattatttttctttcaggtgttgtgaaatttgatccagcaacgggtagacagttcaaaactactaataagactcaatcttacacaacttactttgcggaggcattagtcgcagaagcagaggtagacaaagatgtggttgcgattcatgcagccatgggaggtggaaccgggttaaatctctttcaacgtcgcttcccaacaagatgtttcgatgtaggaatagcggaacaacacgcagttacttttgctgcgggtttagcctgtgaaggccttaaacccttctgtgcaatctattcgtctttcatgcagcgtgcttatgaccaggcaagttcaacatcttaatcattttactttgtaataaaacattttaagaaactaatagagtatatggtggccttctctgtaggttgtccatgatgttgatttgcaaaaattaccggtgagatttgcaatggatagagctggactcgttggagctgatggtccgacacattgtggagctttcgatgtgacatttatggcttgtcttcctaacatgatagtgatggctccatcagatgaagcagatctctttaacatggttgcaactgctgttgcgattgatgatcgtccttcttgtttccgttaccctagaggtaacggtattggagttgcattacctcccggaaacaaaggtgttccaattgaggtataactttggtcctctcaaatatgtctctcttccttcatcattttgagatagaaaatctctttgggtgtatttcagattgggaaaggtagaattttaaaggaaggagagagagttgcgttgttgggttatggctcagcagttcagagctgtttaggagcggctgtaatgctcgaagaacgcggattaaacgtaactgtagcggatgcacggttttgcaagccattggaccgtgctctcattcgcagcttagctaagtcgcacgaggttctgatcacggttgaagaaggttccattggaggttttggctcgcacgttgttcagtttcttgctctcgatggtcttcttgatggcaaactcaaggttacttattacttccagaaactctctaatatttttctgtcttttcaaaaaatactgtttctaatttgcaactgtttgaatatacagtggagaccaatggtactgcctgatcgatacattgatcacggtgcaccagctgatcaactagctgaagctggactcatgccatctcacatcgcagcaaccgcacttaacttaatcggtgcaccaagggaagctctgttttgagagtaagaatctgttggctaaaacatatgtatacaaacactctaaatgcaacccaaggtttcttctaagtactgatcagaattcccgccgagaagtcctttggcaacagctatatatatttactaagattgtgaagagaaaggcaaaggcaaaggttgtgcaaagattagtattatgataaaactggtatttgttttgtaattttgtttaggattgtgatggagatcgtgttgtacaataatctaacatcttgtaaaaatcaattacatctctttgtgtatctttcatagctttgtgtgacatattttggtacgagcagtgtttttaaacctggacctatatatatggcctcattgactgacgatcgaacgtaccaatgcagtgacccgaaccactttccggtttacattccaatccggttttacaagattggatacaagtattttttttttcaaaatatccccaaagagcctaaaggcattgaaagactctatctacagaagagagttctcttgttaagaaaatattagacaataatagagtatcttcattatgttcttataatcttatctaataattactctcactaaataagatgattatgattatagtttgctttcataaagatgaatgtattcagttttacttattaagtatactttacttgggaatttatctatacctaataaatataaaatagtgtaatcataattaaattgaataaaaaaatgaaaagaaaagatatagtatcttaattatgtttatatctaatatacttcctctttcactaaaaagatgattttaggatttattttttttggttcataaagatgaatgtaatcaattttatatataaatttatcttcaccaattaaatatactataatgtaaatcttaaataaattgatcaatttaatctatagattaaagttagaatggatgagaaaattagtttattaaaaatatgtgaatagtttaaaacacacaactaaaaaacaaagtgaacacataataattttgcaaactacaaaatggggagaaatgtgaagatattagttcatgcaatcctttttttttttttttttttctttctagaatctctccacctccaaagaaatgatttgaatttaaaatgatatgaaacttaatgctaaaaacctgtaaaacgatcaccatttaacaaactacactttacgaaatagtacatctgttggcattttcatcattcaacatcataattttcgccatttcagtttcttcttgtttcttccgaattaattcatctttctcttcatttttcccatcatgaatctccaattctttaataactttcatgatttttttcaacaacttctccttattaaaacttccagagaccttaatcttttggttctctttatccggcacacataatgtaactcctaataatcatacaaaacaaattacaacatgcatgcacatatatatatatatatatatatatcccttcatattactatcaattatatacatttaaactatgattatagatattattctacctttgaatttggatatagtatgagtcatagctctctcgcatatgctacactccggcatcttgaattcgacatgcgaaaaactagatcacatatagaagaaaagctagtgagttactaagagaatttcattaacatgtgtaaaaatatatattacacttactccttaggagtatctggttggttaagcgaaatggaacaacccatcttttaaaatttgagctatcaaagaaataaaataagatggaccaatttatgaacagcctataacactttatatactcatacattcaaacaaattactcatacatagaaaacttataatatatttttaacatatacacaagacagacaatatttttttgaaacagtgaaaaaaagaaatacataatagattatacaattattgatttataccatatatgatttgtataggtttatattttataagccttgtatacacattttgttgtgcataaggaaacttatcttattaatattcaataacatctgattttgtaattattttataaccattgttttcttaataaattaaatttgaatatatctttgcaattatacctcaaatattcctaattcaattttgaattttacaaataaaaaaaaatcttatgtttaaatttctcaggctttctaatttgtatttctttaacttgggaatataattaaattcaaaggttatgccaaagacattagagcacctctattgatgctaaatagggtgtctttcttaattttataatagtagattaaagacactcatcgaaaaagagaaacaaaaatgtcgctagcaagacacttaagacctctattgaaggcattcttaaaataaaatgtcatatttttattggttttaatttttttaagtttaatatttaataaataaaattaattaaagatatctttgacgaggttttgtgatgagaatgattttttgaaatttcaccgggaaaataatagtcatttacaagtacatacgctatttgttagtccgtaaagcttgcgtttgaaaagcatggttactttcattattttattaaaattgtgttcaaatggttatatttgatttgtttatgtattgtataaactcgttatgatctcatatattcatttgctgttaaaaaatgaatttacatgattacttgactcatctaactagtttagatctagattgaaccatttaaccccatatcattatagtaagtgaagtgatagttcgtatatttctcggcacacaaaaagttcatgtatgtttacgaaaaccaagaggttgttagtatatttttttttatggaatttctctaagatcttaatattctttgttagtttctttaacaaaaaaatatatattctttgttagtgtgagtctataagtattaagtagtcttggaataactcttttgtaaagctcttcatatatgttttgtaaagaaatatttctatgcttttaagcactcttcaaggtatagaactagaagttttgacagttttataaaaagtcaatggcttaataagttaatattgacagtattatcaaaagtcaatgctatatgtaattagcttatttgttagttctaaacgcgttatgtcataatttattattaaaaagtgatcaacgttgggcatttggtctagtgatcaaaattttgcagatgctgcaattaacaagtctcaataactgagttttctaagtgattatctttctctcaggcatatcatcgaacaacttacaggcatccaccaaagtctaccaaagaagagctttttcttggttatcctctggagaagatgagttcttatgagattgggcatataaatctgatctgggcacaagccgtcttcgaagttcatggcctacagagaaagaagaaataaccaaaaattgacgtttttgtctgttcggttaattttgtctctttttgttgtttgagtcaacatcaacaaggtatattttttatgtggtgagtcattgtcattgtcatcatcatcatcatcagcagcagcagcagctccttcacattgtaaatagtcatacggtaacgtgttctctctagaaaccaaagacatcaaaggaaaatttagaattgataaaaaaaaaatatggatacaattcgatttttttcttgtagctctctccctcaagacataatcctgaagatcggctcttctcttcaggtttttgcttgtattttttttactaattcttcagttttttttttattgtgatgctacttcttggtaaattgtgtgctatttgatgaataggtgattgatctttgtgcattaagtagctgttctacgttttggagagagttatgtggttctgatatcttatgggaacctctgtttaggcaaagatggcctttattgtcctcatttgaatctgatggagacaatactctgtttctttaaacccaaaccaatgaaaattctcaggtagaaatgagacagttccatggattcttgtttctttcaaattcaagtttctgagttgttttagattttggccatttttgtaggatagtgagtttgtttgttgttgaattgaattctatttatgatgaattggttctcattagatggatgatgtttgattgacatggtagagaacaattgtttagttgagatatttaacaattgttctgtcttggagaaacaaattactgaggcatattgaaggtgatgtgattcttgatattatctgctttaattgtggatagttggattatagaaagcttgagacttttttcttgaagaggtgatagttggaattggacatggtcatcataatcgtttatatatctcaacttgcagttagactttgcttgtttataatttgttgttgtggcagagactaaaattctttgttgttgcgttagcattactttgaggtctattacaggtttcatgaatagtctattttaaagcttttgtaggaatggagaagattttatgtgatgcaacacaaggaaatggcatcaagagcttccgaggtgattaaatatgtgactaagtctcctgctacgttgtctttagaggcaggtatatatctgcacgcggttgaaaccatgagctcgatgcggtttggatttcaagatgtggagttatttttcttcaaaccaaacttaagtgtgctgctcaacctcattggactcatttactgcatacaacacttgaaaccgcgggttagttactcccagagaaagtcgaccggcctttcggaacattttctaacttctttaacattttctttctgcagcgagagcaagtcgtggatgtgctaaggcaatgtggaatctcagagcagctagtttgggtgaaatggttaacgttaggtcgatggtcaggtgggagtcgaatgagagacgacatcgtgtcgcgtcaggtctctctagtcgatgttgtaacagggaaagaagaaacggttctacgagtgcttcaacgaggagttgttcacgaagttctacgtgtttgtatctcaaccgttgatcttgcctgtgcaccttgcagcagtagcaccatcagaaactactaaactgtttcaaggattcgaggattacaagttgaattggattcaatgaatgtgattaaacatgtgatattgaaacagtattgaagttcgagtaaataataacaacgcgcaattcaaatgcaaacgattgtatggagaattaactgtaagaaattcgcggtaaaaaaactgaaattataggattcatatattgggccttagtatattttcggcccattaccaaaattatcttaaacaagtttgagtcctaaacccttttctccggttacagctacaccgccgttttctctctccgccgtcttttctcttcttctccgactggtaaaaatcctctctccagaactctggtctcccgttatatatatatgctcgtctacattctccaattgcttctcgagttcttagctcatatcagtcacatgttgttctctgtaaattcaattccctaatttcaatttgaaattttctctgttggtgaaaaggctctgctatttgattaggttgatgcatagtaattcgatttcgaaactctgcttttaattccatagactatataatggaaaagatgatgataacaagttacttgactgatgattatacaatcacattatgcttatgctaaagtttttttttttgtatgttcatgtagaatctgtgaaggtgaatttcggagttgagaaagagagattagcgtgtaatggcgatcgataatggcaagcttcaagaagaagaagcctcatctgttactcgattctataacattattttgggttgggactataaacagcttactaaagagaatgaggtacttcatcatcatacaacaaactccgtttcttcttaggcgaatgtgagatttgtttttcttttatcttactgtgtattatgtaatgcagaggaaaaatagaaaggattctaaagagaaattgaatgttgtaaagaatacttataaagatgttgatgattatttcgagacttttgaaccattgctcttcgaggaagttaaagctcaaattttgcagaataaagatggtgaagaaggttagatacatagaacttaaatacaattggcttttttcttattacttttgtccatccattgatcatgaaagaaagtggcagttgttattttcagctattaaaactaaatttgtatacttgtagtaaggttttatgtttagataactagtttttaacgtatttggttctggttgtggaaatggttttttctgtcttttttcctcttagcatcggtgtgtaaaatgagattggtaatggagtgcaacgagggcgaagggtttcactttctgttagtcacatacgaacatgaggaggatgaatatcttgctcaaaatgatcttttattgctatcaaaagaagaggtacatatactattcctttgtttttgtttgattttccgagggtgttgtatgacttgcatttctgattttgtactttcttgtataaaattttcattatcgaatgttggattcacttagagattaacttttgcaggttaaagggaattcatttccttcatcttatgggtttgctgtagtggaacatcgtcaaaataatcttcttcgtcttcggatgtatttagctgaagacattgtgcagataaccaagaatactaaatcctctagaacaaagtcatttatccaagcgctttcaaatatgcgttctcttattacatcatctgccagccctattgacaaaagggtattcagtttaaaggtcagttgttatgagacacagcaactatgtatagttattatatcatttgtttttttccataaattggatgataagccttaataatgtggtctagttttaggttgtgttatgctagcttggcttctcttttctctttcttttatactttaatactagttagaatcttaatgaacttaagcgactgttgttgacatgatacatatcctttctagatataatatagttcccttctctgatacagcgtctttcatggatggtttgttaatttgtagttatgtggtttatcaaccattattcgggaatatatagcactacgatcagttagttcgctccctttcaaggatttaatcttcactgcagcagaaaaatcttgtggttttggagatgaagcatggaaaatatctggacctctgaatgaattctttaacgaaaaccttaacaaatcccaaaaggaggcaattgatgtaagtctagccttgtaaattctttccttagagactttgacagtttccctaacacagatttgggctctttgtttcaaaatacaattttgcaggttggtctatcaagaaaatccttcgtcttaatacaggttgacttctccacttataattgttttattgtttcttgaggacttattacttagcttttacatgttaagattgcatgtcaaaaacacaatcattttcaatgagaaagccctcaattgacatgaaattaaaattctccagcatgcttactgagctagcactcaaagtcttatatttgactctcaagattgccttttaaaaatatgcagatgaaaaccaaaattattctaagttggcattttttagatcttgttgactacatgaatatgagaaacttctttgtcaaactgtattggcagtcaatagggatataacagacttgtttttcaaattgcattgaaaagcagatgaattaatctaatgatttggatactaatgagtctatccttctttagggtcctccaggtaccgggaaaactcagacgattcttagcatacttggtgctattatgcatgctactcccgcaagagtccagtctaagtatgatttcttacatgctatcctttgacactcacttgactatgtgcagctccgagttaagattataactatgctttgcattctgaaattccctttttatttataataggggtacagatcatgaagtaaagcgtggtattcagatgactatccaggaaaagtatgattttgctcccattaagatcttttaaatatttcgatactcagttctctcgcatacccagatgtgtgttcataatgattcgaaaatgttattattatctatatcatatggtgttttatttgaaatcttgcaacttaagagtaattggaataatattgcattgcatcaatagtttggtctgaaatatcacataccatacatccctcttgttgaacatatttcactatgtcttgtctgcagatacaatcactggggaagagcctctccttggattttgggtgtcaaccctcgagatgctattatgcctgaagatggtgacgatgggttctttccaacctcaggaaatgaattggtaagtcggaagattttattctgagacaaatggtaaccccacatttatttcttttatcatatagtaaccccacttttctgattctcttttgatgttcagaaaccggaggtggttaatgcgagtcggaagtacagattacgtgtacttgtctgtgctccatcaaactctgcacttgatgagattgtgttgcggcttctgagttcgggtatgtggttaatccaattcattatttcattatttgaaaattggtaatggtcttatatgttatggtttctgcactctcaggtcttcgtgacgaaaacgcccagacatatacacccaaaatagtacgaattggtctcaaggctcatcactctgttgcgtcagtatcactggatcaccttgtatgtatctagtttcctttacagtttgattgcctttcgtcctggcttaattttggttgcttgatttaactttattaaagaatgttcaactgggaatctatctgtcttcagataagtaaaggtctgtttaagtatattcattcggaggaatcacacttgtagagaacaaacaacgaaataacaaagtttgttgacaaatcttgcctttgggtactgttctgacaacactcttttgcaggtggcacaaaagcgtggctctgccatcgataagccaaaacaagggactacaggaactgatatagatagtatccgcactgcaattttggaagaggctgcgattgtatggggatttaactttcgtattaatgtaattcaaagcttttttatttttcttccctgaatcacctacttctgtttctttgcactttcaggtgttcgctacccttagcttcagtggctctgcacttcttgctaaatctaaccgtggtttcgatgtcgttataatagatgaagctgcgcaagctgtaagccccttccaatagaatatggactaatgctcgattttttttgcttagtttacacactctaaatgtcagagggttttactttaaagtggaaataataatgctttgttttttaaaaactttctcatggcatgtcattacattaaattgagtcatgtgttagccctgacctatgttgaagtgtaaagaaaattttaatcctggttcgtcctagtcagagtctgtcatgtatcttataagtaattgtttttgctacgcaacttaaaaagcttatgcaggtagagaaatttttaatgcttatattccccatgttcattgctaatgaaatttactcttgtgtactttgccaggttgagccagcaactcttatccctttggccactaggtgcaaacaagtatttctggtaagatccaataggttacccttcatgtatcaaaattgcagttagtttccgggtacataaaataagtagatgattcgacacacaccatcagtagcttcaaagaatgaagcatgccttactttttttgaaattgaagaatatagatgttaaaatagttgcatcttgaaactgtagatgttacaggcaagcgcaacaccataagtttatgagttaatgattaatgttaaaggcaactttggtagctatggatatccttatgtaaaatctaattttatcaggtaggggatccaaagcaactcccagctactgtaatctcaactgttgctcaggattctgggtaagtgctttaatccagtcattgcatccacactttatctgtttatgtctctcgtgtatattgtattgacactattggattgctgtctttactttctataatgaaggtacggtacaagcatgttcgagagacttcaaaaggctggctatccagtaaaaatgttgaagacccaataccggatgcatccagaggtacggacattctttcatctagcatccacctaagacagattctcactgaatatcagatttcttaaagaattatcatcagttgatacctatttcacaaaccaagccaaagattgtagttagcttaattcttactccaatgattgcatcttattttaccctgcaaacaatttttttaactgaaaatcagataagaagctttccgtcaaagcaattctatgaaggggcactagaagatggatctgacattgaagctcagactactcgtgactggcataaataccggtgctttggtccattttgcttttttgatatacatgaagggaaagagtctcaacatccaggagcaactggttctcgggtaaatctagacgaggtggaatttgttcttctcatctaccacagacttgtaaccatgtacccggagctgaagtctagttctcagctagctattatatcaccgtataactaccaagtaaaaactttcaaagatcggtttaaggagatgtttggtacagaggcagaaaaagtggttgatatcaacactgttgatgggttccaggtcaatattctaccctctttctcacagttcaacatcaattgtgctcataaacaaattaaaatgcattagattctgcttttatactaatctaagaacttgaaccgtagaattgtacttacagtccaaagttttcatccatttctttttcgtttttttcctcatcttgatgaaaagggaagggagaaggatgttgcaatattttcatgcgtcagagctaacgaaaatggacaaatcggttttctctctaattctcggcggatgaatgtggggattacacgagccaagtcttcagtattggtaaggcatataaagaaaactttcatagaaacgattctctaactttttctccatatatttatataccctctctctgattctatctcactgatccattatccattgaaacttgcttatcaggtcgttggttcagctgcaacattgaagagcgatccactttggaaaaaccttatcgaaagtgctgagcaaagaaaccgattattcaaggtaaaaataacctttctttccgtttgtgttaaaagtgtcaactgctgcaacatactgggatcaagaagaaaagtgttgattttggtggtcttgtaggtttcaaagccattgaacaatttcttcagcgaagagaatctggagacgatgaaactgacagaggacatggagattcctgatgcaccgttgtatgaagacgaatctcttccggtggcaccatatggtggagatgatgactttggagatggtgatgctgatcaagacgatgtagccatggccggagaagactaaactctaaaaaccttttcgttattagttagaactttgatattacaggaagtggttgaacatctaacaatatctacacttattatttgtatggttttattttggtttacatacagtaataagaatgtctttacttgtgctacgatcgatgatctcataggttttgaatatttgaagaacacacgcaaaacattttgggataaaaagatggtatttctaaaatctatatatacatttttgcagccattttagcaaataaatcctagacttaggacttatttacaatctaatgccattagcattaaatcttttttccaaaataattaattttactttaaatttttgctttaaattgtcaatcacattataaatcaaatttaatctcaacaattttcaaatcaatcccttaaaattagcataaacatatttgttaacaatattttaaaacaaagttttttgttaaataaatattattcttactaaacgttttttgtttaaataaataaattttgtattggaacttatttacaatgtcatgtcactgacattaattatttattaatggaaatatttaattaaagatttaaatcttctaaatctttgcttttagagttattatgtcattaccttataagcaaaaatattaatttttaaatgttattatttatatatttaaaatttataaaacattattaatatttaaacttataaaaagtttgatatatcacaattttttaacatcattatataatatatagagtttaaaaaaatcttaattttttccgtcatattttatgattcaaaattttaaaaatgaacatatattaaccaattggcaaaaaatgtgtgggttcaacgtcccgtatcgacaaaaatatttagacaatgatttataaacatatcataaataagatcaacattaatataaataaatgatttttttacgggacgggtttggcgggacggatttggcaggacgttacttaataacaattgtaaactataaaataaaaatatattatagatagatacaatttgcaaaaaaataaaattatactaactttaaaaagataaattgtccctgcgatgtaccgcgggttaaaatctagttaataattaaagttggaataatgagatataacaatgatattttacaagtaatagcactaaaatttattgaaaactttagaagagaaacgaaactgctctaaaagagcttcattcaccatgacccataagaagtagctgccaagaataaaaaaacttaataactaataaccattgttggagcaatagagatagttttaaacatgtattaaagattcaaaagcatttccttgtaatgagcaagtaacttgttgttgtcccctgtccatctctctgtctcagaccacgtccagtattagaatatctcctgctttcacattgtaataagcaagtgacctattattgtcctttaaaaccgctcttaacccccttaacgtctgtttgtttgcttgaatttgaaccacctcagctattttctccttcaaacttgctacgttttcagacaatgactgcactgtgatcttaatgacttcccctccgtcgggaacacaaatcaccctgaaaatagacaaaccctcatgttgggcaagaaactggtcttctggctcaagtggaacaagggctgactcatccaactctggtctcttttgtggaggtgtaggaggaggcatttcaagcttaggtagcaactcttgatcctccacaaaatctttggacacagaattatgccactcaatcatagaattctcccctccttcaagccacttatgctcgcgaacacgatccatagaatacgttcaagaaaaccctcaagaacggtgttcatataagcggtgaagaaagcgaacatgtaatcagtttgcttcataaactcaaactgattgtccatcatcactctttccatcagtttcccacgaaaagcatccccataccacgccacaaactgagctgtgaccttaacagtatcaagctcggtgaaggtcatccctttaagaagtctacactgtagaagattaggcagaacaagtctttgagactggaccctgggcttagactgagtatatggcgcaagtcgaggaactttatcatgattctgaaaacagtatcgactaagccttctctggtaagatacttgaataggatcttcaggtgaagccataagaaattcgaatcttggatcctttgtattagagcccatgaccaataacttaaactcccacgcatatttggaaaccagaaatgccactttgtcgacaatagttgcttgtctgacctctggaggggcatgaaagactttgatatccatcccatccgaaacatcagtaactccctttcgatacagaacgtagcattcaacaaacttgcgatgataatcttcgtaaccaggatctgcaaggcggaattgagcaagctttttctcgaacaatgcgtgataaccatctgctgagttcctcaagaagttgaatcgtgtatcatccatactagactctatgaccatcatcttaaaatccgacccaaatattaaattgatttgctttaatttagtttttttttttggtaggagagggggagacaatggtctcccctcatttattagatactaaactacaaaaaattataagcgtacatgtcgcgggaacgcagtcccagtcgcatcctctaacataatcgaatgaactatatcaggacaagaatacaaagaaagaaaaccgaactgaagtgaaaacgcatagttagctaatccgtcagctagacgattagcctccctatacacatgagaaacccggactaaccagtcctttgaaagtaagccatggcacaagcgtaccaggaatgccagcggatgcgcctcgcttatccctgactgaagaaaccccaccaccaactccgagtccacctccaactcgactctcctaaaaccttgatcccaagcaatgagtagaccatagtagaccccccacaactctgccatcggagccgaacaaacgccaattggagtgcaaaccccccaacccacaaaccatcctcatcgcggatcactccaccagcggcagccggccctgggttaccccgactcgccccatctgtagagaccttcacccaaccctcaggcggcttcgtccaagcaatgtgcctctcgacccttgccaccgactgcgacccgccagccaccaagttatgagcttttgtgacctctatggccatatctttgatgaaccggactcgatccctacacttcccgttctcaccaaaaacattgccacacctccacttccatgcccaccataccgccatactgaacagtgtcgaccaatctctctttcgggaccccgacgttccctccagattcgcataaagccactccaacaatgacattcgaaaaaaggattgtctttcccggagaggaactagacggacccaaattcctgccatggctgggcagtctcttagaatatgcaagattgattcaagaccacccttacacacttgacaaacttcaatatcaccaatgtgacgtctcaccctctcgacatttgtcattattacctgctgcccgacaagccacaaaaacactcttaccctttccggcgcaataactccccaaattcgtttgaagaaactctccatgcatggcttagactcctcctcttgagttagcaacacataagcagagccaacagtgaaatctccatctgaggtaccctgccacgaaattctatctctcaatcccagcacgccttttattactaccgcatgcaaacgatcagtcacgcttcttggcaggcactgtcccaacttcaccatatcccagcccacaccttcagtccagaactcctcaactcgagcgtttaactcctccggtgataacagacatgtagcccgagtacacaacggttcatgtaaaatccacctgtcagaccaaaaccggatcgacttcccatcacctgggacccatcctaaccccttcgccactccctcacgcaaaccaaccccaatactgcgccaagtcgaagaccacgtagctttcggtacaagccaggaagaatcgtgaacatctgtgaccttatatttccgcctcagaactcttgcccatagacttaccttgtcattcaagagtctccaacccactttcgccaataaagcccgattcatgtcttttgaagcccgcagacccaacccaccagccgccttaggtcgacaaacttttttccaagacaacaaatgctgctttctcttctccactgtactcccccataagaaattacgagacactttatccagctgctcaagcaacgaagctggtaaaagaattgaactcatagtatggattggaattgacatcaaaactgctttagtcaacgtgatcctccctgccaagcttaaggacctgctcttccaaccagacaaacgagaagaaactctctctaggacttccccaaaggtatccttattaatcctcttctgcaaaaccggcatacctagatatttgcccagttcccgggttgacccaatcccagtctcagctgtgataagtccttccaaatctcgactcacattattagagaaaaaaatctttgatttctccaggcttactttctgtcctgaagctaagcaaaaactctccaacacctttcgaataacccgcacctgagccactgatgcctctgcaaaaagaataaggtcatctgcaaagcacacatgagagactttcggtccaccctgcgaaatcgaaatcgatttccaatcaccccttcccaccgcggtttctatttgatggcacaaccgttcaatacaaaggacaaacagataaggtgaaatagggtctccttgccttaaccctctctccggcgtaaatgaatctgtcttctccccgttccacaacaaactcatttccggaccagctacacattccataattctcttgatccaaccttcagacaaacctgctgcctccaaagtctctgccaagaaatcccaacgaatgcgatcataagctttctccaaatccaacttaagcagcatccaacctttccggcctttcttcctcctcatagagtggactgcttcttgtaccacgactatgttatcaaaactcagtctgcccggaatgaaactagcttgagcgggtccaataagcttagaaataacattcttaagtctaatcaccatcatcttcgtgattatcttgaacaacacattacataagctcaccggccgaaattgtgttatcctctctggtttagccaccttcgccaacaacaccaacaacacgtcatttgttgacttaggcagaaccccggattcaaagaactccatcacaaacttggaaacagattctcctaccgtttcccaacactgctgataaaacaccggttgatacccatctggaccaggcgctttaaacctccccatgctgcgaactgccactactacctcatcccttgtaaacggcctgttcaaattattcttttcctctctagtcagcctcggaaatccctctgtaggcaaagtccctctcaccacacttacatcctctagagagtacaactttctataatagtccatcgctaacttctccaaggcctctttctctgtaacccatcgatcctctgaatctttcaacatctctattcggttcctccgtctccgaataaccgtagaagtatgaaaaaaagtcgtgtttctatctcctaacgcaagaagcttttccctggatttttgaaaccacagtgtctcctcctggtgcaacaacacatcaaactctttcagcaaggtgtcctctttcattaacaggtcatcggtttgcactacctctaacaaatcctgcactgctttaagatctgacaccactttctccttacgcacatgaatattgccaaagacctccttgttccatttctttagctgccatcgtaacctatttaaggccaccggagtggacaaacccgtatcccatgaagctgtcaacaactccttaaaaccctcatgactcaaccaggctgcctcaaatcggaacggacgtcgtcttgcatctacattctgagcaggacacagctgaagatacaaaggagcatggtcagaagagagaaatggaagatgagaaaccaaagcctcttgccacttcaaccttgcgtgagcacaaaagagaacccgatctaaacgcttagccacaaaggtactttccaccaaccccctacgccaagtgaaacgattccctttaaaccccatgtctatcagagagagatcatttatccactctccaaatgccaaagagtcagaagacaactgcccattacctcatgttctctcatccacccgtaagatagtattaaagtcaccaccaatgatcaatggcccatctaacccactcacagcttcccgtaattcattccacaaaccactgcggcgactaactgatggagcagcataaactaccaccaaatgcacactctccaacccagtcaaaatcttcgcatggataaattgagacgttgaggacacaatctccacattcccaactgaagacctccacaacaaccacaaaccactactctgcccaactgcatcaactctaaactgattctcgaaccccaaccgttgacagatccttcccgctctgtctccaccagcatgcgtttcaaataaagccagcacatctgtatcaaatttcttcaacacgtatcttatggatcttctaaaaatgggtttattcggcccccggcaattccacaatagacaattcatcataaagatatgaataacacgaaaaactgccggggaaaaatattatttagccccatccccatcaataggagtcccagtcaactccggaagagcgacctccatcaatgtggtaccttctgctgagaccccgtcccccaaagaactcggaggatcattcacctgcagtaagctagcccctacactgggctcgctaccattcgtgaagacaccaccgtctcttcccacactaacatgttccactctcaagcgtttgccaggggatactccacctaaatcccctcgcgttggaccatacaccaaaccacgtcccggagccaaagacttagagatcctacctcttgcaacatagtgcttccctaatttacttcctccaactctcttatccaactccactgtccgcacaccacctgttgcaggagcccccttcctatttttctgtattaccaagctctgctccccactgcgattctgattacccccattctgtggcctcacattctccttatccacctcccccacacctacctgacgatcaacctccaccctatcagtcaactccgcaagcccaccaaaactattcgctaccgccagtggtgttgacccttcattctgcaacctctccacattcggtttatctaacgatcctccagcagaaaaaacaagctttggaccctgcgttctgttgcgtgcccttctaacctctgtaaacccatcttggttctgtgtagacgcactactcactatttccattccctgttcactcctctgcgacccttgagttgttctccccattgggcagttgttcactgtgtgaccatagataccacataacgaacaaatagtctgcaacccctcataagacacaaagtacctttctccgttaactactagtgttcctttaagtggattcttgagattcacttcaacacacacacgagcaaacctgcctcgttccttccgcaaagtcgtcaagtccactttaataggcttccccaatcctgctgcaattcccagcagaatttcattatgatagaaagtaactggcaaattcgctactcgcacccaaaccggagtcgtctctatcacatctctcaatggattaaactccggtgaccaagcttggaccattagaatgctgcccaaaactctccacggaccacccgtcaatgccatcatgtagtcttcctccacctcgaatctaaccatgaagaactgtcgcgggagatccaacactgacatccctcccgttggtctccatagatcccgaagcttccgagacaacacttcaattgtggtgtgacgacccaggattttcaccaacatacactgcttgtacaacccgttcatagcatccaaaacttctttctcgattgtgattacaggttcgccgtcaaccccatctggaaattccaatcgcatccgtgacctcacaaaatcatcatctaacacactctccggcaccggaactcccccaccaccactaccccgaacagtctccacaaaggatttgatatccaccctctgcaatcctggcggctgaccatcctcctctatctcctcatctcgaatctcagatcgcaatcccccgtggcggctagggcttcccattaacacattgatttccctgctttaatttagttaatacattgatatattattttaaaaatacagattttaaaattaatttatttctataattttatgttaagtagtttatatttaattatgttaattaagacttaagagatgtaattttatgcttaattgtgtacgtaagtttataataatagtattttattaaattattaagatttatgattttgtatttcatagatgatcactatagtaccagaaaataaaattatgaggtataaaataaaactgtattttattaagtgaattttcgatcactatatattttttaattagtaaaagctttgatattgaaggcaaatatcaaaatcaccatattttatggtttctgaactatattttcattattcagctgctgctttcagatgtcgcaacttgcacaatatgaaagtaataaaaaatttcaagattcacccgtagaaaactctaaatacgcattaatacacatattgacaatgtgtatataaaattataaacacgtatagttatagaaaaagaagcacatctgcttgaacttttggaggacaaaagactttgacaaaatgaatgcaagacaaaatcaatcatcatcgctgtcgtgatcattgccttatcatatacactttcaatattcaaggcaacgatcttcgtttattcaggacagctgccttattttatttttaatacttttttgtgaacttcctttttaggcgaattttaaatagtaatggccaatggccatacgtatcttacttttttcttgttgttaatttacaaatagagcaacaatctgtttagacaaatctttcacgtatctttagttatcatttttcattcatgcataaaagtgttcctcaattattgcaagctcacttatctttatttaagtggattaaacgacctataatctgatatatgtaaccgaatcatcaacattataattttgtttattaattacgtgaaaccgacttaccgagagactccgaggttggaattggtccatttcaagtttttattttattttctactcatttttatcattagttcattagtttgtaatattatttaatctggtgtcctgtatatattattcgtaatttttcttacatttgaaaacaaaacatcaaaaatctagtctgatctcaattaaactgcctttcataaaaaaaaatatcggcttaattaattaggtcagataaaaaaattgttttgatttttagtaatttgtggtgttttgttattctagaccataaaccaatatcaactaagtcacatttacctttggtggtgaagatacgaaatacacgaaaatatgtcaaattgtggatacttaatgtaactcttctttttttttgcggtaaatgtattaggcgttttatgaaatggcatataattaacgatatatctcataataaaggaaggaaataattttaattaaaatgtcaactctggtctatcgtatacacgtagataggttacgactgttccttttttattttgtctaatatcggcaacatgaatttacgcacacacactcacacacagacgatattttagcgtagtttcacattaacagccaccataagaccaataaaagatgagaatgccagaagatgagtcttacggatatatatgaacatattgactctttatgaattttcaaatatctctggcgtgtccaaaacacccaccaaattagtcccacgacctaatattataatagtaataaacattattatagcaataaaaaaaactcaattacttcttgctaacacacacaaagccacaatataaaaccccctctcaacgtaccaaaaatttcaccacctccccataacgaaaaattcatttcacttttcctataacaattcaagattaagctatgggttatgaaaccaaatcgactttggacaccgagagatcgaccgcgccaggaaccggcaccacgacgaagagttgttcgatgactcaagttgtcctaagatttgttctgtttgcagccactttgacatcaatagtggtaatggttacaagtaaacagaccaagaatatattccttcctggaactcccattcgtattcctgctgcagagttcaccaactcaccggctcttatgtaagttcatcctaataattcattaattaatattttcttttattttctcgaatttgattgatcatctttagtaaatgtgactaagggccagagttcatatgtgatttgtatatctcatatatagtcaaactaagtagacaatataattatgggttgttgtgttgtttggagaagtaatagaggttgttttatcaaacacgggtcttaaaccatatcttaatcctaacttagaagaagtcatgtcaaattaggatagtgtaatacaatgatcgcttgatcggtcacatgtatggaccattgaaaatctggtcagagcgtggattttttcatgtatacaaaaatatatatttaattttgagaaaccaagaggattttggtcatgtatatggaaaagaggatgtagtatcacgtaaatgtttaaacatatacttaacaagtaaaatttatacatacaaatcgccgatcttatatgaattgtttatttacgtgtgggagtagttggaatttcgaaacaaaggttgtggaaagtcaaaagtaagttggcgaactttagttaacgaaaaagactcaaaattatagtaaatgttcagtgataatgataaagcagcttctttctttcttttttgtcaacctattttaaaaaacatctttgtatcagatgatttaaatatcgtataaatcttttaatttatgtagtatttaattaactaaatccacttttttcgtttgctaatgtgtagatactttgtggtagcattatccgtggcatgcttttacagcattgtatctacatttgtcaccgtatctgctttcaagaagcattcctgctctgcggttctcttgctaaatcttgccattatggatgcggtaattaattctctctagctcgcacaattactaaccggccgaaacaaaaaaaaaaatgaatttaaaatcaatgcaaatcactttatgaaattactcaaagtaataaacttcatgttttgtttcattacttacatacaacaacaacaacgttttaacaggtgatggtggggatagtggcctcagcaaccggggcaggaggtggagtagcttaccttggtctgaagggaaacaaagaagttagatggggcaaaatctgtcatatctacgacaagttttgccgtcatgttggaggagcaatcgccgtctcattgtttgcttcggttgtcctcctcctcctatccatcatctctgtcctctccctctacaagaaaatccgttgagtcactctctttgtttcgttgtttctctcaaggtaatacaaattgatgatgtttttgtttttttatttggtataatctgtcgaagttgacttgtatgcgtcttagttctgtaagtgttgtattatttaaatttcgttgattttgtataattgtgtgattaaagtatttgtaaaccgaggtttctagtgaatctttgaattttattcagtgttttgtataattgtgtgatcgagcattctgactcgatatctttttgcattcataaagaaaactattttggtccaagatggcaaaaataattgggattaataaattttagtgaaaatgattcgttagccatttgaccgttgacagctggtatctgttacgtcacaatttttgtaatcatatctttgtttattagatttaagattatatcttagtgtagccgtagcctcaagagaacccataatttaagattatccaataaaattatcaatttacttacgtattacgtatctttgagtctaggtgtcctgcatgacgggctattattttagcttatgattgcgtgtaagaaactctaatagctaaattcagaatcttagatattataatcgcaatgatatgtgttatccaacgaccttattagtatcccatttgtttggaacagttttgacaactcattaaagtaacaaaatcaatgaaaaaaacaaaacaatgatattttcttgtgaacaaatatgggtaatgcaaaagattgacttttattgaaactcctaaaaaaagaaataaaagatgtgatggaaaacaagtatacggtctcgtagccccatgcatgcctgtcccaagacattataagactttatacggcctctatctaccgttatacgtctgtctcaactaattattaggagaagcaataattcataaagatattaaagctttactaaattgaaagttctactgatatattacactgaaagtgtaatgttggcaaacaaataaatggggtgcttgttagattttactgttttagatgtatatattggtagtctatctccatttacaaatcaaaattacaacttttgttttacacaatacaatttgttgttgttattgtttgccttgggttatatgaacccatgcattagtttggaagagatcacatattcacatgacgaaaaacatttttccgaattaccttcaaattgttcataatttattttggttttcgatcgtctttacaaacaataaaaactttcataaattgtgttaaaagtaaagttgtacttaggtttaatattgtatttttcttaaccataaagtttaggccaaaacatcatgtctcgtggagggatcgaaacagatacaatttcaactaaatttgtgatctatcttttaaatcattttctttatccgtattatcatttatgtagagaaatatgttaagcatttataaaacattttactaattgagaataaaaatccttagaaataaatttggaaaaatgatttttgctcttattttttggagcgataatccggttatttaaaacatggtcaacttctgactttttgcttttgctctaccaaaagatttgccaaagtcgataaagaattatttattgctccggttactttttagtttttggtccattcattttgatcaagtcaagtttatgaacaaaagtaaatgactcgtaaaattcttcacaatttttctttttcaacagttactatatcgtaacgtatttgtttataatgtgaatatatcaatattattattacatacaactcttgtataaattagtatgtgtcgccatttgtaatagacacgagttcgagttggtgtatacataatcgtatggtatgtgaagatgactgccgtaaaattatttctcttaaattgagtatttccaaaacactgctgtcagtacccacacttgccaacggccattgttgcattaagtatcgcaatgcactgatttatgaccttcaatgatctccctactacacaaactaccaatttttactctaggttgcatgctttggcattcgtcaagttttgctctctatttcgtaatcgagataagtaaatttgatgtttgttttttatatttcttattgacatttctataactaatttagtaatttaacatttatgtacacgagtttttttaatactaaaaatattgtttacaaatatagtttggtcatatgtgagatcctcaactggttgattaggtgctccaagatattgattaatcgtatgagattagtttttggaggcttgagtttgaaagtatttctctccacaaccgggagtttgagataattagtttggttgaactgagaaaataaggttaaaatgatgatctaaaattggatttgaacaataggataattatgtttagttgagttatttaaattgatgtattagattgttgttggttcataactcttactattatgtgatgtttaatatttcaattcatactcatcacatccgtttttttttggttaattgtaaaatattttgcatttccgattttatgcaacttagttttattttctgttctctatttagtttaagttgttatgtatatttttatgaaaacaatgttttaaacttaatctagccatttgtttaaacgaaatcgaattatacgtaagattagactcgcgtagatctggttactttttctaatggttgatgcctatagttaaagagattattattttgattagaattcaatattagtagtttagcactcatttcgttatggatcttatataatgacaaaagtattattattattattattattttttttttttttgaaaacaacaatattattattaccaccgatcgtttttacacaatatgctaaaaaacaagacactttgccaaatttggaaccattttttgtattcgagtcaaatcactctaaaatgacaatgaagatgtggcctccgaaatttctacttttagagactattctttcttattgtgctttataccagtcaatgaaatgttttcacactttgcgatccgtatgtatccataatagcgttttgtttcataagctaatatctctttagtgtgccacataaactaaaagccacgtagacatcatttagtgacgtattctctttttgtcttattatccgagtaagcgtattcaatatatatacatgtctcttctcacatctagagcatgagaagcttaggggaaaacgatcaatctttgttatctctcactcttcctcttcttattttgatcttcctcacttctgtttgattcctaataatggaacacgagggcaagaacaacatgaatggtatggagatggagaaaggaaagagagagcttgggtcaagaaaaggagttgagttaactatgagagtgttggctttgatcctaacaatggcggctgcaacagtacttggtgtcgcaaagcaaacaaaggttgtgtctattaagcttattcccactttgcctcctcttgatatcactactaccgccaaagcctcttacttgtcggcatttgtgtaagtctctctttctttccccctttcacacacacgtgtggctcgcatgtacgtttcgattgtttccaattaaggcttgtataagcccacttttaaaactacagatataaaagaattcaacttttactcctagtttctttttgtaaaaagtaattttctagtgtagaaatttttcgtttggctttgacgttatatattgagtagtaagcttaaaaaaactccctaactataatatgtgattcacagatttggtatcgaaaaatttagtaaaattgacaaaaaaaaaaaactagcatgtcaaaattataaatagaagtcatgtgaaataacatgttatccgatatagtaataataatataaccgataaatatatataaaaaattatttagaaaaaatcaattaattacgattttacctttttcacagatgaaacagtagaatttggttacgtctacatagttgaaaataaaactattaattacggataaagtgataaatttgagacgtcgaggctgataattgattagagtcttacctgttggttgcatgcgggaaaggactgctgaactaatattttgtataattaaccttctcatcatatatatgggtccgtagagtattcataattaaatgttacacataaatgcatatataataccaatcatagaaaaatgactagtatactgtatacagtaaaatttgtagctaatcataaatgtccaactaccaaaaatgtgacacaacagcaatgttggcccatagccaatttttacctgacatttttccagctcttatgttactttaaatttagtgtccaacagttcttacttcttagctggcatgaccaaaagtgtatagcctacatatctaaataaattttataaactagaaacatgaattcaaattaaatgctaatctgatttttaattatttttactctttcatggcaaaaaaagagaagagaattacattagaacatgcataaaatacggaaataagcaatgtggtattacaaatgttgtaggtacaacatttctgtgaacgctatagcttgcggttacacggcgatctcgatagcgattctgatgatcagcaggggaagaagaagcaagaagttgttaatggtggttttgctaggagatctagtgatggtggctttgctgttttccggcactggagccgccagcgcaattgggctaatgggtttacatgggaacaagcatgtcatgtggaagaaagtttgtggcgtttttggaaaattctgtcaccgagctgctccttcgcttcctctcactcttcttgctgcagttgtgtttatgtttcttgttgttcttgacgctattaagcttccttaattattaattgtttctgttcttgtcgttttgtgtgatgtaaaataactatcaacaatcatgtaattgtctattgcttctaatgttttatcacatcgttttctatggtgagacgatatattcaaaattcggaaactaattatctctactgattactatataacgacgtgataagatatcctaatcactaatgtggacatatagttagttgtaagcaatgaacctttatatcaattaagtgacacatttttacttttaaacagataagattaagtcactaagaacaattgttctcgtttttttccctgtcaacttcacgaaggactaatgataaaatgagttgccgtagaatgcaagaaactgatcataaatgtgttcattttcttctctacgttcttgccatcgtgataattggaaaatatcacatcaaaacctgaatttaactcatattataactccacgctcaaattcaaaccgagtttaaatagagtaatggaccgtgagttacgtttttgcttggtatcactcatgaacatacgaaatattgaggtagattggtttataatgaacatacgaaaccttttaagtcaaaatctgttttaattttctaaaattccaaccttcacgtatttttctgattaaaggtgtaggaatatcatttccctagacgaactggtcatctgcttagcctgatgtaggagtttatgttgacattcttaattattaatttttttttttatgatcatacattacaatttttcattttattattaacaattttagtggtgatatccaaagttaaaaactaagcacaaagggaaatgtttctttttttccgtatatatcttatatagtgtattattattttattttttttcaccgatcattgactctcattgtcatatgatagttaaaaggaagcattcacagaattaaaaatgtatctattagattgcggattttcaactcaaaattaattggcaataggtcaagaagctcatattttatatataccacctaaaattctattcaacttgacaatatttctaatacattccttcgaaataatagtttttctaaccattaatcttgatatgtttgggcatagatcggtaagcaaagtattgggccgaaccaatatggattgagttgagtatgttcggatcgaattctgataccatattagattgtgagctttcaactcaaaatcaataagcaatagatacgaagattcatattttatatataccacttaaaatcatattttactttcaaacaatattcctgatactatctgtatttgatgcatacaaatacaaataatcatcataattatcagattaaatacttatacaaatttatgtatttgctcgaaaaattagaacgtacaagacttactcgaattttcagtaacttaaatagcccaacaagtttccgaaatcaaaatatctgacctaacagaaatcaatatattttgtgcgaattcacatatccaacaaattccatactattaccaaacgcatatttatccgtatgcacttcgaatatcagtttttttagttttttttttgggtcaaaacgaatatcaggtttcatataccaatgttaccttattttttgacacctacaatgaacacactaagtcaaaaattacacaaatttgttttcctcgcaacttttcaacgtatacacacgtttttttttatatacacaacgtattcacacttcgttcccatacattatccatatatgtttttatttcgtaagctgagattcactcttgcgccacataaacttaaaaagccacgtaaacatcattactatccacaacttgatgtgtgttaagtaagactatttcaattttttttttaatatatatatacggctctctactcacatctagagcatgagaaactttaaagaaaaaacaaaaagaacaaaatttgttatctctctttcctctcattttgaccctcttcacttctttttgatccctaaatggaacacgagagcaagaacaaggtggatgggatggagatggagaaaggaaaaaaagagagtgggtcgagaaaaggacttgagttaacgatgagagttttggctttggtcctaacaatggtagctgcgacagtacttggtgttgcgaaacaaacaaaggttgtgcctataaagcttattcctactttacctcctcttaatgtctctacaaccgccaaagcctcttacttgtctgcttttgtgtaagcctctctcttttctttttccttttcacaaacatgcatgttgtctcagattttggttgtttcgaatgccatttttgcgtttgcggttgcgtttacatgtgaaaaaaaaaaaaaacagaaatgtagcaatttatcattttcaatataaaatatattttagaaaaaatgcaaaactacaacataaacataaaccctacatctttaaatgttatgtttttttctaataatgtgaatgttagatttatggctgaagtttttttttggtatatttttttaatctacattttaaataatatattatagacagataaactcctatacaataacttcatacttaaataatcctatcatcataaatgttcaacaacaaactgtataatacaacagtgaaataggtccatatagccaatctttctctgattcaaatctattattttagtttataattaatttacaacatagctggcatgaataagatataaacaatattttttttaaaaatagacaaattaattcatagatatttcatgattttcataacattcagatttaaagccatatatgtttacaaatgtttgtaggtacaacatttctgcaaacgcgatagcttgcggttacaccgcgatctcaatagtgattgtgatgatcagcaaaggcaaaagaagcaaaagtttgttgatggcggtcttgataggagatcttatgatggtggctttactgttttccagcactggagccgccggagcaatcgggctaatgggtaggcatgggaacaaacatgttatgtggaaaaaagtttgtggagtgtttggcaaattctgtaaccaagctgctgtttctgttgctatcactcttattgcttcagttgtgtttatgcttcttgttgttcttgatgctttgaaacttccttaatcttaagtacacgcaactttaaaccagaaaacacaaaataagttttttctcttaatttgcatgtttctatttcttgtcgttttttgtgttatgtaaagtcattatcatcaattatgtagttgtctatttgtttgtttttttaagttttaaatttcattgcctatctatggtgagaagattcaattttgacaactattttcatttactcactttcacatggtaaaattaaaatattcaatttttattcgactatgtagttagattcacatggagaattaatacgtaagtagataagtagttgtaatcaatgaacctttttgtctcattatcataagatactcaattgttcttgttttatacaaaatggattttactactcaaatcaagaacaaaagtccaacagagtaaaatttatttgaggcttacaaaacaggacaactcttggcgttttgttcatataggtcaaaatgagaaaatgagttaccgtaggatgcaagaaactggacaagaatgtgttcatgtggagccgccaagagattctgcaaatcttgattcaaccattcagctgagaagagcttcgttcttgtttaactcatccagatccacgctcacttttaaacccgagcttagcaatgtattaaccattgaaggaatcacagatttcaatgaagcagcaagagcctgttcatcattacaatggaggattatgtatggttttaagatgaggagctgaaacataacaaatagagagaatatcttttaaccttcttatcttcgtcggtttggtgcttgataacgtccacaggccactcgtttacaagtttctcaaattcagtcgaaattgcagactttttctcatcaggatatgcctgcgtagtcagtcatacacatatatttaaactaaatacttatcaaagctaaaagaaaggttgtatcagaagagaagagatattaaggtaggttttgggctcacttggcagataatctggatgacggcagcagcttcttcaggtttactttctagtaggaaaccctgtgaaaagagcaatatttataaatataattcggtatttggttattacatgagaccgaaaaagagatgtgttaatacctttgcacaagaaaaggcagtagaaagagtgtgttgactgtatgtctctgatctctgtttatctactttccatagcgactctgtatcacctgataacaggatttgacataatcagcaattggcagtagagtaaaaaaaaaaaccttcatggactagagttctatcactagtctagcctaaatcccatttgtgatcaggtaatagatgagctaagaaagaaactacacttacgggttacgagtctattctaccgaacctatttttgatcttggtttctttcagacagggagaaaaataatcaacttttatggattcctgttcttttttattcattaccaaaaggtcctaaaacagtgcaagtcaatgtataggttgatatatccatctagtgtttgcaacgccatatctcaagtatacttgaaatgacagttcttctagagattgataaatcaatgcaagtataagatcggaaaccaaaagtacctctcttggcagcaaattccatccacacatcgaatgtggtcttcctcaacttaactccagctttggagaattttttcgagtacttggctagtagatcccacttatctgtatcatgacagatcctgcaaaaataaagttaaaagttcatttcatgataagaaagtaaatatttctgatttttcacaacccaaccataaagtacgagcaacaaaacaattctactcacctaaaaactaaatctgctgtaccgggttgtagaggcagatcattcgttttcaggagttgcattacttcttccatgagttcagaattcttgtgctctagtgcatatgactacatgacaatccagaacatgacttaaacgtctatgtttaacaaagaaacaaccgaaaaaacatatagatatccaataccataagatggtgtgcagatgcaacactgggagtcaaaccgtgaacattatgtttccacaaagccttctttcctacaaccacaaagaactgcattagtaccctcagatccatgtaacagctatagaaaggatatttaacagcttgttcgattggattaagaaaaaaaaaactacacaaaatcaaaattgggagtaccagagtcaatagccccaacacgtacacaagtcttagcaacttgttggcatagattgcaattgaagttgtcatgaatacgaagattagataatctctgcaatccagaaacaaaaatttgtaagaattgattgatcataagaaatctcaactgaaacagaacagagcatgtaaatagagagggcaatatagtactcacaaatctccgtagattctgaagaacgtcaaagagaagatgaatatcatcctgattctgacagttctcaatcaacagccacaaccacgcatttggaggcattgatctcttgacatttacagaattaagcattttatcatgcaaatccttcacagtcactacacagaggaaacacaatgagaaaccgctttggtgatctcaaaatgtaattcaaaatcaaagcaaggtataagcaacctgtaggatttcccgcaagcttttccgcttcagacgtaaagctcgatctggggatcaacaagctcatagaggacaagtgactactactatcaatccctgcaacacatcattatattaataactcacaccaatgacataaagctaattcatttacacacttacattgatcctaagctaggcattgaaagataagtacgtatctcgacacaagctaaaattggaacactaaagttcgaatttttcaggatcatcaccttcactagctacatttcctaacgttacacaagttaagttatctcgcgtaggacaaaaaaaatctccatttccaaagatggggatgattaatttcgcaataggaactgtgaaatggcaaaaaaaagaaccttttaatacagaggaagacgaagatgcttgactccgccattggaaggatcttgagatttgagaagcagaggagaagaatctcagattagtctcggtggtaacaatgggttttaagaccgtagcgattctacgagagttctggaggaattgcatgactcgtgattctactggttgtgattcaaagttgggtttttgattggttttgagtagagtagagtagagtagagtcgcgcgattgagaggagaaggacgatggctagacgccggaatcaaagatttagggtttatgtttttagaatttagacctttaacaatgcactatttgcaaatagaagtccctatatatattattaattaactaatttacaccgttacttttaatttgataatggtatatccatatttttttctgcttcttttttttgttccgattaaattctcttccagtaactgcattcaaatgatgtgagttcactcaccatttggaccaatttttgtttcaattttctttgtattaacaaacagttcattaatttagaacatttctatttttttctattttttcctaaataattttagtaactaaacgtataacctttctattctattaataaaaactaaatggtttaattttaatttgtttattgaaaataatggtgtcacccttaaatttggaagttggaacaccaaacaataacaataacgaaaaagaacctttttctaacaaaagtgaatcacaacgcaaaaataaataagaactggaattggtttatcgttttattgaatctccttcaataaaaatccatcaaaagattcatcttttttccattaacactttgattttttattttcacaaaaaaaaatcaatttaaagcaagcaaaaacgaggttattgtagaaaaagaattgagttttattagagaaattaaaagatgggttgtggaaaatcaaaacacgatgttgttacgggaaacaccacgaggatcaagaaaccttcggaagctgaatcagtgaagggaaaagatagcgaagcaattaaaagacaagaaagctgccggtgccaggaaacaaacgacgtttccgccgtagttcccggcgaccagccggagacaaccgtagaaaacaatagcaagaaaccggaggaaaaggaagatggaggagattgtagtgaggagatggcggtagacaatgcgaatggtgacaaacaaccggaggaaaaagagacggcagccagttttcctccggtcacggcggtggaggcgatagtgccggagaatattgtgacggaggagaccgtcaacgacgtaaatgagagtgtttcgccggttgaagaacaaaagggtatgcaaatattaaatttaatttaattaaatggtaaattttacatgtttatatatttgtgatgatttcttcatatttgatgttgattttttttttttcaataacaatcatacgttggaattgtggactttttatatgatctttgttacaaattcaaaactatacacccaatttacgtgttatataacttctcgaactttttcttgtgaggcacgttgtatagaaatattgacgtaaatttttgggtttggtagcagaaaaaattgatattgatacggtggtagaagagaaaagtgtagaggatgaaaaagatggtgatgttgataccgaaattgcatcttctgaggttgaagaaccaataccggaggtacatactccagtaacaacggaattagaagcacaagaaattccgaccacggaaactgacgaaatcgcagccacggaaaatgacgatatcgcagccacggaaaatgacgatatcgcagccacggaaaatgacgatatcgcagccacggacaatgatgatatcacggccagggaaaatgatgaaattccggttttaaaggatgaagataaagttgatgttgtagaggtacggataattcaattaacatatatagcgtgatattggttggtttatattagtagttagtttgatctcaatatcatgaagattgtttatatagattatatgcaatctctttcaaaacttgctattttttgggttgtgtaggaaaactcggccaatataacaaaggaagttgagtcggcatgaagaaggcaaaagaagagaatgtaaagaaagtttgtactctatatgtatccatcaccaaatcaaataattgtttctttcaaaaacaaataaagtaaacaaatgctatttcttaaaaatcattctattcaacttcaaaagacttgaattttttttatttaaataaatttgaaactttaaatggaaagtgtctttacatatctcgttagttgaattgtcaaaaaaaaaaagttctcaaaagttatatcactataataagaaaacagtcgtaaaccaacgagcatatctgtctgtaaaccagcgtccgtcggttccaaagcgttcgactaattttcgatggatttctgacggctatattcacgactggttagtatttcgtcggtagtataccatcgagaatccgtcgaccaaaactccaacggttgaccaagaacttcctgacaagacacgaaaggattcccgagacataaaagtctctttcctttcttccggttgttgacaagccaattccatgaactcgcctacccctcatgtgtatttttctcttagtaagttcaactccggattcacctttggttcgtccatgcataatctaaaacaagaagaggaagaatacatttctattttttcacgtttttctatttcagaaaatgaaagaatgtagttataatgagtatgtatgcatatttaaggggaaattttatcggtttccatcgtatatcggttaggattccgtcagtaagttaagttaaaattcaaacaactacaaaacgctatattaacggtgacaaataaccgacggattctcgacagttgttgctaatggacagtaaatataaaaggtgatatgacgtcccaaaaaagaagtgataggatgatacgagggtatgggataagatgcgatcatatgatatgtgttatgtaataagacatgtacgggatatgaatatgataaccttgtaatttgtcatgaatgaataacgactctccggatcaatcttgggtcacctttgatcaagaaatacaaccaaaaaaaaaaaaaaactatttggttcctttgagtcttatcgtcatggaatgagatcgaatttttagccatgtcaagaatcatacaagactaactttattccgaaatcgaatttatgatgagattttagtgagaataataaaaaatggcttgatggtacgtaaagaagccacgtaatcctcaacacaacaaccatatgagattattctggagatataccgtacgatctcgagtgttctacttttattatgctgattatatgtcaatgggtggggtttaattaaggttttgaacctatgtcaaatgtatatctcgttttagcagcttcattacaagtaactttcatcataactagatatagtttatcctatgtattaaaaaaggatcacaaagcagacatttttgtaagcatcaagtcatcaacacataacttatgtcctaatcgaattctgctagtcaatacaattatcatcccatgccggccttagatatagtaagatccaatgggtccgaactttccaattagaaaaaccaaactatgaagatcatgagatatatctctttttgataaagaaaatatatggccgtactatagagacatgacatgattcgtccgtatcaagtattcttcacagctaagagatttaattttttttgtacgttttatcgaattagttttattcgttagctgcaagaggcaaagaggcaagaaggtgtgaatcgatcttagcctcagattctttaggatactcccactatataagtttacattatttaaaatgtgttccttatttcgtgctataaagttgattctataaaaaaaaggtgctacatccaacgcataatgtcatagctttacgtaccttaaagctgtatatatagaggacccttattgacaattatctacatcaaactgatcaaccacataagctcaaagtcatttttcatcttcacccaaagatattacagtctccttgattgtctctaattttccaatctttcatttctgattttgcattgtaatcgaacatacccactaatatcctttgcaagccgcttttcaaacaacctattacattataacaccaatggagaagatacaaaagatgatctccgagaagtcggtagtaatatttagcaataactcttgttgcatgtcacacacaatcaagactctcttcttagaccttggcgtgaacccgacaatctatgagctagacgagatcaacagaggaaaagagatagagtatgcattggctcagcttggctgcagcccgactgtgccagtggtgttcataggagggcagcttgttggtggagccaatcaagtcatgagtctccatctcaaccgttctctcattccaatgcttaaacgctttggggctttatggctttgataaaatataaaagaatagttacttattgatcgtagcttggtaataatgatgtcatgaaaccaatcaaggatgacaaaaaaaaaaaaaatgtatgcatgtaagttttgaaaggatagattgtgaggatacctattttgtaacgtgtgggtatattttatagtaaacaacctagtgttgtatttctacttgtccatgcttttggtttttaatatatatatacatgctattaagaaatggtacacatattgtagagaaaaagaaagactttaatttgacttcttttctctctttatcaaaaagcgaaaaagcttacttttgtttctgttttttttttcttattcggggcgtctctcacgatgtcaaagctgcaagagagaatataaaaaaaaaaaacatgtataatctcaaagtataactcattgatcaaagtccattctcgttttaaacaaagtgtaagtctaatcagtatattgattggtaaaagacttctctaacccatatctttattttttttcacttaaaaatagaagaactctattttagagttaaatttgagtgcatttttttccaaccctattctatttcaaattttaaaatagagatctagtataaatttacaatatatatttataaatatatatatatatatatatttcatttagaaatagattataattggagatattttgctctacaataaagtttagcggaaaatataaaagtgggagtggagatggtgtaaaatatcctccctttctctctttagattttattttcgcagtaaatcataaatttaaaccaaacggtgaatcagtctacgttaatttgtattacgatccataagtagtataacacattgattaaaaagaattcacgacaataacctcttttctggaacttgcactcatacatatatatgtcttgccagcaagctctatgtgacagattgtatatttgtccgactcatttcctggaccgttattatttgtttttacagccattgcttttatgaaaacataaaatagatcaagtaggagtggtattcggcccacgactaaatcaagaatgttttgaaaaccactaaataaaataaatggaaaaattaaaggagagaataggtgtttgcattattgtatataatgcacattgtgtggtgccttttgttttcttagttaaataatgtgcataattttgtttataaatagataaattttggtaattttaagagtcagtttggtgaatgacaagatttgagataagttttagataaatggcaattgaaaaaataaattaagtaaatgacaataaaacagtatatagatgaaagtttcttgtaaaaataacatattacataaaactaacttatagagaacaaatttgtagctattaaatgaaataaaaagtcggagaagtttgtcgaatactttaaggtaatcaaatgaaccttacattgatattttctttactgtctctccaatattgtttgtcattgagtgcaagtactactaccatttgaattatatcccacaaatcaatcaaataaaaacattaacatcatctacaagtaaagttttcaatttgttttcttcatttgtcatacttgtaggggagaaatttaattcgaaaaacttttttttttctttcttctaaagaaaaaaatgaagaactacgatgataattagaaacttcgaggaaagcaactcgacgcaaaaagaggtttgttgtggcatggaaaatttatggctgctattctggctttctaaactcgtaaatttatttgatgttctgcattttaaaccttctaaatagtaaacaatatctaacaatttaaccaaattgttttttttttcaaatcaaatcatgcatacattacaaatataaagatctggaattagatgcgatcatatgatctgtgttttgttcataagacatgtacgtgctgtgaatatgatgaccttgtatttttcatatatgattaataacgactctccgcaacaatgttgggccaccttttgatccagaaaaaaaaaaaaaagtggttccagttgagccttatcatcatggaatgaaatcgagctagcgttgtcaagaatcatgcaaagcgtacctttattcccaaaacgattcatgaccaaagttttttgataaaaacatatgttttgatggcaagtcaagaggccacgtaatcctcaaacaccaaaaaaaagataaaagattattctggaattatacaatctcgagtcttcaagaagtagagcttgtaatttctatcatgttcatgtgtatactgtatgtagactacttttggctcataaaacgttcattaattgacttttatttccacatggtgtaaggttttgtttatctttttaaaaacaaatcttataaattattatgttttgtcaatgagtgtaggcttacttactattaaactttctaatttaaaaaattatgaaaactatctaccagttatgaagcatcaacactattaaattccctgaaaagtgataaagtaatatatcttttgacaatgaacatatatggccgtaccatagagacatggacataaattcgtccgtatcaaatattcttcacaacttagagattttgttttttgtacgttttaccgaattagttttattctttagctgcaagaggcaaagagtcaagaaggtgtgaaccgatcatagccgcaaataaaatgtgctctttattttatgctataagtttattctcttaataagagttacatcgaacccataatatcatatccttacgtagaatgttatatatagtacccttgtagacacttctcttcatcaaactgatcaaacacataaaagtcaaagtcacttctcatcttcacccaaagatatcacaatctctttaacggttctctagtaccccattttcatccctaatctcgcatcttgtaatcaaaacataacctatttcatcctcctcaagtcacttttcaaacacactttcaaattaacaaaaatggagaagctacagaagatgacctcggagaagtcgttagtgatatttagcaaaaactcatgctgcatgtcgcacacaatcaagactctcttcttagaccttggcgtaaatccgacgatttatgagctagatgagatcaacagaggaaaagagatagagcaagcattggctcagcttggctgcagcccgaccgtgccagtggtgttcataggagggcagcttgtcggtggagccaatcaagtcatgagtctccatctcaaccgttctctcattccaatgcttaaacgcgttggggcgttatggctttgacaaaatataaagaaatagttacttattgattgtagattggtaataataatgtattgaaaccaatcatatacatatgaatgttttgtgtctatctaagttttgaaaggatagattatgaggcagggtactgatttcgtaacgttcttggtatacttagtgttgtatttctattttcagtttttatgaatacaaacatgcatttaagaaaagtgtatgccatgggtattggaaatttacacatgttaaaaatgaaggaccagaaagtgtgagttacaaaagatgtcacatttgatgaaagaaactctaactcttaatcggaatatatccgtttatggatgttactatatagatttgggcgtctctaaacaagaattttgttactatatagttgtgttaggtttaggaatttccatgtcaccaaatcggctagtatgaagtatttttgatcaaaaatatcatgcatgcatttaaaaatatcgtatgtgcggatataaatattctaattaaaatacgtactcattactaactttaagccccaatgcgcttaatgcataacatgttccaaaccatttcttcttaataaaatatattataaaaacaaataattatatcctaattagaatgatattgccacactctctccctcaaactactaaggaccgcatacccttggctgttcttccagcaaaacaatcttataccatagtcaccaagaaactcgccgcttaacctttgaataaagggaagtagacttcgacacaagctatcaacactattaattatgatgtcacattgagtgctcacaacaaaaatgcaagacgttcatccatttctctatgttacggataatattctgacacttatatacattaaaaatatatatatatatatatatacatataaccttagtgaagcatataaccttagtgaaactcataaattaattaatacaaattgtagggaaaaaataagctcacttactttgacgaaatttataaagtgttcaaagcaccaacaagtttttaggagaaaagtgagatttacccaaaattgctggacgtatataattaaagttacaggatggtgtgaaatagttctgggattggatgcgatgtgattcgataatatgtgtttttacataagacatgtatggaatacgattactttgtaatttgtagtatatgaataaacgactctccggatcacagttgggccacattccatcgacaaatcgagttttaacataaacaaaaatattgtttcgtcccattgagccttatcctcatggcatgagatcgaatctttgcgacgtcaagaatcagacataaattattcccatattgatttatgatgaacaatttgtgagaataaaggaaggtttttacttgtaagtgaagaggccacgtaaaccgcacaatcaaaaaacgaaaaagatgaagaataagattattctggagatataccatacgatctcgagtcttcgccaaggaaggagatgcaattctttctttttttttaggagatgcaattttttttatcgtgagtaatattgtatatttcaatggcagcgattttaagattttaagtagatctttttttttgataagaaggtttcattatactatatgataattatcatgaaatttacaacccgatgaatattggtaaaattacatatacgtgtaatatttggtaaccaaaaagaaaattcacatgtaaaacatcacagtaaataattataagtaactatgtgataggagacaaaaatgtatttgtgttgaaaatatatctcttttgattgaaactggaaatagaaggccaagactaatatgacatgattcgtacgtataagatattcctcacatctaagagattttgttttctgtacgttttacctaattagttgatagttttattctttagctgcaagtggtaaagagtcaagaacgtgtgagctcctcaaattgtactcccactatcttagttttcattattttttaataggttctttattttcgtgttataaagttgattcgctgaaaagtgctatctcaaaccgacatcaagaaagctatatataaaggacccttagagacccttcactacatcaaaaacaaactctaagtcatctcttatatatcgtcagccaaagacttcaagttctctagcttaccaatttcaccccttttctctcatttcaataaaaaaaactacccatttcatcctcggcgagtcgctcttcgaacacatttcacattataataccaatggataagctacagaagatgatctccgagaagtcggtagtgatctttagcaaaaactcatgttgcatgtctcacactatcaagactctcttcatagactttggcgtgaatccaacgatctatgagctagatgagatcaacagaggaaaggagatagagcaagcattggctcagcttggctgcagcccaaccgtgcctgtggtgtttattggagggcagcttgttggtggagccaatcaagtcatgagtctccatctcaatcgctctctggttcctatgctaaagagggttggagcactatggctttgatttcaagataaggggatatttacgttatgaacgtagcatggtaataataatgtaatgaaagtaatcaaagatgacaaacaaaaacacatatacatgtatgttgtctatctaagttttggaaggatagactatgactataggatacctattttgtaacgtgtgggtaaactttataataaaatcacttctttttggatttccatttcccattttaatctgttatatatatatatatatatatatatatatatatgcatgtgtgcatggattagaaattaaaacattgtatgtggggtaatacgaaattttaaaatatgcaatgcatatagtatattcatgacctcgagtacaaatagaagaattttaaaataagatgaaatattattttgtaacttatataccaagacaaacaattgacgtaaggaattatatatacatcgacaagtactttgtatgtttttatgaataagaaattaggtagttagtgggttactcatgaggtctgcatcatgtatcgccgttttctttctaaatatttgatttatgctcatggatccatcttgtgttgcaacaaaatgtatcaattcacctctctaatctattgtcttgattttggatgaatctgaatcttccttcaaagtaattaaatattatataattcgagaagatttttacagatgaggttttatggctcaagttagagtatcaagctctatactcattaaaaacactgtaaactaaatggggagtttttaagagagcgagtacaaaactttctaaaattcagtttttgatttctataaaatcagtgagcataaacctatccatctttctttctttttattttgttgttgcataaacctattttggtttggtttaccctaatgacataggatggtttatttgggcttgcaacgaatgctctatactctaaatcagttttttgtcggaactagcactgctactcagacactacactcgttgtattcccaattatgattttgtgttgcattcaaacgagagtgtaacaatattgaataaagtatggcatagttgtggaattggatgcagtgtgttttgacgtaagatatgtacggattacatgcacttgaataacgactctccggatcactgttgggacaccttccagtgagaaatggagttaacaaaaaaagaagaacgaagatgactgttttattccacaaggcccttatcctcttggaatgtgatcgaatctttgcgatgtcaagaatcatacaaaatttagctttattcccagatcgaatgatcgattaatgatgaaatttcgtgaggataaatatagaaaaaaacgttttgcttgaaagtggccacgtaaaacaccatgcacataaagaggaaagagattattctggagatattccatgcgatctcgagtcttcgcaaaggaaggagatgcagcttttaatcatgtgaaggatatgtcaaaggccggaatttaataagaacttttgtaagagatatatacatcttgtttttgcttagaaaaagttctactaaaaagatggtaattcaataacaaaggttataataggttatgactcaaaaaaaaaaaaaaaaggttatgactcgaatactttacattcaaaagttagaagtaactttgaaataactaagcataggctcgagttaccacaaaatttgggaaaaataactatgcatatataggcttgtcgagtgctgggatgatcctttttttttttttggctgggatgatccataatcattaaacaaagtaaatattgcattgctcatcatcctcttcctttattatttttgtttcagagatttagattgaagttaaagccataatgctccagcaagcttatagtatgctcatctaagatttattagttacccaattaattgagagttacatttttttttaattctttagctgcaagatgcaaagaggcaagaaggatgaaccctccttattaggctctaattctttgagatattcccactatctaaattttaattttgtgtgtattttttatttattattcgagatatttattatgtcctaaagttgattctctttgaaaaaggctacattagatttagacccgtaatatgaaagttacgtactttaaaaagctatatataaaggacccttggagacccttcactacatcaaacacaaactcaaaattatctcttatcttcacccaaagattataagctctctacacttttttgtagtatagtctcttatttcagtcaaaagacacacatttgcatcctccgtgaatcactttcttcagaaaatttacaaaaacaatggagaacctacagaagatgatctctgagaagtcggtagtaatttttagcaagaactcatgctgcatgtctcatacaattaagactctcttcttagactttggcgtgaacccgactatctatgagctcgacgagatcaacataggaagggagatagagcaagcattggctcagctcggatgcagcccgaccgttccggtggtgttcattggagggcagcttgttggtggagccaatcaagtcatgagtctccatctcaaccgctcccttgttcctatgcttaaacgtgctggagcattatggctttaacttcaaaataaatgtaatttcaaatatataatgcaattaagttactataattaaagtgaacaaagaaaacatacacaagaatgtatgtatgagttaatgctatgtctatctaagttttaaaaagatagattatccggttgcctattttgtaaacactggttctattataataaattcagctactcttggatttctcctttccaatgtgccctctatttatatatttcatgcatgcatagatctaagatcacatgcgtcgacgttattgaaaatgtacgcatttgcaaataactttatttcatggtgtaaagagaaagaacatatcttatcattatttatttttcttgtttccattattaatcgtgttattgtaaataaagcttctgtctaatttaatcgcaattattcagatcgttcttatggtgtttaatcgattccttcgtacaaatatatattcagagacaacttactactaaacataatagttcgaataaccagatgtttaacctgttaattgatggttcgttgaaaatcatatatatcaattatagaaaataatactatctaataagagatttccagcatatacatatttaagtttagctaaaggcagaaatataaatactttcttatatatggttttattgttttaataggtaatagaatgtaaagccttaattatgggaattggttcatacgagtaatttcacataatggacttagaaagatatctaactttttataaagaaaaattcttacactaataagggtttgttacaagaaaaaaaaagtttatcttaggatttaaatgttaggatctgatgttatttacttatttaactagttacaagtaaaacttttgctgcgggcctgcggctttcgtaaattagtgatatgatcatatgaatgaagcagatctgtgtcatctgtctatcttttttttttttaaacaatctatctttaattaaagaaaattttgaatagatgtaaactaaatattaaattcttctctatccatttaagaaagttgtgggcgttattgttcaacatcatggtagaaaatgacgctactaaccattaaaacaacaaagtgtgtaaagaattggattctaccataagaggaacacgttgcattgttacatatattccatgctctaggacggtacgggcaagttgcagaataagatgtgatttggcatattacataatgtatgtgtcggtacatgaatcacgtacactgaaaatgatgataaccttgtattgtgatgtaacaataagtgactcttgagatcgaaatgggccaccattaatactattttgaagagaaaaacaaaaaaaaaactaatattttacattttttgtatatttttggttttaggatatatatatacgtggttgcttcactatcatactatcatatccatcttgttgggcacgagcttgaatttctagcaatcttattcatcgaatagggaataaagttcaattttgttttattctttgacattgcaagattcgatttcatgcatgacggtaaggctaaaacggaaccacaaagtttgcctttttctctcaagtggttataaaaaaacaattcttgagatattatctcatactctctcgagttttctcaaacactgaagcttgcaactctttttggcgtatctaaaactatgtccaaggcgtatctaaaactatgtccaagctatccaatgatttttacccgattttcagcagaacacatacactatgaaatactataaagtatgattgaaagcatattagatatcgaaatatttttccatatatcatgtacacataaccgttacaaaaaataattgctatattattaataatttcttattagactcaaaaatactgtaagaaatatttcaattaattttgaatactatattagtatagtacacgaaatccgataatttcaattaacgacgacttcacgataacatgaaatcttttcgtatataggcgtcaagacatttatatgtcgataatgtgttggatatttttgacgcattcctgacgacatatttagattgaaagtaacattctcaaaaccaaaaattattatcacaagcctaaatgagccaaaatgaaatccggagtaaacactattagcaattttcaactttatttgaaactaaaaacatatttcggaattttgaaattttataagtcaaacgagtttagcagagataaaactcatttctgctttttatcagtggttttcacaatgaaggccgtactaatgaaacatgacattattcgtccgtatcaattattcctcatatatatcaaagagagattttgttttctgtacgttttaccaaattagttgatagttttattctttagctgcaagagggaaaaagactcaaagagtcaagacgtgtgaaccgataatatcctcagattctttcggaatacttcgactatcttaattttcatcatttaaaattgtgttcttttatttctttacttacaatttgagatatttcatatttgtgctaaagttgattctcgtagaaaaaggcaacgtaataagaaaggttacgtactttagaaagctatatataaaggaccttacccacttcactccatcaaacacaaaaacacagagtcacttctcattttcacccaaatatatcaataatctctctataagttatctagttttcccatattcatctctaatctagcattttgaccaaacacacctatttttctcctttgcaagacagttttcaaatatctatcacgttatattactaatggagaatctacaaaagatgatctccgagaagtcggtagtgatctttagcaagaactcttgctgcatgtctcacacaatcaagactctcttcttagaccttggcgtgaacccgacgatctatgaactcgatgagattagcagaggaaaggagatagagcatgcattggctcagctcgggtgcagcccgacagtgccagtggtgttcataggagggcagcttgttggtggagccaatcaagtcatgagtctccatctcaaccgctcccttgttccaatgcttaagcgcgctggagctttatggctttgacttcaaaataaatggaattgcaaatgacttaggttctgagaaacttattaatgtgaacaaaaaaaggtaaaaaaaacatatacaaaaatgtatgtatgagtttattactatatatgtctatctatctaagttttcaaaagatagattatgcggttacctattttgtaaacatgcatctaagagatatttatattttataataaaaatcagcaacatttggatttctcctttttcccaattcatatttatataattttgtatacatatatgcatctagaaatgaatacacgtgcactgaatatagatgattttttatggtgtaaaggaaaaaagaaagaatatataactatttatgcagaacatgcgccaagacataataattaatttaaaaatttgaagaaggcatattttataggctaagaatattgtatttgtatctgccacaaattaaaaagcgatgacgagtctgaatcgtgtgtaatgtcaagccttaacttttcaaacgaaattcttacaatgatatgcaactgttaataaatgttaggcgtgattgtcaactgaattagctagttacaacttacaagtgtaaaaatacaggagattgcgtaaatttgagatatggatcttagaacaactctataatcaattaaagaaatttagaattaaggtaaatcaatcattaaattcttcactgtctatctacagaaacattgttgaacatcatgataaaaaatgacgtttctaaccattaaaataacaaagtgtgtaaggaattggattctgccatataaggaaaatctttgcattgttacatatattccaataataggacagtacgagccagttgcggaacttgatgcgaataggcatcttacatacatataatgtgtcggtacgtgaatcacgtaatgttcaaatgatgataaccttgtattgtgatataagaataacggctcttgagatcaaaattgggccaccaataatcttttaggaaggaaggaatgcaaaactatggctttaaaattttgttgagccccacgtggctgcttcactaatcaatcttcttggccacaagcttgagatttcagaatttcgtggaattgaggataaagctctctttgattcttgattcttaacattgtaagattcgatttcattcatgacgataaggctagaacggaaccacatagttttcctttccctctcaagtggtcatacaagaatattataattcttgagatgcattatatcttgcgatttcgagttttcgcaaattaaagaatgagaggagctagaaactttttatggcatatctaaaactatgtcaaagggacatgacatacatatgaaattctatttctttatagtatatacatatgaaataaaaagttttcatgatattacgtatcccatttatgagatatggaagttaatcaagaattggttacttctcatctcaggttttcttgttaagtcttttctttttgttctcgattccttgtcttatctcatgtaaccttaatccttcactcaagttataaggtgacttagatgaccaaagacatgtgatttacataactgaattgtcttttgttaatgttctatagtaactagttttattacaaatagcacattgtttgtcaacacatggaatttaccaccccgagtctttagaacaatatggaaactgcaaattcatgcggttcttattgtgggcttcgacgatgtggacaaattcaaaaactattattgtttgctcgatcattcatgtaaaccaggtgacaagctgacctaattctatcatttttagttatatggctaacatatataaacttggactttttaggacatgagttgggagatgtagaatcctggtatttactttaactcagtatttatgatgatggtttttctaatttcagtttgagttaaatttttatttcggttgatgcggcttcaagacacggagaagtctatgagagacaagacatatcttcaattttctttaatttaataaagtgttattttattattttgttttgaagtggtttaggatcagtttagatcgtaaaccgattaaattaattaatttatgtgtattttgaggtcttgattcgggggtatctaactttaggacatagtattattgactttattatgtgggcattatgtgatacttctatcatgtgaaaatagatcgtgtctttttgttttattttgtggattgttttggttttgttaaattgatcggataatttgggtttggtaggagtttctggttcgaaaaccaaacacgatccgaattctaatagaaccgaaccgatctattccgacggttcataataaaacggacccgtcgagttctactcgctacaaacacacaaaaagctccgcaagagaaaaagaaaaacaagaaaagggggatctagggtttgagaatggcttgtgaagttgatactgatttgagcaaggctggagattcgacaggtttcaatcctccactgccgaagaagccgaaaatcaatgcggagaagacagatttggatgcgatggtcctaccagggctttgtccagctggcgataggatgctccgctacggcaaattgagtgatcctgaatatgtgagacaacgtcaggtctttgacgatcaatttgaagacagtgaggtataaatatctattccattacgtattagctaagaattagatatcgtttacgtgaactctgttattgtcatgcttaatcgtgcttctcttgtatttgtactcataactttattttgttcttgctcaattatttgtttttagggttttgatgtggagtgggatagttttgactacaagttcttcgccatgaaattcgagtgggcaggagaaggagatcttgattatacacggagcaatttggagttgcgtactctgctcatagacgcagctatgagggatcacgacgacgattatgtaagagcttggtcttacataaactcagctctcttcttaatttagttatacttatgtttttgttttccaggatacaaaacttgagtttgtggattatgtcagtgcaaatgtaatgccgtgcaagggttatatgttttatatcacattttgggccaaagatctttcctcaccaaatccagagcctaaactttaccaagcaaagatgcgcaagtttttttgagaaggtttcggtccggatggttaggctaaggcccacagaagaatgatgttgatggagtatgatttttatccaaaaattaaaagtgccatctttttctctattggctttacaacttgggatctagtatgacatgtgagtcgtgttgtctatatacaaaattaatagaacttaccttaactttcctttgatgcatacagctgatgacttcagctccatgggcttcatgtgtcgagagatcttccttatgaatattttaactttgaactaaatttgttagttttcaagccataactgctggtcttatcttatgagttatgacttttgtcttatgtaatttccgaacaaaatgttgtaattgattgtctttgccacactactgttttctctagatatagatatagacattgaagccttctagcttagagtaatctgggatcattttgttaaagtaagttttgggagaggtacagtagtgacgttttggttttggttaaatttgacgcaataagtaacagagctaataatgttagtaaataaatttaggaccgagtttcttttgttaagtagttcaaaatgtcttttgactttaaacccctagtaacatgctcttgatccgaaatatgttttgtttttccaaaaactaatggtgcaaatagtttacttaaattgagaagttcaatgaacattcatctcactttttactctttaagatgaaagacttaaaaaaatgattcaattcattcaactttaaaaactgaaagattgaacgaattatactgtcaaaaatattcaactcattaaactatatgttttccgaggcatggactaaatggtattctactcaaatttttccaacttagtattttccaactattcatcttgaaataaccaacttagtccaaatggttgacgtaactgaagaaattggaagagttgataacattcaaccaattttttaccatttgagttgaaagacttgaaaaaaacaattcaagccattcaacttaaataactgaaaaaatgaacaaattataaagaaaaaatgttcaacttatttatctacatttttgcagaggaatgagttgaataagattcagctcaacttttttcaatctaatatttttcaatcattcaatttaaaacaaccatttgcagtctaaatgtgaatagaaaactaccagtgttcaaccatttttttcgaaagctaaaagcctaaaacatttacaatgtttttttttatgtggtaaatgtatttttttgtggtaaatgtatctcctcttcctattgaaactcaacatcttcatcacatgaaatttctaaaaaagattttacttctttttctctcgaaatcttttctttttttccatagtaaacctgcacaaacaaggattgcctccctcttttatgttccctatgaaatcaaccaaatcctctttgcgcccattttcttccccaactattttggatcatccagtaatacttctcaacaaacatgtctgcatcatagccaacaataaacacatcatggaattgattgctccttgtattgctcttgttggtcgatattttcctgtttgttaaggaaaacttttacattatcttaagagaacatgtattaaattttgtactcacttattcatgtggtctaaaatcactcaattgtggtataactccaaccacatgatgcctccacactagcctcacaaggtcatcatcatcaacctcgtcgatgatgaccaagtaattgattgtctactgtgggctacaaaaaaatgacattgaaataaaccatttattataattatatatctaataactacatacataagtctaaattcttaagttgtcgtggtcacaaggtcttcgggtaccagtgtataagcactctccttcttttagtattccattttgaaccacaaaatctgctagagttgaagtatcttctaacccatacttcctaattttcacattgttggccaaatgttgaatggagaatgagcgttgttcatcaagtcttctgccgatattgaataatgcttcaatggctcgaataaattaaatggcccaacaattcgctaaaaaaaatataataatcataaaccattattgtgatcccggccatgatattaacaaaagtattaaaaatggcccaataatattaaactatacgaatgatacttaatgtaatttgcacttacgatcgtctttttgatttagtacattactaacaatccccgcatagccactccaatcccatctcggaggcggatcctgaaattaacttatgttagataaaaatacaacatatagattataacaaaattcaaaaatcattacattgtggttgaagatattataagattcttacatatctatctattgtacagattatgcattttgcttcttgagttgaatctatggtaagacatgacttgtgagttatgtcgctcaaacaacgacttcaactccgtgggcttttccagtgccaagacatttgatctcgaacattttactttcaagtaacttaatgtcatgttatgccattgttatctattaatgtaactagacttataagtagttgactttataaaattagacggttctaattaaagtttggttattgaaatcctgaaacgacaaatggaaagattcataattcatcgatactagcaatagccgaatcatgcagtcaatatttattcaaaaacattttggttctatttagcaaaaaaagtttttatattacaataataactataatttgtccaattaacttaatcttaataacttgtcatttttattagataatttccatgtcaaatgatttatttttaaatgaatacatgccaaatgaaattgtttgtatttgtttggtgagaaaatagaagactatctagttatttatatagaggtgagtatttgcaatcctattcttctatagttaaaattgattataaaatttccttaatttattgtattttacataataagattgtcaaatttcttaaattgtttttttttttaaaaactaaggaaaaagtaatcattttttataaaatttttaatagaatttgtagttgtaaattagaatcagtgaatgattttttaatttctattttctgtttaataaaatacatatagttatcttataattatcttctttactttctaaaaattgtttaaataagatatatactataatattcttataaaaataatataactttttataaatgttttttctaaataaataaaaagaaatttgtttatatgtatcaaaatttaagatctataaatttgatacgtgttatgatcagatgaattactaactttgaatactatacttaatataataagataggtttgagaattggcgcctgtgaagtcgctatgaagatttgtcttaacatcagttgcctacgacaattgcatgaacaccatcaccagcagtaagtactacttgtaactcatgtagaggacgtcgacattaaaagaaaaggaggagagaccgtttctagctaggatacacgacacgcaagtagctccactagcgcctctcattatcgaaaccaccacggggctaaggaaacctctagcattgacgaactcctccagagcatcctagattggctctatcatcaggaaacaaagacatgcagacgactagacacgctcgtcacttttcaggacgaaatcaatcgtctccacgtcttcagcggccatactcttacgtcgccaagcgaagaaattgcagcttgattactacgaacctgcctcagcaacagattgatgaacaacaagcacggcccagcaggctttgtcatagtgatcgattaataatcaagcctttggccccaataaccctatatgtaataatatattataacataatattaaaaataaataaacaaatataataagtttttaatagaataaacatttgtagtctcgtataattttctcatgtctagggtttcgaacgaggctggtgattccgatatcacaaagtttggagattcgacagagttcgtttctccgccactgaagaagcagaagacagatacggatccggattctgaggtaaaacccgaaaatcgaattctccgaagaggaaactgggacgatccggaatatgcgagacagcgaatgatctttgaggatcaatttaaaaacagcgaggtgatatatattccatagcctttgatctagtttttatgatgatccttagaatcagatgtatgtgcaatttgtttgtttttgttgcatccttgtaattaatttatatggatcatcttagggttacgatgttgattggagtaaatgttgactacaacttccctgccgtgaatttcgattggggaaatgattttgatgatcaaatgaacaataatgagttaatgaaactgctcatagagactgccattgacgaagaaaacgaagaaaccggaacaagacttgagtttgtcaagtatgtgagtgcaaatgtacttggcgtccaaggttttttgttttacataacattctgggcaaaagatctttcctcaccaaatccacagccacattgttaccaagcaaaagtgaggaagtttgcggctgagatcgacgttagtgagtttaggctaaggccaacaaaagaatgatcaattgtgaggtacaacttcttatccttaacacgaatggcttcatcttgttaggtcatttcttattgaatatcttaatcttctcgatgtatacaggtgataatcacttccaattctgtgcgcttccagtgagaagactctttattggaacattttacttatgtagtaactttctgtcatgtattatgtcctaattaaataatgtagacttgtatgttattggtctttagaactaaatgtatctagatgcttgaaaatcgcaatccggatagatatgtgactgatgaatggttacttacattattttcttcggatgatgatggacaaaatcttgtgtcataaaaaacaagttgatgcttaaacctaattgaccagtttttttttttcataaacaaaacttggatagtaatgttaataaaagatggggtactatccaaagaaaatgtaaatagttgacacattccaagataaacagagattatttctcacagcttaccaccatatatcattttgtacctatttgcccatattgcaaaacaggtgccttgttcatggtttctcaattctcactaagtaaatcccatcaactttggcaatccatgcgcgtgtctcattacatcgaactctcatagctcctctatatgctctccataagtcatgaaagtactccattttctgatcatgcctcaagtgacaagcccatactatttgtggatgttggattttgtatccggcccaatacgcggtttgagcccagcaggaggcccatcaagagacaagcctgtttaagaggcccttcgtttcaaaagtcggattaggctttaattcgagtaacggaagaatctcgaattaaagacactcattaactgctcgagctggagacttcgtaacgtccgaagtaaaggaagcgagatttccggcgtaagatcagcgtagtgattaattcatttgattcgaagtttttgtataaatatgattcagttacgattgtacaagggacggattttttgatacagaaactatagagaaataaacacacttttttccgattgatcattgttcgtctaacaagccttaagatcctcgaagcatccacagaattctaattgcggattccgacatccacactattcttttgggcctttttttcatccaaagtaaaactgtaggactgattgaatttcacattatggagacccatattgtcttcatagttggatgtgcacttaactttgagattacaaccacgagtgagttcgttttgcaattctaaagtatttcaacccctaccttcattcaaactaaaacacgaagcaataactatcataaaaacaattagatgattcattttttggatctagatttatttttaaagtacaatgaatccaaaagcgtcaaaatgtcacaatagtttttttctgtggtaaagagctttaatgttcataagccaataacttaatttgatcaaaattataaaccaaaaataaacctacggagggaggctaatctttttttttttttggtcgaaaagtgataatctacatactagattttaacctgcggtataccgcatgaacaatttactttttaaaggtagtatatataaaagtttgtaatgtgtatctatttagtttacaattgttattaagtaacgtcttgccaaatccgtcccgccaacccgtcccgtaaaaaaaacatatattttattaatgttgatcttatttatgatatatttataaatcattgtttaaatattttgtaattttgtagtaattaaatgctatcaatatctttgcggtttgatgattataatcgaattgttatagtcatgcagaaaagcaatatcaaaaataataattttgtagtaattaaatgatattaaatattttggaagttttattttagtaattaatcgtgtagttaattgggagagattttgggaagattgttaaatgtcaaatatttaattcgaaaattttctttctaattatcaaaaacaaacattaaaatccagtggcagctattgtaaataagtttcaactacaagatttatttcacaaaatggttgcaaaaacgtatatgtagattttaaaaaatagttaggataactgataactcccttaaatgtttatttctcaaataaccttgctaataagtgttttacaaaaagaaaaactaatgacaatgtctttggttcaaatccataatggcccagctgctttcaagcacccttcactattttggatagtatttatggttctacctatttcttagaatcaagcgagcctatttcccttctcgtgctttacgcaacactccaacgaccggatgcctcgtcactaatctcgcaagatccacatcatcaacattgtgatcaataattaagaaacgatcaattgtctcagtcgtggactagaatagaaaagaagaaaaaaaacactattaaaaataaacgaaaacacactctattgaaaacccaaccccataaacaaaggccaataataatattttccttaaaacatgattcatatatgataaatgagattcataagttagtagtaagaaaatgcaccttctcaaagataccatgtttctccacaaaatctctaggagttctacaatctttcaagccatgttttccgagatgtatgatgttgacgaaatgctgattcgaaaacgaacgttggtgttcaagtcttattccaatattaaaaaaggcttccatagctcgtgtaaatgcagtcagccagcaaatcactacaacataaatcaattttgtgtaagtggcaaccacagaaattcagaatccttttacaaatttcaaaaattggcctttttcattctaaaaaacaaaatgagcgcttttcgtactaaaatttttttatacttaaatattttgaccctttttcatactaaaacaatttttaaaatgtctttttattcatactaaaaaaaatttagaccattaaatttactcccaaaaaattggattttgtacaattgctcctcttgctctctccaagcgttgtctgtggtggcaagaaatttattcactaccaaataaaaaaggatagcaaaatttgagcaaaaaaggataaatttttgcgagaaattttagcaagaacatttgactttctcattatgttcacaacaaaaagggaaatttagtcactaacaaataaaaagggatattttcaaaatagattttagaagaagatattcttggaaaattacataaaaatgagcatttttgcaaatgcctctttattaaatcaaagaaatatacgctggttatcaaaaccgtcaataatactccaaaatttgaacattattataaaaatttactatgccataatttcgaaaagatattcttactgttacttttcttcttgtaacactcaatttcttaactagtatattctattttgtaaaataaaaaatctacttaattttatgtatagagaaataatgggtaacaaattttgtctatactttaggcatcattaaattacgggcgggcctacatataaatatgggtttatacttacgacttatttgaatatccggaaagagagtctatctatgtgttgttcctccctaaacctaagatttactttgagattaaaaaaaataaaattggccatggatcttttgatcagtctttctccatttagtgttaaaaagaaaaagatttagtgttatgaaatacggtattcaaaaaattaaatggaggaagcccattggttgaccaaaaaaagttaaatacgaaaaagaagtagacacagtactaaaaagaatatagagatatagtatcaacacaaatgtcgtccaccatttctcaaaacaatagtccaataatgaaaatccaaaatctgtaacatgaccaattgacccaatgaagaaagggttcatccaaaatgtccatttagcccctgcaacttctctgttcgtccctcagtacaaaaacgacttctttcatctcaaaaccaaagctttcttggttcacaagctttcagaatctaccaacgctgctttcacgaatttactacatactctgactctgaaacttgggttcgcgagcgacactttcactgtgaatcacctagttattagttatgtcaagctcaaagaaatcaacactgcacgcaaactgtttgatgaaatgtgtgaaccaaatgtggtttcatggacttcggttatttctgggtataacgacatgggtaaacctcaaaatgctctttctatgtttcagaagatgcatgaagatagacctgtgcctcccaatgagtacacgtttgctagtgtctttaaagcatgttctgctttggctgaatcaagaatcggtaaaaacatccatgcccgtctggagatttcagggctcagaaggaatattgtagtgagttcctctcttgttgacatgtatgggaaatgcaacgatgtggaaaccgctagacgggttttcgactcgatgattggttatggaagaaatgttgtttcttggacctcgatgatcactgcttatgcgcagaacgctcgtggccatgaagctattgagttgtttagatcattcaatgctgctttgacgtcggatagggcgaatcagtttatgctggctagtgtaattagcgcatgctctagtttaggtaggctgcaatgggggaaagttgctcacgggttagttactcgaggtggttatgaatcgaacactgtggttgctacctctcttctagatatgtacgcgaaatgcggatctctaagctgtgcggagaaaatcttcttgagaattcgttgtcattctgttatttcgtacacatctatgatcatggcgaaggcaaagcatggacttggagaagcagcggttaaactattcgatgaaatggttgcagggagaataaatcctaactatgtaacattacttggcgtgttacacgcttgtagccattcgggtctggttaacgaaggcctagaatacttgagtttaatggctgagaagtatggtgtggttcctgactcgaggcattacacttgtgttgttgatatgcttggaagatttggtcgtgttgatgaagcttatgaattggcgaaaactatagaagttggagcagagcaaggtgcgctcttgtggggagctcttctctcagctggtaggttacatggaagagttgagattgtaagtgaagcgagcaagcgattaatacaatctaatcagcaagtgacaagtgcgtacatcgcattatccaatgcttatgctgtgtctggaggatgggaagattcagaatctcttcgattagagatgaaacgtagtggaaatgtgaaagaacgagcttgtagctggattgaaaataaagattcagtttatgtttttcatgctggggatttgtcatgtgatgagagcggtgagattgaaaggttcctgaaagatctagagaagagaatgaaagaaagaggacacagaggaagtagtagtatgatcacaacaagttcatcggtttttgtcgatgttgatgaggaagctaaagatgaaatggtgagtttgcattgtgaaagattggctttagcatatggattgcttcatttgcctgcaggatcaacaattaggattatgaacaatttgaggatgtgtagagattgccatgaggctttcaagctgatcagtgagattgtggagagggaaattgttgtcagggatgtgaataggtttcattgctttaagaatggctcttgcacttgtcgtgattattggtgaactttttactaaattatattgattttttgttctgatatgatccgaatcattcatagtcaaaacattgatgtagaagcgtatgtttcaatcacttatataattaaagtagttgtaagaaagtatatgtttcaattccaaaatactttgaacagaactgaaacaggattagagcagtgtcttgtcagaaatcttatcactaaccgatcttttaaatgactatatctaagaatcctcctactcttctataaatatgctttagttaatattgaatacccagacaccaaaaagaagaaagacctgaaacaggaccctgagagttactgcaaatagcaaacttagaccttatctagtgtcctctctccaagtcttcctttcctaatctatgctacttactaagatttttctatggaagttcatgaaacactattctattctttataggaccagggtctatatacaaaatagagtcaacactttgggccaccgaatcttgatgaacttagagcatccatggcaacctcaatcatctttataagcgcttcaacatcatggaaactaaaatcgacaacttttttgatagcagagatacagtctccatgctttctttcttctgaggtgtcagtgacggctttaaaagcattttgggattttgctgaggcctccattgccagattcatgctccctgtctgtattagataaatatagaatatcagctttgtttggcacaggaagatagataacaaagacctccacagtttaggcaataggaggatcttagttgagatttcaaaactcaaatatgataggtaagagacaacccagttcgctttttcaaatactccaaatgtatcatgccataattgatgaaggtgggataacttacaaagtccaatagcggaacaaaatttagttggcttctagcaacagggagaaggtttccggcaacatgggaaagacctcttctggttttagcagacttcttaatcaccccttgatgattgaaactatcgacatcagatgcagatgatgacggtgattcacctgaggtaacaattcaaatgaacaatatgtgactttactgaaacggacagcagtaaataaattgtccgtataaacagatcccaagcatatgtttctctaaattttgtccagatattgaggaacttccaacataagttttgcctgaaaatacttcaaacctataaagtataaaaaatctgtaaactatgaaaaggtggacatactaagccaaaataataggtatacgttgactactgctgaggtaaatatcttctgagagaattttgacgcgagcaaaagaactgaggactattttagacaatgataactactacaattctgacttgaccatattgaaaataaatttccgggaaaaaaacgttcactaactgatatgatcatagatgaaatatacaatagtaccttgaggagtcatctgtaccattttttgcaattcattccattctccactcagacctagacttctgccatacactaatctcatgcaagccacttctgtgcatttataagccaaagtagctgcagccatttcttggcttgtttcatattgatgggcacaacttctgagaaaaacaagcagagtgttcaatgagcacaaaatcataagcgaatcaacagcattctgtcaaataccaacacctaaagtcgaaagacaccggattcctgagaagtttcctcagtcataaggaaatgggaaatgagctatcacaagcattcacttactctgaaagttttgcagcagtatggtaagcctcaatatggctcatcttccccacttccacattatctgtactgcacatttctaaaactgaagctccaaggagaaacctcagagccgctttaaagttgatctccttgtattcatattcaaatccagagctctgagttcattgagatagaaagacaaccaaaaattaatagccaacacaaaactagcagaagaaagacagcagtgattcatattactgttccatcatttgtttctttagtttatttctagcagatgaaacttgaagcttcagactacattagaggtggcataaaaatctgaccttgaaacagtcagcaagctttctcagcttttcagcctcttgaagtatatcattcgtggggcatgaagaccttgcaggggaagaggaaactgattccacaggggatgcttttacttcttccacatacattcgtccacttttatgtgatcctaaaaccttcgacgagtttgatgtttctatcccagaaatctgcccacttccaccagagaaatatctacatgaggcatcaccattcaggtgttcttgaaagcaatcagcctgaaacaattcatttctttggtttgctttagattcatggactgaaatcttagttgttaccgccttttccattgagggctcgttttcctcaccatctgcaaacaattttgaatttttcccatccttaccctgcttgtaacccatcaaccttattttcctcacagtactattgatatttccctgggcttttgtacacaaggaaccactagcagttatcagttgaggtttgtggtcaggtttctttttagatacgagtaatcttttctttgggtctcgctctacattcaaagtgcaaaaatcattgtcatgacgttttctttttctctctgctggagtccatttaggatcttgattccaatgtatttcttctgctttaataactctggcaagtttgttaccatcaccagtcttgatatgcttggaaccatcactttcttctttgtcagcctcctttttcttcttgacctttatctgacaaccagcacctacaataataacaagttgttttgataaaagaagcccaagtgcggcgaaaatgtacactagttagctgtcagatggcaagactgacctgctgctctcctctttgctttctggtcaatcttatcctgaaaaaaatcgtgcgaaaggtctgcagatatctgagtagcagtaggtgtttctcctggcagcttcatgtttttattcttgaaaatatgtgggttacttctcataggctttgcagcatcaacaaggatgttgcttgaaactccttgcgataagtcttctacgttagacttcttttcaattggattaggcaatgaaccagaagttaaaggttggtagattttatcagcattacgaacatcagagaggagtttaacaccagtgtcaggaccatgaccctcactagcatgaaaggatttaattgcgtttgtagtctcttcctcgctgacgccacagtggttcattccaggcctacaagagaattttagggagacgataaggagatatgataatatgataacctgaggttttgcacaaagttgaaggaccaaatccagaaagtaagtagaagcgttgtcaatacaattttataactttaacgcttgacccagccattctagggaacaagaccttcacatggtcgaaaagatttctcctataacgaactacgaaacttatttcaaactaactataatagcaactaaaaagggctagtgcttgaatcaaggaaagagcacaagatacaaatacttgaaaagacatatgttagaaaacgaggtgatatgaaataatcagatacttacagccaggtttgcatgctacacaaccacttatcaggcagcttctcagtattcaggtcatagggcagtagccgccatttctcacaactctcacattgggcccaataatctaggtcaacactggtggaagaaggtgcaaccgcaaaatcaaacccagtgtccatgctattgtgacctatatatgcggcatccttcaaaggcatctttgataaaactttatcaccaatacgatatttgctacggttctgttgcaactttgtcggacatgtttttttctctttcacagcatgcaacccaacaaactttattttatttgcgactctgggatcactttcaccatcttttctacaaccttcctgcaagttactttttgttgtaaacccatcagtagtaagacttgccccacctaaaccacaagctgagttatccctggctagctgaccagtggataaaactttatgcttcttcgtctcattccaagtggtggcatgaaaacagtctacctctttccttctccttccaattggagttttctcacaacataaaacatccgagaacttgttctgtatctgaatagaagatttctttcctgtcttaatcataggttgattgtctaataaagtatattgcttcttcttatccttcactaggagcagactatcaggaagaggcgacatcagtagatcctctggaacagaaatggcagtcatttcctgtttcatgaagttaaaagtaaggtggcatcaagtcaaacgaattaatccacacacaaaaaaaggtataagcgaaagaatgtgaaatatgatatacctgaagaatgcgggaaggagattcacttgtcttccctagagatgtatgcggtagcattctgctactatcatcctggctgattcggggtggtgaatttggagaaccatcgagaccaagatccttgcaaaccatcgcgacactttgggacaagatttcagaacccattttgatccgaactctgatcggcttattatgaggcaaatcattggctggtgttcttgcatttcctttatttatgggaacttttcctggagcttgagccaaaagagatcctgaagtttgatagttctgaggatcctgatttcttactagtttacaagatgtagcagggggtgactgaaacttctgaaccacattctgcgcaaacaataattcataagtactcataattaaactacttaaaacactgaggaagaaaaatcactaaaaggtccagattccttcaaacaaaaacaacaaggtagtttcactaccatattttccttttatcctcacatggaattgagaattgtttctctcataccttcccgggtaaactgttggaaattctttgtacagcatgattccctagagaactcctttgacatgatggtacagccggcaaacgtttgtaagtgggcaaaaatgatccatagtcaaagatctccggacctgaccaaccatatcattcaacaacgacatttcatttcaaaacaaatatctcactaacaccaatttaatattacttaccaaaccggtcccgggcttcctctccgaaacctttttgcaagtggccaagtacattctgtaccttcttgtccttagatacacaaagcaacaaaacttgagcacatatataataaaaccaccaggcaaagaaaaagacttcgacacacaaagatacaaaaacagagaaaaaatgagtatccacactatatattctttattgagatacataaaattgagatttcatatgctacaaaagacagacacatagttctctgtttaaaactcaaaactcagtagaaacaagcaagattcatagcaattgaaatatcttattaaaggtatatctcctccaactaaactaagatgcacaaaacttaatcatcattggcattataaacacagagtactgtactattcatatgatcttaacacttccaaaacataatcagaaattaagcatcacacaaagatcaacaacggcttcacataacaccacacaaaaaagatcatttaataatgagaaaaaaaatcacaaacaagagagactcacaatgtaagagagatcaacgtcaagatcaacaacagcttcatcagaggaacaattcatctctccttcttcaagctcataatcctctcccatcttctaaactagtaaaaccctaaacataacccaattccaaaccctaataactactactacttcctaaaccccaacactcactaactctgccgccaccaaaccgtctcgaaaatccaacattgcccaaaacaatctcaaaacacacaaagtttcaaatcataaacacttagattatccccaaaaaccctaaatttgttcaatctccaaaggacaatctagattgttgttaaaacgcgaaattaatcgcttaatcacgtttatcaaaaactcaaccaaactcgtttgatcaaaagacgagaaagttgaaaaggaagattcgatcactgtgatcgtctcaacggcggcgaagagcagcgttgagggtttaaggaagattcggcggcaagttggttttgcgtctccgattttttttgcagacaagacgctatgtgttgaagagtgtttagttttggagggttcctttcgtttatggtttaatcattaattaattaattataaacaactttaatttttctataattcgtatctctcatttattaatgcttgagaaataatttacattttgccccttatatttcttagattttatcggatattgcttaacagtttagaaatgagagatacgaattcatgacaataacgaattgtggattttgttcctaagttcgctaaataggttgcatgataccacacttttattattatgtatatatttatgtatttaataaaatataacttgttatatgtattactctaaacactatctaatctatatatacatttttgtagtcattttatgaaataaatcctgcaattggaacttatttacaatggctgccactgacttattaaatgcaaaaattaactaccaaatcaaagcaaatcttattcaaaagaatatgcttttatttcatggcctaattatttttgccaaaatggttaaaatatttaaaaattaaataaccatttgaaagaaaactttaaattgatttaaattataaatcttttaataaaaatattattaaaaaaatagaaaaataatttcaccgaacatgattagatagtaggaatagatggtaggacgtgtttataatattataatatataaactttataataattaaataaccatttgaaaaaaaacttttaaattgatttgaattaatattttttaaactaaagtattattaaaacaaaaataacaaaataatgtctaattttactgaacggggttagtggtaggacgggtttggtcgatagtattacgagacggtataccacaagtgaaatctattagatatgtttaatttcaatgtgcaggattagatggtatgacgagttttgatcgataataatacgaaacgatatactacggatgaaatcctagatataacaactaaaatctatatatacattatcttaaacactaaacaaagcaaacaatattaataaaacaaatatttacatatacattttatataacaaattttattaaaaacctagccccgcggtataccgcgagtcaaaatctagttctatatatacagtagtagggcactaatccgatctttaactcatatacttatagtcaatatcacatatacaattgtttctaataaaactctagctcgttgtagaccatgtctaaattggataaacagttctatatatgtgtaatcataaaaaaaaaattctagtttaaaatggttgtattgtagttaagtgcattaactacgtttacaaatgtcaaaaaggctagtcgtaagttgttaccaaatccattttcggattgcaaattgtgcagattggttgcatgataccactctttttcttctacaaatttaatataattttcatattctctttttcttctacgagttaatataactttcatattctcttttctttctacgaatttaattctttgatattttattactatcttcatctaagattttgatcttgcttttttttttcttttgctaaatttattttattataattgattaaactttaatgcataagtttgaactttaaatagttttttctatagactaaactttttttattttcttccaatttcaccttacttttttgaaaccacaattaaaccccaataatgatttgtccggttgtcgcttgtgatagcagggctgcatgtgagtgcgaagtttctgctacaagcatcagagtttaaagattggttagtctatatataaatacagttgaatataattggtcggaattttatcactaatgccactaactcaataaaattgttcattcatacccttccacgttttttattttaattttagtttattttaaatcaaaatttatatgaaaaatccaaaaacccttaacctaatccatatataacgtatgcctgccacttctttctttgccaacttaaaataaaacactgcctcttttttttctctttcacgtttctcctctttattcttttagactttgtctcttttctctcaaaatcaattttccagaaatctttcttcttcttctccatggatctatctatcttcttctttttcatggatttctattctctttcttcgatctcttcttctttctctgcaatctaacaaaacctagatctcttctttcttctcaacgaaccctagatatctccaaactagatctctgcaaaatcagtttatgcataaccgaaggaaaagagaagacgttcacagaattggcggcgacgacgacgcttggagaagacggttcacaaaatcggcggcgacgacgcttggagaagacggttcacagaatcggcagcaacgacgcttggagaagacgttcacagaattggcggcgacgacgacgcttggagaagacggttcacaaaatcgacggcgacgacgatgccattaaatatgatagctttagggtttagaaatacaaatcgcttaaacttccaccattttgtaccatttgtcccgtataactgagttgtatcaattatactattaatacattttgtaccagttgtccatatttatatctcacttatactatttgtatcagttgtcctattatttttcaataatatcatttataccgattgtttttatttatatacagttataccatttataccaattgcattatattctcatttacttatatcatttgtaccagttattctataatctctcatttgtatcagttgtaatttcattaagggtaattttggaatatcacatttatagtggcactcaaattataaaatggtacgccagattcgttttctccccatagtggcatatgtgacgcgctctctaattagtctcaattttaaaccctcactgttttgtaatttttttttttcaaattattttgctgtcttgaatgtcacagtgaggacttgaaattgaagagactgtagactaacgtcattaaccaatcgctgaactatgatgattgtagcagaagggtaccaaaataatatagaaaacggtgaacgtaataactaatttagataatatattattcttgtaatatcacattaagggatgtagccgaagttaaaatcctgtgttcaaaattttgtatctcatatgcaaattctaatcaagtttgttttcatcatattcaacaaaccttataaaaaactagattctaaatcccaagaaaaacaaataaaatggtataactacaaagactttaaaatattgccaacaaacatatataggttagatcatttgatcatatatgactcaattttcaagaaatcaaagaatgatattaattcttttttcttttccgtagaatgatattaaatacgtaagtctttgcctacacgggtgtggtctagtggagtgatcagattagaggaagttgtaatgagctaccccttattcgatccaccctacaactactctacaaatgtgtgagtatcagaagttttcacatggctctccctggcccctaaattagttgtatctcatggctcgttaactcgagaatcagtaagagagaaaagttctcgtgacctaccatgaactcataagtgtccgttgaaccggatcatccgaattaaaaaaaaaaaatagacgttttcttcgacaaaaaaattatagatttgtgtgagtcatttaaagcatgtaagcatttaaaactttcaatcactgattgtaatagatggaaaattacgatgttaacagaaattgtatagtcttaactataaatacactttcgaaggttttaaatctcgttaataatgaaaatactcacacatatgtatggaaagagtatccacgaaatttgagtgaaatgcccatagtatatatgcattccaaatttttaccataaaacaaaacacaccagattttcaggaattcactattaataaactataccaaaattattatttatgcattaaatattcctctgtataaataaaatcaaaggcctacgaaacatgcattggtcaaattacacacaccaaaaaaggagaaaaacagaagaagaagagagcaaagatgaaaggcattgcgatgttattggtttcatgtcttcttttctcctttctctcaaccaacctagccaaaggtatcattctcatattttcatatgtaaccggtttatcaataccagtgcgttaaccaataaaatcccggttcaaaatgtaaaacacatacaatacaatctcattaacacgtctacgtatattgtttgaatatgtacgcagagttaaagtggtgtccatcaaaggacgtgttcaatggatcgtgcacagacacaggaagtccaagctacacatgttttctagatttgttgggatctaagagtgcaagtgctatgcctaagaattgcaaatgcactcctcttcctcacaatcgtcgtcaatgtgactgttttgtcgtttgtgacagcaattaagttattctttcgattccttgatttataattagggtttaaattttttttttccatcttcaataatgtttattgaaggagatctctttgtcatctacatttaaaataagtaatatataaatctcagtttacaaaaaaaaaaaaacttttattacttatcatctatgtcaataagcatggtattttgttctttttttatcaatgaaatgtcaaatccatgttttatttacaataattatcttacttgaattattttatcccgcaaaaaggtatacctactatgttgcatttgtaagttgtcacgggttttgattttaacggagaaaaaaaaatacataagagtaaagcttaaatctttgaactaacaaatatttagtccggtcctaagatatactacatggtctaataaaataacattcatagaaaaattatcttatttttttatcgcatgtccccgaagggactcatagaactattattatgttacttaaacaaaggtaagtcaatgaaaatttgaaattatctctcttcatatagaagttgttgtttttaatttctaaattgcctaagtttgttactaaatttatttatttttgtcttaattcttatccaaatgtgcagaatgctaaaaagaatgttgactgagttaatgtcattttcttatactttaattttataagaataagctgataaaatcttaagaaactttggtaaatcctttctaatagtcttcctaatttaaagcattacagttcttagacaaaatggtataccataaacagagattccatgactgtttttaatattctctaaaatgacaaaaatataaatttggtcaaacgtttacattgtatttccaaagatatgagatgcaaagtagttgcaaaatatctatatataatcaattttacaactgaaactataacatacaatctttaaagaaaaaagaatagtcaagagaacaaaatatgaaggttgtggcaatctttttggcttcttgtgtccttttctctcttatccccacccacttatcacatggtaactacaaattatatcataattagatgtaaatatttgtgttaaaaaaagtattgattcatattactattcactaatagtcttttttttttgtgacatttaaacagaagaaccaaaggttgcaccaacagaagaactaatgtttgcaccaagcaatcaaccaaggtactgtcgttcgagacaagtgtttgatggatcatgcacagacagaggcactccacgcacgacttgtttccttgacttcttaggtgcgcgaagtgcaagtgagatgcctaagaactgcgattgtacccctcagcccaataacaagcgtctttgtgaatgttcagttatttgcaccgattgttgtgtaaaaaattaacacctactaatatgttgttatctacttaattttcagcacaattataataaaaattttgtccccaataataccctagatctcatattcatctattgaattattttaagtggtcatatttttttagctttccgagatcattccggtacggcggtaccaactccgatttacctcaaaaattattcacagttttttctgaaactatatatcgggaccattcctttttacctatctaataatagatccggcctattttacctcaaaaatcaataaactcacaaaaaacaataacatcaatttttggttgtgtagaggagttttgactatctaataatagacccagcaatttaacaccacttttgatggcttgatgaattcgatttccaacattagttaaaatggcgtaatgcaatagataactagaaagaacaattcatgataaaaataatttgtaattaaatttaaaaaattatcccttgaaatcaatgaaaaatttgaaagttgtattcaacaaattcaacgaataattatcccttagtagagattaccaaaagagttgtattcaacatattcaatgaaaaatttgagaatttcttttaataatttttttattgtttcttatttctaaattgctaaagtttgtaactaaatatttagtggtcattcatattcaaatctgcataatgaatattgatataaaaattgttgactagtgttgatggcattttctaacctaaaactaatttgtttatgaaggataaaatatcaaaacatatatttgccatatgcacgtatcttaaactgagtaatgttgtaaagaaaaaaaagaacaaagatattaataaacacaactgcgtggacattttcttattataggaaaataagataaatggatgtcatttctcgagcaacgttagctatttgtattcatcaatttggccagttatatatatagtagtaatttataataatatttgaaaattcatatatagatttgaagatcaaatttgttaaatatagaatatttcctaagagaaataagatgtctttgtcgagtggtattatacttgctttttaattgccaaccatactttcatattatagtaagataacctggttggatccaatccgggggagaagggacaataataaaatacttcaattataaaggggaaattatttttaaaaatgtaacaagaaatataatatatcagaacaaagtatacgatgattaaaagcaaattaaattaagtttatgttgagtttcaagctaattaaaaacaaggaacaaaataaaatgaaatgataagccaagtcatataaataaaaaacgggtgcgacacattatgctaaggattgtaattgcctgttggtatccatgtgattgtgtatccggtatttactgcgagagcggctgcagacgcaggggttgaagctgcaactgtcgtggtgacggttgtagttgcgatttcgacttccttggtgaatattgttggtatccatgtgattgatatgtaggcggcataaatattggtactagaccgttgcttggcccagaattagcccctggttgaacagtcacgtaactcgaggtcacctgaagctgatcaggtgacgcgtatggctgaggcgataccggtacatacataatatatggctggcctggtgtagatggtgctgtaacttgttctgcaagaaacctatacgtgaagctcacgacacctttttttccataaggacccgtcaaagcatgtgtctccaacttcataccgttagcatcaccattgtcggtcaacggataaggcggatttgagaccaataactgttgcatcggaagtctaacaaatccaatctccttatcaccaaggaaaggccggtggctcatcaactccacaaggagcatcaaccgcccttcttgagctgacttctcatcaatagaaaatttcatcatttgattccactttggatttgtataagcggcaaaagccaccggtgtgttgatcctattcttaacttttctgtccttaagaatcgcaaccgaagcgtatacgtccatggacgagaaggcgttgacatcttcgatgttcttggcgaatttgatcacgagctctaggatcagtttcgtcgtggtggcttgaaaccgaggagaaaatacaagaggctgacttaattttgctggatccaggtctcggtaaacgggtttaccaatcgatggcaaagaatccggtgacggagggtaaaattcctcaaccggtacaggtttaaaccggtatgaaaggctcaccgttgtgttggtacttttttcggtggccttgatagggcaagtcattgacttcattttgttgatgttaccgttagtaaacggtggaatcggatttgaggcaagaagatcctgaaccgagacgttgacttctcccaaatacaggtcattatcaccttctagccagtagctaaatagcttgaccgttatagttaataggccttcgttggcttctctctcgttgacggagaacttaacggtgtgattccacgtcggattagaaccaccatcgtaatcaatgggagttttggccgcttgtttttgttgtgttgtgtcgccgttgattgaaacgactgcgtatacgtccattttgtccgtggcatcgatatggttgacgtcactagctgatacaattttgagctcaagagttggattctccatagctctttgcaactgtggtgaagacattttcaagatagtattgttttgttttatcttggcatattgccatacaaagatatttatatacaatttatgtgtggacatcttcttatgttacaaaattattgaaaataaaataaaatggatgtcatttcgtgagtcatctttagtttatatacatcaaattgaccatgtcatagtgtatatatcctttttttttttttgttcagattcaaattcttatcagatacatatataatccatatagaaacattaattagagtttgtttgcttcaacttgtaagttttaattaaacatcttttatatttctcaatagaatcttggaatttatcatagtattatgcctttcatatgcagggctatagtttagatatgatctatgagattcaagttaacgaatttctcgtgtaaaaacatttggtttacctataaccgatgacgtaaaatgaacttggtcaaaaccgattatatatgtacggacaacataatatcgatttaagtaacgctagtcaatgcttacacgtacggtgacatttttttttcttctgagaattttgctgatcaaaggatttagtgatactagttacaaaaatttgatgtgataacacttatggttcatggtgctcacgtaataagcaatcgatcgattttataaatcgaaaacagcttgcacaattcaatatacttgtcttcaataggtagtgtgaaagggcacatagccaagaaaatagaacaacattcaaaatatccaaaaggccaatcatacacgaaaatgtttttctgctacatgaaaaaagtaacactccaaatagacaacatttcttacgtaaaaacaaataaaaaaactttgaagttcaaaatcgagtgtgaatttctaacgctatatttctagggcatggtcacatggttatatgttgtctatcaaatccaatccaagaaagaaaaaaacagataataacaagtctacgccgagtggtttcccactattacataacataagtcgcaagacaagttccacataaacaaaaagaaagataaatataattagaataattattaaaatacatgcagataatatgtaaaatttcgtattataatatcaaatatacaaaacataactttcgttattatatagttttatttgatgtgtctccaatgatgttgataatcgtgtgtatgtacgttaatgcatatggtatatactctcctaagtcctaaccatactcttttttctttttctcttttccccctaatcatacttttcaacatgattgaagatttatctccagattctttttactaaattaaataaataaactttctaaacattttattttattttattttatttgttgatgagtgaaattaaatcacgcgtgacatacataatggagttttattttattagtggtagcaaacgatcgacataaatatatttttgataaccagatcgacatatatattgatctagagacggtggatcaacgtcttagcaacagaggtgagttggctatatgccaagatatcgtcataaacatcagatgaatctttgaacttgagtttttggagattttcttcgcaagtccgaggatagtttaacgcagttttcaccaattcgtacgctttatcgtaattaagggttatcaaatcgatgttggctccttgaagtcgtaattgtgcaatcgcaaagcctgtgacgcaatctttcagaacattctcatttgcttcaccctctcctttcatcaactttagactcgtgacggtgctacaaccaaaaaaacaaatcaatagtcgttcctataatatataaaccgcaaaatgtattattttccacttggaaaacgctcttctttctttgtaaagtaagtttaccgtagcaaaattcacattacaccaaaagaaatacgttacattttttcgtggtatgctaatattattatggaggtaaaaatttacaggcaaagtaatattaattcacattttttcgtagtatgttaattttcgtagcatattagtaatattaattttgtgaaaacacattaaaaatattattatttgtacaataatgattaatggtgtacatggtgaaacttacttgataagaacatcaagttgagatccgagacagtgtataatgatgttgacaagtccagcacggtcgatattgaaggagattggatcggcttcaagacagaagaggcatacgttttggtattctgtgtgattacactctgtcttaatcagctcttcgtctgctctagtcgacatcacaagaaacaacaacagcataaccatgatcatgggattagtcatttctccctagttcttttgataataggtttttgcgtttgatatttggtggtggtgatgctttgatcaggaggtgtttactacttatttaaactacgaaacttgagatttgattggttcacgagtcagtatctcattaatgagggtttatgaggtggttgctagattgtaacctcttttttgccattcatagtgcaagtttcatttaatccaacacaattaatttaagctgctaatcttattttgctcctcttgggtaaattatacgtgctcattaattttgacatctgccacataagagacttgtagctgcgtcttaaggttttgtctaacctacattccagcaaagttccagcaaagtggatatgggctttgattttctaaggttcacagatttcgcagataaacccatattggtggcccagtgggtttggcttgtagagatagtcttttcaaatatataatttcgatggttaaaaatcataaatttataaatttgaaggtgcaacacaaaaaagttttgctaactcaaatgaatatgccatgaagtcaaattcttaatcatcatactttttgataagcaagacttcataaaatcatgaaacattccacaacacaaaccttaaattgtagattattgatgaacaacatttttgaactgtcactaaggcactaattatcagtaactaaatccacaatagcatcaatatattattgccttgtttcattcctcgtcggttgctgaggtggcggacctctgtatccatatcccggtagcggtggaggcggaggcggcatgtaaccataaggtccatatccatgttgacttggtagaggccaagttggcgcatggtggtaaccttaactgaatataacacatgtcccatcgaaccggtacgaaaaagttaaatgaccatttataaatattaatattagaatttaggaaatttaacattatttcgaaatatattatttacatttctgtttatcctaatttctatataagagaatgtaagttgtaacactatttttatgagagtctattataatttcttcatataaatattttgtgttatttactctcatcaaatgtatcatggtatcaaagtcttgatccaaattcttatgggttaacatttttttattttccgccaaaaaacaaaagagagacgtgatctgaaatcatgataagtttgatgaaactaaaaaatacataagtttttagggaagaattataatttactttcataaaaataatgttaacccataggagacccataaaaattttgattaaggctctgatacgatgtggtatataagttttaaattcactttttcaataactgaatgtcaaatggaaaatgcatcagttattgatttactataattagattcattatcaaataacaaaaaattcaaattgtccatcattgatgaacaacatttttcatttcactaaggcactaactgattaatgacaatgctgaaaagaaattatcgataaattttgactgattattgaaaaaaaggaaaaaaatattagtgattattgaaattttgactgattattgaaaaaaaggaagaaaatattagtgagtcaaaaaaagaaagaaattttttgacattcatgaatgaaaaaaacataaaatccaatgcattaatttatagataaatttaaaaattgaagatttggatgcatgtacaatatacaaaagtgcatgtattggattatatacacggaaatatatagacttagtttcaagagaaattcagattatatacacaaggatcatttacacaacaagttttgatttgggattgtgagaaatgtgttcggtgagtttgtttattatatatggaacttgagatatggatgttttggccttgcttgatgatgagttttgttgattttgatacttgacagttgacaccaaattttttattttttattttgtttgccatttaccatgttttacctaaactctttcccattatttatttgattcatacaacaaaaagttttatagatctagaaaacaacatccctatgataagttcatgtaaatatgggaaaggaaatgtttagagataacaaaatgaaataaaattcaaagatcataacaatttgcaacatcagacacaatgtctcccaccattaatccaccaaaaagtccggctcccaatccaagcccaatccccatctccttacgttgttgatacgagggacttccgtatccatatcccgacgacacataaccgtacggtccatatccttgtctcggtggtggcgcatagttgttagcgtgaccggtttgcgcatagttattagcgtgaccggtttgctcggtcatcccagcgccatatgatattggaagaagaccacggctagaaccggcggcgaaaggatgtctcaaaagatacggcggctgaggcagcttaggaaactcaattggcaattcgggtggagccgaaggtgcatgctcgatttgagatggtgccgcggagtctacacaactccggttagtgatcactggaacatttggtttaaaccggtacgagaaagacaaagaacctgaccgtttacccgacgaagttctcacctgatacgacatcagtttcatctcatgatcgttaccatcaccgttaaatgatggtgtggttgcattcaagagctcaagtaacgggatgttaactcttccgatttctttgttgcctaggactcgacgagagattactctcatgacaagtgacgaatgaccaccacgggctgacctctcgtccacggaaaatttgatggtttgattccaagtcgggttagatccaccataacgatcaaccgtggttttcgccttttgtttctttcgagtattctcgccgttgatggtgatggcagtgaaaacgttcattttagtgatgagattgacatttaaaaggtttcttgcggagttgatgtttagctctagagttagattcgccataactgtgatgagagcttgacataaactatgcgagtctagcttataacgtttttttaaaatagtcaaataagctaaatgtaggaaaatgtagtaaatgttttcttgagtaaatggaaacaaaagaataagaaattttagctgtcaaaaaaaaaaaagaataagaaattttaaaaggtaatctttatgaaatacagttcatcaaaatgaaatattaaaagttgagaccaattttagtctcatttacaattttcattactacatgtaagatacatacctatattggatataaacaaaaatatgatgactcatttgacatgaggacaaatttatttgtttcaaggaaattatcttatttaatggtgtcaaaaaaacgaaaatatcatttacaaattaaaggagtacataaagaaaatttgttacagctatatagtgaaatcaataatgagaattagttaaatttagggagtcttaaaacataacacgtatcttcgagaatcgagatattggttccttggctcattttatctcaataaaatcgtagtgtctgttcgcttaaatttactgaaatatatatcatgtgtaagtattaatgtacttccaattaaaatttatcagcaatgagttgagatgctaatataggctctttctcattttagatgtaggattcctaactagaatctctcaaaaacgaggtcaccaaacgattcaattccccttagactaaatttactgaagcggagagaccaaaccaaaattcaacttcactaacatttttttgggtcattgagcgtaggagctcctagagattcaatgagtccatgagtcaatgaatgaatagtcttgatcactaaaatgcacatcgtgatgatagcacaatgtcgaccataataaattgaaaaaaacatatacaaaaatgaaacacataataaattacaaatatgtgactgagagtaaagtaagaaaaaattgtctaatttcgtttctttagtttcgtttttgttttttatttaaacaactaagaggttttgggcctaggcacatatattcgttaagaccaggaccaaagcattttagttacgtttagttttacaattatttgttatcatagcaatagttgataaatcacatttgcaatataatgtatggtcatgtaaactcttgttatattgagaaaggaggatgttataagaaaaagaaacacacaaaaaaagtttaaagcacacaacctcacactaaaaaatacaaaatgtccatcaaatctctagagacggccacagtcgtacctagtatgacgaatttgatcacgaccaaacaaaagtaacaacaaagctataaacattagcctcagaacctttgatgacgtttgtagcgaacgtccggtcaaataagtctgcaccgaaagcccgagtaatctcatcctacgttcatccacatactcatcaatagcttcttcaatgtttttcatcgaacaatcctttaacaagtctccgtggtccggaccaactttcctagctagacacctagctaaaacaaccgcatcctctagcgccgctgagccgccctgtgccaagaacggacccatcacgtgcatcgcatcgccggctacagtcactgtcccacgacgaaatttccctaacatgatttccgatggcgctcggtaccttaagtgtgtgagtgttaatgactccacattgcatatttttaccatttctttccaatcttcagacaagtcatcggcccattttcgacacagattcgcaatcgattcttgatctttaccattgtgattattgtcttgcatatgtactagaaaccaaaagacttgattatccgtcaaaggaagccttcctattaagacatttccttgctttatccttagaacctcttgtggaaatccatggccgtttgggtacttagtaaaccctctcaccgcacgacaagcaaacgcctttttcgggtttaactgcaaataatcactgacgatagaattggcaccatcgcatccaatcaggacctatgagagaagaaaaacattatattgcataatttattttatactattgaaagcatacaaaaataaattcttcagtaaatgcaaaagccaaatgtaatatttgcctttgaacaattaatgtctaaataaacaatactgatatttaccttggctttgatgctatttccattggctaagtgaacaaccggaaacaacgtagttttgtcctgctcaatagaaacaatatgagaaccgaaccggatggttcctttcggaagggcatcggataaggcctcaacaagatcgttccttttaatacaacgagcttcgtctctgttttattcaaagtattaaatattcaaatcaataacaaagattacaacaaatcaatagaataaactgcattaaaaactaaatcaaaatactcaaattaactctatagtttttatatttatcatcttcaattttaaggataggaaaattgtgacttacactatatttgaaacgaattctcgtttttttccattctcaatcaacatggtccgtgccctgttcatatccaagaaaggtccataaatcaaaattctaaaacaaacatataatgaataataaagttatggttaaaaaagaataatattacttacttgtgaataagagaagaattgagacgaaggcgatcaccaacgccaagctgtatcaagggctctccaaccattggagagagttccgattccagctccttccgatctcactttctctgctctctccaacaccacactctttattcctttcctacattttaaaaaaaaaatatacacaccaaatattaatttacatatggaattcataaagtttgagtctcattacaaaataaattaataacaaacctatgaagagcaatggaagtggcgagaccagcgattccgccgccgacgataactattccgatttcctccatttcaaagctgagattttcagatctaaagttttgtttggggagttgttttaataatctgtagtcctatagggaacatgtagtatagtgtttttaatttatttatatagagtagaggaacagcgaagacttttcattaagacaattaaattacttgggagacaatcaatttacgtgagtgtggtgggtctttgcgagtcaaacaagcgctctttgtttatgaagtaacttgacctgttgacgcaagcctatgacgccacttacattaactcggcttttggataaaacaactagttccatccaatatcaattttgtgtacttgttgtaatgagtgtgacacaatacttatctttttggcttttcctagtatatcaaaaatctaaactgacaaaaaaaaaatcgatcttctatactattaaacttttgatatatataagaataaagatgggatcatcaaaaaaaacatcttcgaattgagcctttgcaattctggttttctctagataagttttctatcacctccattgattcagcttctacattttgagtgggctactggataatttgacatttctctctacattttcttggttctgtttatgttataatgcagactttaagtcttttatcaactagggtggggtttttgtaacacaaatgatatggacttctcttccttcatcaaaatatacgaaaaatgtatttgaataattattgattatttttggtccaaaaaacttgaatccagaattattaattggattaaaatgtttttgagaatatttttttgcagatgataccgcccataattttcttaaataagtttttgattggacttcttttgtctttcacaactcacaagtgagaaagactaatatcatagttcttttaataatcgaacaaaaattatcagaagcgaacaaacaggaaacattcgcaagaacaatgagtaaccaacctcatgatacaatcatctcacgaagcacacaactctcgcaatttagacagttcgtacataagataaatttatagactgccacaatcatatcgagtatgaccaatttgatcacgaaacagaatcatcaacataactacaagcaatagcttcctaaccggcgaagaagctgctattaaactaccggtaagataagtttgtgtcgaaagccccacgagtctacctcttctttccctaatgtactcatcaattgcttcttctatttgcatccttgaagagaaggaagatacattaattataccgtcttgacctaaatttaacttcctccacaagcatctagccaaaacaacaccgtcctcaagcgcagccgaacatccttgtcctaagaatgggcccattaggtgcatactgtctccggccaactgtcacgggtgccacgtcggaatttttccagacagaacatcccaaggagcacggtaccttaaacggttgatatacaaagagtccatatcacaattcttcaccatctctttccactcttctgagaattcgcggactgatgctagtgccaatcttgcgatatcctcttgattttttaagaagtttgagtctatttataaaacaaattataaatacgttagtgcgttatatgaaaacaatagaagtctatgtatagtatgaaatgtagcatgaccgggttattaattaccttggggacaatttcgcaaaacaacaaaccaaaagacgagtttgtgagttataggaagtcgtccgcttacgacgttgtccatcttgattcttataaactcttgtcggaatccatggtcgttccgggtaatttgtgaaccctctgatggcccgcgaaccgaggtctttagtcgggtttaatcctagaaatctagagactacagaatttgacccatcgcagccaatcaaaacctaaattaaaagaaaagtatattatcaaaatatataagacccatgcatttcatgctaaacatgttgctttcagtgaaaaacaaacaaaacacaaaccattaaaaccgatcacgacccataaatgtcactgtcggctaatataaggtatatactaaaaaaattccactacggcatcacctcaataattgatcaataaatatatctactgttgttaaaacgtgcctttgctttgatagcttctcccgtttttaacgtgcacaatcggaaacgattttgtttcgtcgagcttaaccgacaaaatatggcaaccaagccggagagtgccaagaggaagagcatgagccaaagctcgaaccaagtcgttccttagtacacctcttacttctccataggatgctggtccaaccgattctcttcgtttaatacctttctcgatcaaaacatctcttatcctgttttagtaccataccggaaatcattataactagataaggttagttaaaatataaatatttatatacttactgatgaattgggagagacttaagacgaagctagcttatcggcgacaccaagttgttgaagagcaagccagccgttagtctgaataccaaaatgctgctccttccgatcttacagactctgatctctccaacacaacgctctttatgcccttcctttataatcatatttgtatgtttagttagtcaatagttcatgtatatgttttctaatttaaattaccttataattgagaaaatgaggagattatagtgaacctgtgaagagcaagggaagttgcaagaccagcaatgcctcctcccacgattactatgtccaattcttccattcttctatatttgtatttcctccaaattttatgatcgttatgtcctgcaatgtcgtggacttatatgtgggggttgaagccacatggcaatatggcatgtcgtggttgtaccttgacccgcgtatttttcgttatctatacatattcattcacagcgatttttattggtatttgtcgattcatatatcaattaaactgtgtatcacacagatcgttatatgaaaccaattctgaagagagaaaaaaaagaaaagaaaaatttaagccttcttgtgttagaattactaattttaataatttatttaatatttttactgtattagtgattaaatgtataatttacttaatcttagaagtatatatatatatttaaaacaattattttcttacacgttatacaatatttgtaattaattgtatttatttatattagaaatatatatacctttttctaaaataatatatttttgttttgtcaattgcccttataatattagtaattcattgtatgatttccttataatatttttacacatgaaaaaatctctaactaaacatcttttcaataaactacatgaactatcaaatttgttataactttcagttatcctccaaagtccaaatattcaaagtgaattattcatgggttggatttaacaaaaataataatttcgaggttgaaatgacaatagatatttttaaaacaaaggaccaaagtcgaaataacaaaactcatcggccgcattaggtttggtcctaaatccctaaaaccctaaaaaaacacaatccctcttagaaacagagagcttctcttctttctccattattcatcactttcttccccgaagatgcgtcctttagacgagaccgagacaaccgtcgtcttcgagaagctcttcaaattcgtcggcaacaacctcaagaagatcgtcgagaacccatcagacgaaggacccgaatctacacccggcagctactgcttccgcctccagaaaaacagagtctactacgtcagcgaagccctcgtgaagcgagccacaaacatctcaggaaaaacctagtctcttcggaacctgcatcgggaaatacactcacgccggtagtttccatctgacgattatgtcactcaatatcttggcggcgaatgctaaacacaaggtatggcttaaacccacttcggagatgtcgtttctttatgggaaccatgtcttgaaaggtggattagggaggattactgatagtattgttcctggagatggtgttgttgtgttctcgatgtctgatgttccgttagggtttgggattgctgcgaagagtacacaggattgtaggaaattggatcctaatggtattgttgtgcttcatcaggctgatattggagagtatttgaggggtgaagatgacctttgaaagtttaaaggttttgtctttgttgtgtcttagtttgattctgcttgttgctttgagttttaaagtatgtagctgttacaagtttcgtggaacttggttctggatctatgaaagtctcgatttttataaatctgtttttgaggtgttttgtgagactcttgagtatgtaaaagctaaaaaatttacattcatatgcgaattttcaaatctgtaacctgatgatcaagatttgtattggagacaggttgagtttcctgatattgctttgatttttatacttaaaagcttcaaattcttcatcaagcttgaaactttggaaatttacatacatatgctaattttcaaatctgtaaccctaatgattcagatatgtgttggagacagattgattatgctgatttttgagacagattgattatgctgatttttgagacagattgattatgctgatttttctttggttttatagtccaaaagcttcaaattgttttcaagcttcaaactttggcctttgagtattaagggtatgtgactgtcacaaattttgtggaacatggtattgtatctatgaaagtctcaattgttctcaaacaagagtatcgagaagctacaattgtaagctgatgaatcagttttctgtatggaaacagattgcttgctttgatttaaaacttcaaaacttattactgggcatataggttgtgtactgctgccaaataatctggagaagagatgtttaaaccaattaagttctgaaatctttctgaaacagattgcataactttttgggaaagatattgagggtgttctttgaataaatatgttgtacactgaaaatttcccacattaagagtaggggattgatattcatcatcttttcaaacgtaatcttgtaaagttcaacttcaacccaaagtcttggcctttgtacgtttgttcctcacttgggaattgggatgcaaagctgtgttgcaaaatgtttagaaataatatttactgttatatagtttttctggtatcattagtcacaaagcccgtctagctcagttggtagagcgcaaggctcttaaccttgtggtcgtgggttcgagccccacggtgggcgctttgtttttgtttttttaatccaaatttgatcatattctgattttagttttgagtaccttgactagtgactcttgagcatgtgttttatgcaagttttaagatatcctcgcctttaattacgctacgtagaatatgtgaattagtatggtacacccaaagaaagaacacaaatactttatataataatacaacatccaaagtcaaaaccttacaatacatatggtaccattttgttcccctctctctctctttactaatctctctactgaagacttttgtctctgtttgtcgcctgtctccgccaaaagctctaagtctctaaccatcacgtagagtaatttgttgtgtcttcaatccgtgcaattaaatccatgacaaaccgatatccagattatgagaacaagtagtagcaagatcccaagaacccaccagttttatcttcatgttctggtaaccacaaatttcctcctccacctgtgtcccttggttttcttgtattcccgcgccttaaagtatacaaattaacccttacattaaaatggctatcacggaaggtctatgaatttaatgtttggagtcaagtttgcctttacctgagagcgtagattctcggtcttgtcagtaagaactgttagattttcccctctgtcgattgcctgaaaatggatcaacaatattggaggtgtataaagcacagtgatttttgcagacttatcattgtaaaaggtaaagcaaaggagaatgatttgttgcttgtcttaagtgtggagaaagacataagagagtcaaatgatgagcattaccttgtcaatattctccaacattatacttttaacttctgaaacctgagccttgacttttattagtttttcaatctcctctgcatggtcaacaatataattcatgtgttccttcatcaccggcctgcaatattttaattttaccattaccttgtattcaatatattatagaacattttcctcaaatattgaaatgttttctaagtacccgaactccttgttgagacttttggcgatagctgtacttgcttttccacctccatatctcttcttgaaatcagctttcacacgctccagaaatgcgatcgagatttgcttgctaagagaatctttcgccacaacacaatatgctgaataagaaatttcaaagagccaccatatataagtgaaatgcaatccaaaccataacaaattattttgaaacacatgtgtgtagtttcatctccaaaccataacaaatacaactacatacagaaagaaagacacaaacatctccaatccgcatcacgtaaaggtatcaccaataataagacgcgtaatgtattcatcataaaaactaaactaccaaacactgaaagaattttgagactgcttagttactaattgaatctcccaagagaacaaactccacaaaaacatatcaagattcatgattagataacactttacttaatttgttgatggaaaaaattcttttttgattagatatatgtgcttaattggtatttacaaagtggaaaccaaacaaaatcagtaaaaaagttaaatcaatctaagctcaaatctcaatggaactaatacacaaaacactgttgtatcgccaagtaatgcgaatccaatctatgaagatcctgaaaatgccttaagtttcagatgatgcatatcagctaaccctgagctagatccatcaaaaccttaatggcttcaaactaaaaacattgttcgtttccagagaagaagatagagagagtgaccaaccgtaggcatcttcgacaaggaaattgaaggtatggtgatcgcagttgtaagtgaacttgctgttgctggaggacggaagcttctggagacactgagcagcaatagacgggaaattgcctgtgaattcggtatactcggcgaggatcatagttcctctggcgacgaagctatagataaacgattcttgacccattttgagtcgccaccgagtatggaaccgagttggctcagacagagagaaagagaaagagaaagagagtctttttattctttctttacctttgctgcaaagaaaccaagtactttgcccgtgactcaactcaactacatttcttagtttttatttttaattttcctttttgtatactaaattaaataattttttctttttttggtaggaaaattaaatattttttttcttcatattaaatttgtgttattatttataaatctaatacaattcaaaaaagcgaagatgcatcttaaatttcggcaggaaataagtgtgaaatactcacaaagtcaatatcaatctatgaaaacaatagtattttgatgctttttaaaacacaaaaaaatgtaaaacttatgcatagtgaataaatgaaaaagaaatgaatatacagaataaaataaattctggggaaaacaaccctatcacataaaataaattttgaaatgttgtcatattttattaattttttgttttttgaaattttgagtgtggctcgcaacgacatcactaatttattctcatgtttgtttgtttctcactttaccaatctcacttacagatcttccttcttcttcctcttcctcttccttcttccttaaaccctacaagcttctactctattgacaaatttgattccgagtttacatcgataatggcggaccaaacctccgattcaacatctcccgtggctcctctctccgtatcttctcctactgctactgtaaactctctcaatttctctttaatcgctttaattttacgcttcatggacgcggacgtagtctcggagctctaggtttctgaattttaggttcaaaatgagattaatataatttggtttttgatctaatttatctagggtttcgagtttagatatggcatttcggacctagatctgtgttttgtctgcaacttcgaacatatcattgtgttctgtattctcgattcgaattcaagtggtatagtatagaagaaggtttcgtttcttccgatttttgcctgaaattttactcttattactgtgtatttttatgtttttgttggaattgtctgaatttatcgttccacggatttaacaatttcagattctgattacattgatgttgagttgattcacatgcaaagctttttacctttggtggatcttgggctatcactgtgtagtatctctttagatttgaagtcagatttggatcgtgagccattactgtgtagtatatctttagttctgtgcaattaacaacaatctcacattggtcttaaagcatacttttcttgtttatatatatatatataacaggcttatgattttggtttgtacagcttaagagttataatatctgtttccctgtggaattgtttttaagtggttaaattgaaattgatgttgatcttggttgttctttctgctgcagaagaaagataataccaatcctgttgattcgaagctcacggtacgtcgctgtgttgttagatactattagtgtttttagtcaaatcttctgatcaagcggtttttctcaagtcttgatttcgttttatgtaggaattgaatgaatcaagggctgagttactaaacaggatccagaatctgaaacaggttttaacactttcattctcatctctgacattgtcatgttgttttagaacatctgttgtctttttaaaacaaaccaatctttatatcttatcgtcgcaggacttgcaaagttggagaggtaaattggacactcaagttaaagtctaccgtgaggtgagttccatatctagtcctctttatccattttgtggtatcaagcaagagaattgctgttttagccgggatcagtttgaactgttttgacattcgatgtatactcttccttggttttttacaggagctctctgggctaaagaagactctgaatcttgaagttgagcagcttcgtgaggtatgtatgtatattgagccagcagccacatgaatatttaaacggtttctattcatgatacatgtttgattcgttttgtctccataaaaactaggaattcaaagatctgaaaactaccttgaatcaacagcaagatgatgtttccgctagcctgaaaagcttaggcgtgagtctctcgtgatacactcttcttcctaaaagtattttcaatattataacccaaagaaaagaccggtttttagacttgcagaaactaatctatggttctcctccacgattatctgttttgtgctttgcagctacaagattcaaaagagcaaattgataagagaagtgaggtgacagaagagaaagtggaagctctatcgactgatgataatgccaaagaagcagaacattagataatatgaaaattgtttgttcttatgatattctcgccactactgttaccactaccttgagattgtactagtatgcttaatatgtagttccgcggtttagttgattctaatgatgcaccatgacacaatggtttgctgcagattgatatgtcaacaagttgatacagaaccaactcgtgtacagatctcaaaaccgagcttcctcctctgttcttgacaccatgatagagtgaaattgtgaaatgaagctcccaaatcagatattcagaaatttccataaaccaatgaacaaaccggtttggtctagaatacaaaaccaacctatttcgaataattcgttgatcataatttgcattctccaaattcaaagaacatagaagcttttaattttaataaatcgatcaatcaatgaaccaacaaccaagctttttttatatatatatatattcatcttatttcttttcattcctttttttttggggggcaaaattcttttcattcattcaaaatttatcaattccactaatttcaaattcgagccttatataaaatttctttcatttagttggtagcatattcaagtaaaatgcgtcacatataatattgtcattcatctcttatcctaatttaataaaaaataaaaagtcaaaaacgaaaatttagactttagtgggaaaagcgcgttaaacaacttttagtgtcaagtggcataaatcgtaaataatataaatcctagtggcaatttcaataactcattctcttttaaaccatttctttctctttcttcaataaaacttttgaaacctccaaaaaaaaaaacctcagagaaagaagaagaaagaaacaatgagaggactctccacaaaacccgttgcgataatcatcgcaattctcaccgtccacttcttattcgccgccgtaacctcccaatcctccggcgatttcgtaccgatcgagtcgaaatgcaacggtaccatcgccgagtgctccttatccacggcggaggaagagttcgagatggactctgagatcaacaggcgtattttagcaacaacgaagtatataagctacggtgcgctgaggagaaacacagttccttgctcacgacgcggcgcatcttactacaattgccgacgtggagctcaggctaatccttactctcgtggctgtagcgctattactcgttgcaggcgataatctctttctctatgtactttaaaatttttactctcaaattcttttgttttgatttttatacaatttttcagattattatttgttttgattggtgtttactatgtttatactttgcattgcaatatagtttcatacagtctcaatataagtttgatatatgaacagaaatatatatagatgtattatacatttctgattaatatatcaaatgttatgtatgggtgctttttgcatgtgctgaagaaaaaaccaggtgttcatattggaatttatatggatattaaaattgtagttgtttcatttttttttgtatgaagggaaatatttgtatgattggggaagaaatcaaatttggtattttccttattttatcgggttgaataatgagatagtgtattaagagaaatagtattaaatgtggagaagtgggaaaataagagaagaggcaataattggtatttggttggggccaactaaagggggagcttcacatggcaaatactttcgccagaaaccacacacacgtggcgtatttattacgtttttttcttcttcttataatcttatgtattcgattcatttatttaaaactaatacaaattacattaaagtctatcagcaatatgtcaaaagaatctgagtcatggagccacttggaggagaaaaattgtcaaaactcaaaagagaagaaaacgttacacaatgtaaagatgatgagaaaagaaaatagggggaagacactaaattttctccccataattagagggaggctgttttggagaaaaaatagtcaaaacaaaataacaaagcattgatattcgaagatacactttatttgctcctccggggtcctcaaggggctttgtcacagagagataaaaaccaaagttttggagaaaaggggttttggaccgcaaactcatacctcatgacaagcataaaccaactcatcaccagttgtttattgatttattcgataatgatagtcttgtgactacttttctatctagtgtgtttctttgaaaccttgcaattttcaacattttaaacaacttttgtttttagttgtaaacgcaggctaaacatatcctctttgaaaatatattcacattgggcaaaaatagactgttaaaaaatttctaccgacctttttcatgtaaacacaaatgcgaaataatcaaagcctaatacagctatgagagtcgagtttgataaatcgatcagtctaactatggctcctatactttaaccttttctaaattcaaaatctgaaaaaataaaaccggaatcaaacccaaaaatggaacaatgaacttggtttgtctattccccctgataagtggcgtttaagtatcgacagtaatatgaattataggagcataagaagacttcttagttctctcaagaccaaaatagaaatgcaattcataggtggagaataatgtaatgcaccacatcatcaatctatttgatgaactttaataaacaacaaactcgtttcttaaaacaggaattttaaaagtaatactgcctgctcttaacatatttcatagtttttctttttccttcggacatgtcaatgaacaccacattcctttttaagaggaactagccggtgttttgggttcatcgcctgatttggaggctggaggaggagtgcccttctaactcccatctcggctcttagatcattgatgctttgctccccagctcattgattctgccctcccatgtcatcaagtgacccatcaaatcaaaatcaaagtcaaggagatcaaaaccaatgtcatgaacacaagattgctgatcaaagagttaccacagattacaaacttgtatcagttcatggtgataaagttgcttttgtttagaatatatagcgagcagaagaacaagcatgcatataatagcaacttaacaagagaaaataccatagaaccatgtgctactacccatagaatagacatttagactctcaagaaatactttaatcagaaaaatagacagattctaatgataattctcaatacctagtactaaacttctttccttgaagacacaaataatcaatcatcattactggttctaggagggaaacatttcatatattctacttcaagcaacactcaagtaaaaccacagattgatataaggatattctttgtgatgatggagtccgacattgtctggaacctggtttgctgaaacacacaaatgtgaccaaatttaatcaaaatctacctattgaaggtataattccaaggcctacgaagacataaaagctgaaaaacctaccatctgctggagaagattttggacctgcatataaaaattcaaggattcagtgataaaccaagtgaaattgtctcaaagtcacaaaaataccaaacaaagagaacgagaatactcacaaaagcagtcatatcagcagtgctctgcttagtatcctcagaatcatgaccatcctgtcagcaaaagaaaaaaaaaactgtaagaagaaactcaaagacacagtaaatataacaatcatcaggacaagaaattgaagctttatactaacgaaaaaaaattgttacaaggaaagaaacaagcatgaactattgcccattgagaatatttctatctgaactttcttagtactactagcattacacacagcaaactcgatacatgaacatttctaagtaagaaaaaggacgaaaaagttaacttatactgaatctccccatcagatcctggacttcacgatactagagttcttgaaaagccgaattcacaagttcaaaatccacagatgaaaacagaaaatcgagcaaatgcaaaatcttattgtaacccagcaaaagatgctctaaatcgtccagatttcactataaactcaacatttcgataattgatctacaataacagaacaaccataagaatatcatgcgagattcccactaaaccgtaaaaaaacctaatccgaagatatatccttaaatgcaatcgacaaatccgaataaacgagcctaggtttcgtgaacgaaaacgcaaaatcgaaaaagcgcaatgatattaggaggcggatatttaccatttttagggttttcttgcgagtgatcggaaaactggagaaattttgatttcagcgaaaagcgatgagagacgacggaggagaagagtgatgcgatgtttataaaacgagaagagaaacgctgttactgttaaccccaaccttataggtatacaatgtccaaaatgccccctctttactttagtttctatcgttatgattcgattgggtgggatcatgtgtgtgtgattcaaatttcaaatatttttatgtacgtttggtattgagatctagatcttaggatgattcaaatcattattgtggatgttcaaatctgcaaacatttatttgtaatcatcttatttgtaaatttggcttaactttttgttcctcttgatgattaaaggcagaccaattcgaattgtgttgtataacgacttatctcactaatggcataaaccctgacacattgatgactgaagtatgtagatttggaacagcctatttgtttcttaccatcaatagatatattaacgaggttgttgaacactatcatgattttacaagagaaatgaaacacatgatttatataattatatgattacaaccaaaagacatacataagcatcttatctccatgtgagagattctaatcctccacaacccaatagaggaagaagtaacaaacctgaccacaagacaatcaggagacaagtgaaatgttgcttatcctcacaccattggtatttgatatagttaattttcgtgtattatcaatggaatacaaaagacacgacgatcacatctgatatgttacaacttctacaacaagagcaaattccaattttaaatatcttttccagaagtgaatacggatatcaacataggaaccaaacctaaaacagacatggagcctctcatcctcaccaagatcttcccttcttcttgtacatttcttctacagtctcggcttccaatggaaaaccctgcgtgcacatcagatgtatctagatagataccgaacctttttgttgcttggaatccaagtcttcctcttctggttcttacacgaccaagtacagttcctttttcatgttgtctctccacgtcttctgattcttgattctccacgagaagtgtttcttgctcgagacattcttgactctgttcgtcccatataatttcagggtaagaatccagtaatttccttttcttctcctccaaatcatcatgtgaatgagaagtgtgccctgagttaagtaacacattccacaaggaacagaatagagtgaaagagctaagctgggagccaaagacaccggccttttctacatcggtattctgcttttgcaaagaaccggctttagaccggatcttaactgagcaacataagatcagcaagttcaatctccaatccgaacatgtagattcgctgcttttgtttgcggagaagaagctcatgttgttctctgccagaacaattcctaggcatcttgctctggtctatacagcttaactctggaactgcttgtctgattgattgatgcataagagaagatctctgagaaataaactccttgtagcttaaagaatctacaacatcggaagctgcatgagttagaaccacgatagcatttttccatattgacgagcccagggaactggtgatgattttaagtaaacggatgtctggagtgtcatctagacggtcaatatagaggtgatatcaactgggaactttctcatgcttttctttattgacataaggacttcctgattaaactgttcctcagttgcagaggacaagagtcctggcgtatcaagtatacttatctggattcctcctacattcccaacaacataatttgcagagttagtggtaactccaaatgcaccaacagcagatttagtctccccaaaaatagaattaaccgttgcactttttcccaccccagttttcccgataacaaggacgttaatggagaagtctagatcagctggaaactcttgttcaggcagcactatctttgttccgtcaaacatgtgatcaagccctaaggacgttggatgttctccaccagctaggctcatcttagacgcaactttagtaacagttgaattttcacggctaagacatgttcttcttataatcctctggagcttttccttcaagagctgagtcttctcaactctttccttcactctctcacttatcagctccacagaatgattagaggataatagttctgaagaattctggaaactggatccagtgagtttctcacttgtatcacctgttccttcgtactcgtcaagctccataaaagtgtgattatgaatcagccgtgccatcgtctcattttccattatatcataagcaattacggaagagttttcaggcatggtcctctcaatgtctttaacagaaagcaaactggtttcttctatgcccactgagatttggtttgcttcgctatcagactgaaaattgacctgcttattaattgattcccatcttccacagtctcattggctgtttcaaaggaacttattaaacttgatgctctatcttcatcaggaagtgacaacttcctatcagtatcgtctgattcttgatttccttcattttcagattcttcttcagctttttgatcggaagaaccacaaccaattacaacgacatctattcctccagcgacctcaaggttcattatcatttcagaatctgaagttggagttaactgaaaactttcagaactcataccaatttcaggttcatccgcgcactcaagtttttctaattcgctaacagcaccacgatcattttcacagtgttcttctgccttgcctatcatatttccagcgtctttatcccctgagtctctgctttctgatccaatagactcgtcacgtggaattatcaattcatctgcatcacagacactaccaacatcagttctgttattgctctccttgctggtactagcttgacccaccccttgttcgacaaggctgcttacagtttcatctaatcctttatcctcatcaacagcgtttccttcactttccaccagaaactccttgcattcacctgtcataacaccaagactactctcaaaagacactaacacattgtcagaagatttctcttgtaccataacttcctctatggatacaagttcacctatattagaacctgcgtattctggtttatcattcattcccatttttgctaattcaactgcactatcttctactctttctacatcacttggcttcatcaatgcgtcaaattcatgaatgctaccaccactatcctccttgttgatggtacttttactatcccctttctcgatgagttgcttgaaattttgacccaattctatactcgcctcactagagttcccttcattttctgccataaaatcactagaaccttctggtggaacaccgagacttgattcttcaatattcccaaaggacatcaaaccatcatctaatttatctgaatagttcattctcacctcttcagaatcaacatcacctataaaagaatccgaacactctggttcataaccactcccttatctcaaaactgcgaccctctatcttcaacttcagcttcttcatcacctggagccttagttacacccaacaggacagcctcttcatcatactacccaaaatttcatcaaactcatcatcatccaaagacaaaacagcccgaggaatgactacttttgctttcatactacctctttcatctccactaacttcactctcgcaaacctcatcactgttctcaccatcttcctcccaaagacgagtaattcaccgacgtttcctcgtcaacatcacctgcaaatggtctataaatcccactcccacctgaaattcacttccatctccacctaactcttcccctagtagcctatctaccctaaccccatccaaaaccacatcctctaacacagtctcatcttcatcagtctcaaaatcaagtccattactataactactagcttcactacttgctgagttatgttcatcagttacagtaccagtatcatcatcatcctcatcaattgtaacaggtgcacgaattggaacagacccagcagatgaaaacgaacccagagagagtacgcgtgagaagaaacgaatcagctcttgccgccgcaatcgctctcaccgcagaaattgaaacgcgaggtttctccgaatcgaccgttgctgcagcgagaattgaaacaatcccaggcttctccgattccataaaaccaaaagcttccaaatatacaaaagatgtattttgtagttttctgtttgtctttaacagtatttttagggtttaattaggatttatgtgaagcttttgtggctatggaagtgatagtgtggaagacgaaacaaccacagagaagagtgagagcgatgatgctacataacaggcggctcaagacaaaattaaagattttgcataatcattcacttttggggtcaatattgaaactttcaaatttgaaagaggaatatacgaatattttaaaatgtttggggcttatttgttattactatttttttttttttttttttttcaatgtggctaataagaaactctcagtctcagtggctgaccatccccgccgtagccatggcagttttccgatgcgccgtctttttatctccttcgagtttccttccgtcgtactccaccggaaggagagtttctgtaaaagttatccggtgttcttcggcttcgattccgttctgtcgaagtcatcaaaaggaaaattacctgcgacccaaaatccttagaaccctaaatccaaagctcaagagacagtcataatcggaatcgaaacgccggaaaatgatccttcaagcgacgtagtttctgatgtagaggagattcaggtcttaagtagctcggttgtgtcaaatgaggtaaatggtatatcaactaagatctctccgaagttagtagcgaagtatggattgtggttgatcggaatattcgcttttcaaactgtttgtgctgttttgtttctgggagactcaacgaaatccgagaaaacgccggaagtttcaagtgatagtgagggtaacaatttggttttgctagaggatgttgaaatgaatgagaagattgcagagatcagaatgatggcacgtgaagcacataaaagtgagggtaagcaagaagaagatgatgaaactgggattgatattgagaaagagatagaagcaagattgtctaacatggagaaacggttgaattcacagaggaaaggtttggcgggattgcgcgtagaaccgttggatgaatctggaaatgatgagaaaagtttgatgtttgagaagaagtacaagtttaaagctgagaagcctccgatgggtaatgtaaaaggctttggtggaagtaaaggaagtgatgagattatgtctgggactgagaagacggggaaaaatggaagtgctagtgaatcacgagacggtgagaagaatcctgaagaacaactacaagagtcagtattccgagatggtttctggtaggttttagaataagtgcataatcctgcaacaacgtcttgtttaagtacattgatgagttgtgataatatggaagaacaaatagtgctgttagggatgtaccgaatagatattggattgtctagcgatgaatatgagatttagtagactggaaagaacgtgtagctatttttgacttgaagtgcatgcaaagttgagcttgtgtagtataactatatggaatatgctaactagtcttgaagaggaaatattttgcaatcttcagcttatcttaaaattttaggtgctgctcaggattctgagcaaagacgaccatcaaacgaagttaagaagtcaagaatatctggaaatcgagtgggcggaacaccaaatatgaaagctggttctggatttggtagcacttcattgtcagagaaacatggagacgtcaggaaaggaacaccattgagaagagcaaaggagaaacaatctgagaaagagaataaattgtggtggctcaagcttccctatgtgctggtaggtaaataatattggatttttggttaaaaagctttctttgccagatccaattattaattcacaatcaagaacgaactatcacaaaatattatgagccagacacttaccgttttctcttttcttcagagaattctcatgcggagtaatatcgatcaagacatatctgagggatattttaccttgaggaccgaatctatggaacaaaatgagggtcaagtttcacatatgattgcatttgaagatcaaagtgatgctagaaacttctcttatctgcttgaatcagtttttgaagacttggatgatttcagtgccgatatagctcccgtaacaaccaaggtagatagttcatttctttaccaacttgattcttctttattaatgtctgtatctgtgaagtttacttgtttaggagaattttgttccttaaacccttaatttctcttcatgatctgagagtatactgaattctaagagcagtgagatcgtatttttatttataggatctttatgaggaagttagttctggtggcaagaatgtgatagttgtgaggaagaggcagcttacgttgtatgctggacaaccatttgaagacgttgaaagagctttgcgaactctgattcaagaacgaagatgaaaaaagtaacaacattacttcggactgaaaaaactagagagcccagagatgatcaatgtggagatgacaggggcagtaagaacaatggttccacaacaacaatttttcatgaagcttaaagaaccactgagcttctgttgtattatggtagtagcattggaattgagaggacagatccactagaaataaaaaagattgtttatatcatgtaaaaacgtattttacatgaatcagagagaacaacattttcatcttcagaattttattgagatgcaacgatcttgatcatggcttgtgcattaagccctgttacattcttctcacaaaacttcttccaagcttcttgcttgcttccttcttcgtcttcttcttcattccatgtaaatttctcgaaaagcgagttcaccatactccttgcagcttcccttgcctctggcaacttgtcactcaactgatccgcagccatttgtgcgagcagaatcatcccaaattcttccatttcatttacctcctgataacaaacatagagacaaatatatcaatcacacaattcaagaaaataataactttgctctgagcattttaatcattgttgaagaattcaaaataccattttagaaacgcagttggaagtagacacagcagctttggccctgacacgagggttactgtgacggacataactctgaagcttacgcagaagcggcaagcgagccaccgagttaaccatcgtgttcagcgctttctctgcttcttcacacacaaacttcttgtcttgtgaagctttcatcagcaactgcaacagctgttattttcaccatcaagataccaaaatcaaactttattattaaatcaacaatccatagccaatcaaaaagctaaactaaccggaaaaaacaaaaaacaaaaatcaattttaccagatcgtccatagatttcaaatgaggtccttccagcaacttttctccataagcagtgaagatatcagaacaagtcataatcgaagtcttgcacaatgcacttctaggattcttcatcgccttcaccatcacaactataagcttttctctacaaattgacaaaaacaaaatcatcaccaagaaactccataagatttcagattctggtcaaaaaataaaaaatactcacagaattggtagcaacagagaagagtgatgaattgcaaatctccttgtgttgttcaatgagtcacatactttaatccaatcctttgatgctaattcttcaagtaatctctgtgatagattgaatcaataatcatcaaaaacaaattactacacataaattcagaatcaattgagaaatttaattacctggacagaagattcaggatctgaaaatggtttgagattctcagaagcaacgtattcgacggtcgattcagccacagcgacagggttgttttcgtcatttagaccaatctccggttgctttgagagtttggccagcttcttaggtcgttcctgtgagatcggaagagcgttttcaatgttcctcaacgccattagagataagagaaagagagagattttgatttgaaattcgttaggggaataataatcaatggtggggttgaaaagcttaatataaagagaaatttttgttacctttttcgcattttatattcaaaaattcaagaggaaaaaaagcaaaagaccgttggtaaggttttggctccaacggtcacaagcatcggttcggtttacatgaattagattcggttatctggtttattgttcaattcacacgacgtcgtttcataacttttaagaaacgacagcgtctaagttatcacttttgcgccacacgcgagtgagagctaagctaattctccgtcttcaatggcttttctcttttccccaattgaaattgaatctattccctagaacaaattgattgtgaatccggcgtcatttttgatggaccaagagtatcgaaactctagaacgacggtgacgcaccaccaacatcatcatcaaatgagaatgacggttccaccaccaccgtctcctcaaccatcgccaccggttcttcctcatgctgaaagtgatcagagtacctcggagcttcgttctctcgattgtaatcttacttctttatgcgatcatattcaatccgaaggtttcggctctggtgcgttttctgacgttgttgttaaagctatgggatccagttaccatctccaccgcttgattctatctcgcagctcctacttcaggtgaattttttgaatattgaatttctgtgggaggattttgatattcaggttttgcaatttgttttaaactatgcaattttgcttaaggactatgctgcaaggtccatggaaagaagctagctctcctgttgtgaacttacttgtggatgataaaaatgttaatggagacgcaatttctgttgctttagcttatctgtatgggtaccatccctaagctggatgatgataatgcctttcgtgttttagctgctgcttcttttcttgaccttcaggtatgattaattcttatgattgcatcaaaagatagtttcttttggatcaattgatctaataactagtggcttttgtctgacaggatttgtgtgcgatatgcactgattttattatttctgagctgaggacttcaaacttcctggcatatcaggtttgagaatctcagtcatgtgtttattttagcctcattggtctccgtgattcttgagtatacagagcttcttcgacttgtgacttaggtatttgctgagagccaagactatggcattcatggagaacgtgtaaggaatgcttgctggggttatctctgtcaaagtggtgccgtggaactgagagaggtaatataatgtctatgctttagactgacattatgatttttatgtagttagtgatggcctcgtttcttttgggtgtatgtcaaaaaagcaaaagtatccccattttagaaatatgccgttctacctatgtcttgaacgtcttccatcctatatgtcattctatctcgaaagcatctgataatgaaaacgaagagtgttcaacctagtgtttagttagaataaaaaagtattctagttctgaattgctacttatttagttattttatcacattttatggtcagatgctgccgaaactctcagcacagactctatgtgcattgctgacatctgatgaactatgggtgcctagtgaagaaaaacggtatagtgaattgcatactctaactgtattatggtttcatactgtatttgcatctagaaatttctataaaccgtttctttccatgtcaaaaaggtttgaactggcattgtacgccttcatagcaaatagtgctctctccaactcagatcattccaatcaagattccagatttgagagagagacaagctttcctttggattctgctatatcaaaggggaaaaatgtgatggatgatttctctttcaggagtttggactgtaagttaggtcatttagatatagaagccgacctacgagatgctagtgatgatgtgattgttccactcacagaaggtgttattgatttccaaagaggtgtttcaggttcaaacctcgtgtttcagcaatcttctaactcacaaacgaattttggtcgtccttgcaccagtgttgttgataagacagaaggcagtgtggtggcaattgaaggaccttctgaagaagcataccatttgagtaatgatagttggttatcaggagcagactctagaaattctcctactttaggttcttcctctgatggtttcgttgtcaatgagtggggtaactgtggtgtttctgctctaacctggggtggacgggttgtggggacaagacagggtacaggctctgttaaaggaaaatatgaatttactgaggaagaatacagtgcatttgtcaacacttttgaaggtggttcacttctgtattgcaatatgtcttttgaaatactattgaacgcaagaaaagaacttgaagagttgggtttcccttgtaaagccgtgaatgatggcctctggttgcaggttcgttgtccttaaacttgctttgctttctcattcagccagttgtagaaatgttgggatggttgatgtgcttagcgttgatacatttgacttaaggcatttacatgagcaattctagtctagtgtttcatgttagattacaaatgcaataatattgttaataaatgcaataatgtttatgtgtttgactacatttcagatgcttctcagtcaaagggtgcaggaagttgctgccaacacatgcaaaaggtgttgccttatcagtattgcatgtgcgtgtaaacaaggatttggggtttcacatggtgcaaccttcaacaattattattgccaagaaaacgtgcagaacaatatgatgggagacatggataacgtatatgtgccggaatcttctcaaggcgatgggataggcatctttaagcctgtcaggatcagtgtcagaggacaacatattgatggacttaccggcattggatgcgaagctacatttgtaccaccacctgcttggcctcctactccttttgtgtactctcgtgtccctattaacagaaatggtcagcaatctattgctagtgatggttctgaaggtagaattgatcagagtggagaaatttcaaaagatgggctgacagctcttgttgggttgagccaagggacaagcggtgttggtaacaatcctcgtggagaacaaactgagggagggcgtggcagtggagctactgttggaatgtcagaaccaaaggaaccttcagtaggtactgagtgggagaacgcaagttgtaccatatcacttgatacaaagacacctttgtgtcactttcctccctttcgttttgggtaacgtttccagccttatttacttgtaaacaacactcttggtttattccaattgcggtgactccttgatttgtcctgtttggcaaaatagttcctctcagatgtgtctttttcattgctgcagagttgaatttgaagatgtccacagactcgctaacggtcatgtagagcattctcctgaattcttctatgctggttctctgtggaaggtatcagaaactcacaactaagtcgtcaagcttttctcttcgagctgttcttgctttctaagaatgaaatatgggttttgataagatgttttaataccatatccagattagcatacaggctttcaatgatgaagatcctcaaggacgccgaactatcggtaacccgagttaacacaatgacaagatcacatgttttcctcacgttagattggtctgtcatagtatacataactttgataatcaatatctacaggattatttcttcaccgccgcgaagcagagatagtggattcagtaaggaaggttagttttctgtggtctattgttataaaagagctgtttagagctacttaaattgtcatgtcttgtgaaataacaatctcttctgccacattcaggtccatgtttacatagatcctcgtgacaaagtgactgcacgttaccaggtatgttacaaatatctatttgcaagttctcgttgaaattcatataagattccatttctaaccccttgttttgatgcatctagtcatggtttcctcataagttatatcattttcattgttcttgtagcttatctgcccgtcgaaaagagaagtgatgttgtttgggagctttaaacagagaggaactcttctgcctaaagctcccaaagggtggggatggcgcaccgcactgctctttgatgagctctcggaacttctccagaacggtgctctgagagtggctgctgttgttcagctcgtttagaggtgtcttaaacccgagagttgtatgtaaaaaaactcaacaaaatccacattttgaagttaaccctcttaataaatagtatatattctacttccttaaactgtggatgtgtttgtataaatgagtcacagaaactatttgagagaaatatcaagttttcagaataagaatgtctttttatataacagtcaactgcatcatccaacaattggagaatccaaggaggagagccaagatcagggtacgacaacatctacaaagtaccaaacataagtaacatacaacacattctaacactaaagaacagcgacaaaatggtaacttggtaatagcaaaaacataacaactctcaataagaccaaacacaaacggcgtagtttaatcaataataatgaaccggaacctaccggttcaagcaatcggttcatggttaacaattaacaagtaaatgtaaaaccctattggtacacccttgccggagagaagcttttgtctcaccactcaccgtcacaacttgtgcttcctctcgtcctcgtcgccgtcgtcagagagaaaacgattaaagctggtggtatggggagagataaagaagattaagacagagatggattcggttgttccatggatgagagctccggttgacgtcagcaatgtcgaaaactgcgctctcgataccctcccttgccttaatcccaagtaaacatcgtttatctgtttaaaagtttttcgttttgattgaattatctttctgtttacgacttttgactgaaacttgggcttcgggaaatctaggcaacacaacagcgttttgaccttactatgtcaaagttgttcgtttctaaaggttaaattttgatttggttgcagttagagatttctcgagttattatttgctctttcgaattggagtattagatactcaaatagtatacacttctgttaatactgaagtaaaacacctccaaatttgcttagtgttaaactgatgttctgtctcttgctcttcttcttcttagatcaatttcttgtttgaaaattttaccatatacttacaatattcatacgagtaagaagaactgttttggatcacttggtgcgtgatgaatgcctcatttttcaagttttgatgtgataggttgaagaaggcattggagaacatgggcatatcttcactatttccagtgcaagttgcagtttggcatgaaactatagggccaggtggttttgaaagagacatctgtgttaactctccaacaggaagtggaaagactctttcttatgctttaccaattgtgcagctccttgcatctcgtcctgtgagatgccttcgtgctttagtcgtattgccaacacgtgatttagccttgcaggtaggttctcacttatgcttttttgtctatatcgcaagcatatggtgtactgtactcaagtcttccgttttcacatttctaagtttaggttaaagatgtatttgatgcaatagctccagctgtaggattatctgttggctcagctgtgggtcaatcttctatagctggtgaaatctcacagcttatcaagacacctaaacttgatgcgggaatatgctatgatcccgatgatctttctcaaaaccttgaaagtgctgtggacatattagtagcaacaccaggaaggctgatggatcatatcaacaacaccaagggctttacgcttgagcatttgcgttaccttgtatgcagaatttcctgatttgccttctcagttcttcttgttcttagtttccgtttgatcgatgaagctaattgtttcaggttgttgatgaaaccgacagattgcttagggaggcatatcaatcctggctaccaactgttctgcaactgactcagacatctgacgatagcctatttccttcatttacaccatttgttccttccgcttttggttctctgcagactgttcgtagacagtgagttccgtgttactagcttatttcttttcgtatgctaatagtagtcacataataacatgatcatgttaaacgttgtaatcaaaactgattaaaaagaactaatgtgatgtctgctttaaaatctcagaagtgtggagagaggattcaagggtaaaccatacccaaggctggtgaaaatggtactatcagctacattgacgcaggatccaagcaagcttattcagcttgacctgcatcacccgttattcatgacaactggaggaagccgatacagactacctgagaagttggaatgtcttagactggtatatatgtgcctttaatgtgtcggttttcatcaagtttgtgctttaacagaagatttatctacaaaagcttatctccacaactttcttcccatgtcttttaacagatttgcgaaaccggaatgaagcctgtatatttggttgctctcctaaaatcatgggaaggtgaaaagtgtatcattttcacatcttccgttgagacaactcgtcgtctatgcaagttactcaacttttttggtgacccaaaaataaaagcaaaagagtattcaggtggtcttaaccaatcacttcggaggtaatattcgaatcttgcattacttagtagcaccgtatactatctttggaactcagaactaacgaattcttctcatttattgaacaaaatttgcctgcagcaaagaactaaaagcgtttagaaaaggtgatatccaagttcttgttgcatctgatgctctaacacgtggaatggatgttaaaggggtaacaaatgttattaattatgatatgccaccatttgcaaagaccttcatccatcgtgctggacggacagctagagcaggccaggctggccgctgcttcacattgctgagtaatcatgaggtaaactgatattatgtactacacaaacacagaaacattctttctctatatgcttgtccacgttctctatatgcttgtccacgtatgtgtaaacacaagcttgaggtacctcagataaaagatactaggtaaagcattgtgtctgaaacagggaagaagattcagtttcataatcttgtgctcacctcactgaatcattaatctcttaggataaatgtataggaagactgctggaacccaccctctatctgatcctctgctactttttatatactgaagctcttgactctagctccatttgctcattcggatatataaaaatttcaggtaaggcgtttctcgaagctcctggagaaagttgggagtgattcatgtcctatctatccgatcccgcctacttcattagattccattcgtgccacttacacacccggtaagtacctagccttgtgtatatagctctaggaaacactctgcagatagacatgaaaaataggggagtaatgtggaattgagaatcagcactgctgcttagttgttaaacctcttaatgagcatgtgaatttagatttagagcattactttacaaatgtagatttagagttttatggaaccctgtcagtgcataggagacattagaggccattgaatctgttaactatattttggtaatgatgatgatgaagtcatttctcatttcagctctagagaagctcaaggagttggttgagtcagaagcacccaagaaaggaagacaagcttttagacataattcaagaacgggtaactcccaaaccaaacttaacaaaccgagatcagaagcatagttctcctgtgatgatccctcgggtgtgtcgggtcaagtacaagttattgggtttggatatttcttgacttaacattgttcgttgaggcgaagaatccattgtattactgagaaactacagtataacgctgacacaattcgtcacaaaaattttgaaactatttttgctataaatgtttagtttccaattgcacttcgtagaataatctcagattattttcttagatttttggatattagtatttattactaattgtcaaaaaattaaaatttagaagacttcgtcaaaaaatatatatttacctttatcaattaataaaaaaattcaatcccgaattaggactaatgtaaaaattgatacaaatcgataaattaataagataaaaaaaaattttgaaaatattatataactatatggtctcatcaatagtataaattaataattatataaattcactaatatatatattataaatattatatgtaaaatatgactgtaataattttttttttcagtttttaataattctttgtagtgttcaattctaatattttacaacatcaaaaaaatttgtattgttttttagacttaatcattgctttttacttgtaattactattgattataaagaaaaaaactacattttttatcgaatttttgtaagaatttacaaactttgtacaattttataaatttatcgataaattaatacctttctaaattaatcaattttttgtcccaatattattaatttatagaggtaatactgtaataattttttgaatttacctctaactgaatccttggaccagtggcaatatgggtaaatatctcaaactatgcattgtttcttaattttaaaataaataaataagaaattgtgtttacaacggtattattttgtatgaaacgagagccttttctttcactcagaataaaaccatacctttctcctaatttttcttacgaagatcaaaatcaagaaacgacgacgaaacactccaccactaagattccgtttactatcattgtctcatctcttttttttttggcaaaaacattgtctcatctctattttttgttttttgggtgttttctatcattatctcctctctggttttgaatccttggaacccaagaaaacgaaacccaaatcccaatcttcatcactcaatctcttgtggtaagaaatttcttgggtttgaagagttcatatgtttgtttactcagtttcggttccgtttgtgaaacacccaattgctttcttatttcctttcgcagttcaaaattaaaatcaagatatcgagaaatttttctttatttcttatgagtcaagatcaaaaacccttactttctctttatttccttaggcagagttcaaaatcaaaaccaagaagatatcgctacttgagtctatacgctcccagtcaccaccaaatcaattggcactctgaactgagagaatggaggtgagatatttgatccttactcttacttagttccggttaaagcatatgaaagactcaaatttttttacttttgacacagaggcataaagaagaagataacggtggagacatgatcgacaagtgggagtgacatacaaggggaataggttctaagttgatgtcgaggattggttatcgaaaattatctcgtttgggcgccttgggaaatggcatcttagagcctatcctagtagtcgttcttccaccgagggtctccctagacattgctctttatcttattactagggacaaagaggaacgcaagaaagaaaaggaggaaagaatcagaagtgggaaaaggaaggacgaggcaatgagcatacacaacgacattgtttagcagctccatgagcaaaacgtcctttcatcggaatcatttgacaagggacaagacatgcatgtggaagccaatccatcccaagctgtcttcctctccaacaaccctgatggtgcaaaagaagcactgaactctctgacacaggagaaaagcatggaacaaaatgcatctacagaggattttgagcttattaacaaggaagaatatgatagcaagaataagaggaagagaaggagccgaggttggaaaagaaagcgtgagaagaagtttgtgtaaaaactttagaattataaaaagtgatttctcattaatcatctaatgtgacattacatcagtatatatagtacacaagatgagtaaataactagaatcatgtaaatggaagcttaatcataattatgctcatataaggttaatacacccccctcaagccaaaggaaccaaatgtgagaagaggcttgaaacagatagtcgaccaagaatcgaataaaatggacccggatgcaagggcttggtcagtacatctgcaagttgattacccgaagatacatgtagaacactcataaacccattctgcacttgatcacgagttgtgtgacaatctatttccacatgtttgatcatctcatgaaaaacaggatttccagcaatactcagggctgacttgttgtcacaaaaaagcttcggagaaaatccatagcaatgtgtaaatctttcaacatttgaaccagtcggtgatgtataaccctgaggcaaactcatgtatatctcttcatctaaatcactatgcaagaaagcattagtgacgtccatctgtgttaaactccatccaaaccttgctgctaaaccaagaatcaacttcacactagccaatttagccacaagagaaaaggtatcaaagtaatcgactccttcatgctgtgtaaagcctttagtaacaagacgagctttatatctttctacgagccatctgtagtatacttaatagtataaacccacttacagctaacaacattcttaccttgaggcaaagaaaccacactccatgttttattaagttccatagcttcaagctccacatccatagcttttgtccattgtagtgatattatggcttgcttaaaagttttgggttatgtttcaagagatattgaaaagataaattgctgaaaaggggatttaagtgttgtataagggagaacagatgaaagaggatatggtgtggtgacttttatcggtgatggaggcttagaagtttgaatgagacaattcagataagtaacttggtaccttagtagggtgtttcggtctgaccttaggtactgaaatcactgcagtatctgtagtaacagtctccctagaaccaaatgatgtactaggtggattttgtgtatgatgtgtttgagatgatggtgatgaatgatgcgcagtatgtatgtcagatgaatctaatgcaacaggaataggtaatggtgtaatagatgcagggaaaacatcacacgaatctgtcagatgcattgtatcatatggaaagacagtttcatgaaacaccacattacgagagactgaaatgatattagtatcaagatttaaaaccagatgcataacctaagaaaacacattcatttgcacgttgactggacttatgtctatctttctgtaaagtagaaacataacataaacaaccaaagcaacgtaagaaatcataagcagagctttcttagttaacaattctattggtgacaagtttttcagtaatcgagatggagttctatttatcagaaaaaactgcagttttagaagacttcaaaaaaataaaaaaacttcgtagagttatgaacaaatttgtggggttcaaatgatgtgaattccgctaaattgttggagacatgattcttccatcagatctccacacattttgttattcaattaacaaaaaaaaagatagaaatagaagctgaaataaaaaccaaatatactaattatattgtttcaaagacgaataagatcaacaaacaaagatgtgatatgatccttaaatcttccttcgggatgtgtgtattcttcgccagacctataagtgaactctatcatttttccaaaatcaatggcccgctttagaatttgccgcggcacactctttgttgtctttaatatctcctcgttcacagttgtatccaagtccctagccatcttttgaagccttgtgaaagtttcctcctcggtaactttgtattgcttcatatagtacatgatggcattaacatcaaaccctctgctcatgtcaccctgttagatattactagtcatgtttaacgtataatgtcttgatcactaaccaaacaagaagaaacgcttgatcatacaatttttggtacctcaaagccggctatgtcattcattagacgagcccttttagcctgagcctcaacaaattttggtctggattttagccatttataagcttgttccctagaactttgtcccaacccaagaaaactgcatgctatacttacatacattgttacttcgactcctccaatctccaagtactcgtcaaatgtaggcaccacgtctccttgttcccacttggtaaagcaaaagttggatcttaagtataccttgaactgcttattaggagcatatagaagcacgttaaacaacatctaactatttaattttttgatatttggatgttacttatatatatacactacctcttcaagtgcaccttgcacgtcataagacaatccctcttccattatgcctgcgttttcacactcttcgaaagtattccaagcgaacttgaagacggttttcatataatctggtaaactgtccatgcaatctggatcccatctgtacatgcatactgagatatttgtacgggatatatattcaccaaaaaaatttaccctatgatctattatatatgaaaccatatttctagaaaaatttgatttcttaatgttttgtgttcatatattttatgattttacatagatattaaagaaatagacagaataaatatatttagtcacgtaaagtattggaataattaatgtatttgatttcacttaggatctctaatctatttcactaggattttctttcatggttgggttggcactggcctttgagataagatacgcattcgtgtttggatgatgttacctttccacgcattgaacaagagctgcaacttcagaaacattaccgtatctatcacacgtgtcatcaacaagggtgaagactgtgttgatcttagctagtgaaactctcccaagtgaaaattgtggctcgaaatatatcattattgcaaataaatagcattcgatcaatctatccctgaagtaaggtgggagtttagatgcaaggtcttgctgcttccaccatctgcaaaacatgtcaatgactattgtcaacttgtatcgcaaaaaacatatagctagaagcacgaaaaatctagagtatagtacttggtcagagttttcaattcttgaatccaatttagctgcaaaaacttgaaattgatcttggcaaatctaagtagcatcttgttgtgatcttcttcttgttcatagaaagaaatgtattccctcgcgaatatcatttcggcattgtaatgttgaggcatgcaaagagcatttcgtatacgcattaagatatggggagaacttgctccagctctagctaacgactccaagtttcttgtagtgaagcttaacgcttcctccaagatatcttctcttgttgtccttaagtgagcagcttcatacaaactcaccatgcccttgacatcactggttatagattccataaacttttcattctcccctttgaatctcttgaaaacatctattggtcaataggagaatcttgttaatacatatgaatcgattacaaaaaaatgtactggtagataacttttaccggtagacatgttgtaaccgtatgtcctgaaaacccaaaacatgatggaaatcgtgtacaaatcatcttcaccggctatcatctcctgtatcttttcaaaaccctcttctagactctgctcaatctcatcttcaaagtgaaacgctacaccaaggctcacaagcatatatatgaaaagaatcctcttcttggtcgactcaatgcttttcgaagaaaacatgagcatctcccctacttccggctttagtctctcaatctcttgggcaagggcattcatttcctaacaataatatcatatgttcatacccgttacatcgatcttttacatttattatatatatgtttgtcagtgtgtattatagactcaccgagacatcaacttgagcagagaggaaatggtgaccccattttgaaagcggcagtctcttgaacttgcgattactttcttgatcatgacaggcccgagtaggggtggccttcatgcgaacaagctttccatgctgacctgaaaatgacttgtggggaaagctagagagttttcttaccgaaaataaattggaacgtaaaggaagagagagtatagatccataagctgatatgcattgcatgtttactactagtgatatggaatacattttcaccaccaaatttataggcaaaacataagcgttttcattaagtcatcttttgaaaagttttggaagaatgtatattaatacccccatatttatcttcttcagtgtataatacaacctatgttgggaccatgatattttctgaatttatagtgatattagtttatctttaaattgatatttattaatctatatagatctttttttaattatttaattttttaaagaatacgagttgacacaattcaatatacatcaaattaatgacttggatgttgaaatttgtgtagtattagaattgaaaatttaatatttcaaaaaactcatttgacaataaatcacaatgactataactgaattcatttatataatagatatacatacatctaagtttatgattaataacctcaactatcagatttttaaatgtagtagactattgaaatgaaaataatgcagattaagaagttgtatacttataaaaacttatgactaattgtattaggaagttataaacgatactacaatatgatagttttaaaacacaacataatttaatgaaaattagagacaaaatcattgtttgatgtaataatagttcaagacaaactctaacaaacattcaatagttcaaaaaatatttaaactatagattatatatattatcgtatatatattatatttttgtggttattaatttatgatgttattaaaatcatattttttatatagggttttaaaaaattgttaacttattattttatcaaattatgttaaattttacattcacacgacttgaaactaatataatattatctccttgtatttattaatttatcaaaaattaatttgtagaggttttactgtaaaacatgtttagtttttcattttttaaaaaacctccaagtggcaaaaataagatccatctccatctaaaaaagtgcaaacaaatctccatcatttaaaaatcaacgttaacatccatatctattgttgttgttttttacttctttttctcttggtcaaactctacgttagtttgatcaataaatatgacaagaatttttgcagtctcataggcgtctttgtaaaggttagttagcgtctacataattttccgaaagatataattttcttgagatacagttaactcaattactgaaatgtaataactttctaaaagttgtggctattaaacaaaattgtgaaaaaatttaaaccaaaagccacttcaaaaacaaagaaaaccataaccattaatcaaaattcttttttttttgttaacaagtactagttgcattaaattgtaaacatatggtggtgttgtatatgtttgatacaaagaacctatataacaaaggcttgttgggatagtgcatctgccacattatttcttttccgattgacatgtccatagatgagtgtgatagcttcaacatccaatatcgtataccaccaaagactgaagagtagtaccaagaatatttatatatatatttatttatttatttattttggtaaggagaatatttatatcatgatcccaccatactttaattgttatgaaaaaattttaatttgattttcataaattttatagtttagttaagtataaaaccacaattttttttctttcaaatattatttttggagaaaacccccaaatttaaaaggaaagagaaaaaatcaaatcattcatctttgagctttcttttcttctacagaaccctaatttcatgttctaggtgtctctcgaatggttctcatctcattgattactcaatctctagggtttagtggttcatccaaattcgtaccctaatgggtgccgtagcgatcaatcgtaaacgcagcgacgaatccttcaatttcattaatcaacaatcaaccaaccctttacgaaattcaccgtatttccaagcttccaagaaacgaagattctcattcgctatgtctgaagattctggtaagccagcgtcttcaaacccaacaatttcgaggatttcaaggtaccctgatgctaaagctcctcttagacgagagattcatgctcctagtagaggaattcttagatatggaaaggcaaaatctaatgattactgcgaaaaggacgcaaatttctttgttcgtaagtatgatgatgcaaagagatcagctttggaagctttgagattcgttaataaaggtaaagactttgttgatttgggtgatgaggttgaaaaggaggaagttgtttctgatgattcaagtgttcaagcaattgaagttattgattgtgatgatgatgaggagaagaagaatcttcagccttcgttttcttctggtgttactgatgttaagaaaggggagaactttagagttgaggatactagtatgatgctggattcgttgtcgttagatagagatgtcgataatgatgcttcgagcctcgaagcttatagaaagcttatgcaaagtgcggagaagaggaattcaaagttggaagctttgggttttgagattgtgttgaatgagaagaagttgtcactgctgcgtcagtctcgcccaaagactgtggaaaagcgtgttgaggtgatgagatttatactaatctttcttgaattggatataattaatgacattgctttgtttggattgtttctctaaaatgcatatgatgttatcgcctactgtttgttagtgtagactgaagatagtacaatacttgttggctttattggttattaagctgcagttattacttatgcacacagagtcaaagttcttctacttattagagtatattgtaatcttagcgttgagatcgttagtgtgtttctatgtttattgttgttgttaacactatgtttgttgtgttgttgatataatgaaggtgcctcgtgaaccttttattcctctcacagaagatgaagaggctgaagtctaccgtgccttttctgggagaaataggtatggtttcttaagacgctctagcatgttgagtgattttttttagtctaaccaaaaaccaaatgtctcccatttttcagaaggaaggtcttggctactcatgaaaactcaaacattgatattactggagaagttctgcaatgccttacaccatctgcatggctaaacgacgaggtacaacttgttccataatattctacacaattaagagctcttaaatcacattttcttttgctgatttcttgttctgttttataggttatcaatgtctaccttgaactactcaaagaaagagaaactagagagcccaaaaagtatttgaagtgtcactacttcaatacctttttctacaaaaaggtttgttttctttctgctcagatgatttttaacaaaaatttgatcctttttgcctcatgtcagttcgactgagtagctgctacttgcttccataaaaatgataagcagtatgtttaagtgatctttatgataagattattgatatatttggccttgtttctccccatggtactcagttgtctctggcttctgtatcccatgaatggcagtgagtaaccaagacaagctgtggccttcttatacgttgatgaatcctctggcacttaaatctgtctttctttaattatttttttcagctggtaagcgattctggttataattttaaagctgtcaggagatggactacgcagagaaagttgggatatgctcttattgactgtgacatggtaattttgtcgaagaacctgaatttgaagattctcttgttaatattacgcatgtagtccaatttatttatgtttaacttagtctgtgccctctgcagatatttgttcccatccacaggggtgtgcattggaccttggcagtaattaacaacagggaaagcaagctcttgtatcttgattcactgaatggagttgatcctatgattctgaatgctctggtatgatttaatttctaactcttattcgctttatttagtctattaataactgacatgttggatgcattaaaagatattagatgctgataaatctttatcatcatttcttgattctgaaatctgtttggagacattatggagatgccagaagctgttattgctttttaaatcggacactactgtgaaagtgttctaaccatatatactagtcgttatagctaatgccagatctgatattctgcttcaggcaaaatacatgggtgatgaagcaaatgaaaaaagtggaaaaaagattgatgctaattcgtgggacatggaatttgtggaagaccttccccaacaaaagaatgggtatgtaactatgcttgaacttgctatgatccatgatcatgtgaaaggaactatcttgttaaagagataacctctgtagaatcagatacttgtcttctgatgtgggaatatgggtttttaagacaaaggatagatctggtttgagattgattaggagaaattcacctgatataaattttgataatggaatcaacaagggtataacttaactgttcttatgctctttagcactctggttaagctctctgctaactctatattgtttctttgttgcaatcttttatattctcaggtatgactgtggaatgtttatgcttaagtacatcgattttttcagcagaggcctggggctatgtttcagccaggtaagctatcagaatccaaatctctgaatgcctcaagaaactgtagttgagaataaaaactggttgtcttgaaacaatatggaattagtatatccccctagcagtttatgtaacttgtaggatttaggcatttagcgtaataacattgtattactttgcaggaacacatgccatacttccgactcagaacagctaaagagattctgaggctacgagctgattgaagttgcttgtgctaatgttttttcggctattaggaatactatttttggttgccattgttgatttgttcaaactttaaatcccactccttttaggcagtgaagcactcggctttaaaagcagaggtaaaaactgagtcaagcccagagctcttagctcgttccgttattgtatttttttccttcttcttgttttaaaatgtagatgaagcgttttggatctctatgttggttagtctagctgaagatatatgagatgttgaaaaccttatttatttctctccggtcttgaccagtgcgaacgcaatttaaagtttccatctagtatcggttcgatatattttcctctgttcaatagccaaaattccatgaataatctcttgaaagcaaatgttttcgatatacaaatgttctgcacaatttccccaatacatacacgaatatgttacaaatatacaacaaactgctgtttgtgagtacaaatgttgacaaggacacagaaaaaacaaaatcccaaatgtaacattgacatattaaaacccactcccaaaaacaaaaacaaattccccaattcataaaacacgagaggaaggaagacttgtgtgtatctcctaacaaaaactgactggaaggcaaactaacttccactgcctttcctagcgcggaactctcttccggctaagtatctcctgttctttcagacggtgttggaaccgagcaagacgggcttgaagacttacaagaccagctgctttacgggacaacacaaagctcagctgtgtaacatagttgtcaatcatgctccctggccgatccaccttcgctagtaatttcatttcctacaaaaaaaaacatgaaataatgttaaaacaatcacaagacatatgagccataacctcgtgaactatttccattgtatcctcgatctcttttctgtgtgctgtaattaaggtctcttcttcctgccagagtttaaacaaaataattaccatattacaggttttctaaggttattcgtgagcgatattcataaaattccctcacgctcatagcataatttagaagtatagaagggtcaaatggctctttacctcaagcaatgcatcaatgttttcatcaagagaaggctccgttgtttcatactgccttgaagatgtatcgcttgtgttctgactgctagccatattttgttgtctagaatttgtcatggcagggacatcagtcttgagaataagatgagtgaatcctttgactagtggagccgccaaaagaagattttaaaatgttaagcataaatcatattccttaaatgttaagtgaatcctttgactagtatagtatagtgtctggtttttcattagactttctgagatgagaggtatttctattaaaacttaagttgaaggttttaaaatgaatcagccaaaactgcagggtttgtttcattaaaatcccaaaattgtttcgtatacatcatattacccactgaggactctgctctttgtggaaatgctaaattagccccaaacctttttctaagtcccactttgaattctaataagaacgaacagatcgcgggaaatccaaaatgatttgaaaccttttcacctgaatttctgtgaaatccaaaattctctctctatcagtagagaatcgccatggatgaagagcttctgctcactagaatccttgcaggaatcgaaggaggagacgatgaatctgactatcatgaactcgtcacggatctcaaatctctacttgatacagacgatgatgaaattctcaatcgattctacggtagtctctcctcaatggcttcttcgtttctccgctgtatctccgccgccatggattctccggttgaatcaggccgtcttgctattttagcctccgacgcttatctcagtctgcttctttccacgaattgccccgttttcactttcttctctccgattgcgtttctttctctacttggctcaattcgccgctacctcaaacgccgtgatgattccgccggtcaagggagtaattcgcagcgagagaaagggaataagaagaagagaggacgtggtaagaggaatttagggtatgaagatggggaagagactgaagaaggtggatttgatgcgaaattgatgtttatagtgttagagaagcttggctcggttctgagttttgttcatttagatagatttcctgatagtttgaaatctttggtacaaactgtgagtgagattcctttattggcgttggagcactctggagttttgaattatgatcgattgatggaaatgtgtgggaagattctgggaggagtgttgaattctgaccatggagatatggcactcactgctgctgagatttcaaagtctttgacaccgttgcttcttatggggaaacatcaagcgagaagttttgcgttgggatttgtgtcaaggaaattgatgagtttggctaaagataaccctgaattgaaaaaagttgtgtctaatttgcctaagtttctggttcataaggcacctgagaaggccgagccgcgtggatttgcagtggaggcggtactggagattgtaaaggcaatggaggttgagggccaatcagagtttgttgattttgtaatgaagatgtgtcaagggaagtctaattttagagtattagctgttgatattatacctctgttgataagctcattaggaaaccctctaggagatattagttcagagaatgggttgaaagattcgtggggcttgggttgtattgatgctttagttcagcggtgttcagacacgagcgctttgattagagctcgagctttgtccaacttggctcaagttgtggagttcttgtctggtgatgaaaggagtaggtcgatcctgaaacaagcccttgggtttaacggtgagacttcagagggaaaaggtgcagtaactgaccttttgaagaaaagatgtgtggatgagaaggcggctgtaaggagagcagctcttcttctggtgacaaaattgacatcgcttatgggtggttgctttgatggtagtatcctaaagacaatgggtacatcttgttctgatccgctaataagtataagaaaggctgcagtttcagctatttccgaggtatgttttctgtaactcagtttcttctttctcatttacccgatggtaatatgtgtagagttagtataatttatacgggtttgctttgaccttaattagctcaaagttaaagagaccaaatgtgcaagccaaaaatgtttttagatgaatgaatgggaaattacatagcaactgcttccgtcggtttcatactaaaatcagataatctttatactttaacttatccctgaatataggtcaggcactcaggctaatgacttgttatcatatttctctgatgatgcaagttcattgtcttctgttcactgtaggcattcagaatatgtacagatgaaattgtgaccactgaatggttacattctgttcctcggatgatcatggacaatgaaactagcatccaagaagaatgcgagaatgtctttcatgaattagttctggagagaatattacgagctggaaatgtgctttctccagacagtgcttctctccctaacaaccggaacactacttcaaaagatctagacagagacattgaagccttgtttccagaaggagttttggttctcttaagggagctttgcaacagtgaggtttctccttgggttacgaaaatatgtggaagtttgggaaagaagaagcgactaaaaccaagagttgcccttgcgcttcagtgtatcataaaggaatctgaatcactgtggttgagtcgttcaatgccaataaatagatggacagctcctgctggtgcttggttccttctatcagaggtttcagtttatctttcaaagtctgtcgaatgggaatttcttcaccatcattggcagttgcttgacaagaatgacgtacaaggtttgtcagaattctgtttatccatctataaacatctcaatcaactgattcatgtctttacttgttcctactggtagtgtgattttctggttttagtcctaacttctaccctaattaaaccaattttcatgaatgtatgtatgataatttggctatttctgaagggctagatgaacaaggtgatgaacagggggtcgagtgtaattcttctacatgggctggcgatcgagtttgtcttttgcaaacaatctccaatgtttcccttcagctgccagcagagcctgctgcagatctggctgacaatttgctgaagaaaatcgaaaattttaacctgcattctgctgaggtaatgataaatatttaacctgatatcttctatataaaatcaagctcatgttttgaaagtacagaaagttactggtttttgtctagaaggatgtattctttcagattttgatatttttttggtacttttctgtaacctgaaacttgaacgcttgaattgagcagatcattattcactggtttgaaaatggttgcttcgtatatggttcatctatcttcatgaacttagtcaatgccattgaatgacaggtcgatgcacatgtcaaagcattaaaaactttgtgcaaaaagaaggcaagcacctctgaggaggccgatatgcttgtcaagaagtgggtagaacaagtttcattgaaagcatctaaggtcactgagaagtacatcgagggggtttccagtcataatcattcttttgttacaccagcaacactcggaagtagaagaagcaagagactggatactgtgtccaagaaattatcaaaagcagtcacagcagtatacaccattggatcttgtgtcattatatatccttcagctgacacgaccaaaattgttccgttcttacatactgtcatcacttcaggaaattcagactcaaagctgaaaaacaaactgccgcaagctaatgtttgcttgaagcaaaaagctcctcttctctatagtcagtcttggttaaccatggcgaagatgtgtttggctgacgggaagcttgctaaaagatatctccctctctttgcacaggtctgtctgcatttgctgattcatgtgtccattttatcattttgattatttctggaaaggaaacttttcgttccaggaacttgattcattggatggtagtctcctttgtctcttcaattttttttaacctatgtgaacccgttgatgccttactcttgcaggaacttgaaaagagtgattgtgcagccttgcgtaacaatcttgtagtagcgatgacagacttttgtgttcactatacagccatgattgagtggtatttcattcacagaacattaatttttcaaatgttaaacatgattgcgacattctaatggtttgtttacctggatagttacataccgaagattactaaacgtcttcgggatccttgtgaagttgttagaaggcaaaccttcatacttctctcaaggttactacaggtattgctattctccacagattctttatcttctgtttttaaaaagtattgaattgacaatgaataagcaggcttgttttcttgattcagagagactacgtgaaatggagaggagttctcttccttcgattccttctatcgctagtggatgaatctgaaaagatacgtcgacttgcagactttttatttggaagcatccttaaaggtatgagaactcacgtgagcaaccatgaaatgcattctttcattcccatgttattgaaaattcttacagagagacatgatctctaggatttttgattattgttacgccccatgttgcttatagtaaaggcgccacttctagcttacaacagtttcgtggaagctatttatgtcttaaacgactgccatgcccacactggccatagtaatccagattctaaacaatcaagaacaaaggatcaagttttttctatcaggtacttgtgttaaagttatatagtctatgctcatacgcaaacttgacattttggtgtgaatgatcttagtgattatctttgtttcatttgttctgtagagggaatgatgaaagggctaggtctaaaagaatgcagatctacgttactttgcttaaacaaatggccccagaacaccttttggccacattcgccaagttatgtgcagagatcctcgcagctgcttctgatggaatgctcaacatagaagatgtcactggtcaatcagttctacaggtaacttccaaaatggctacagagccttttttcttcttgtgattgccgatttttaactcgttttgtctcggtgtaggatgcgtttcagatcttggcgtgcaaagagatccgtttatcagtttccagaggagcatcgtcggagacagcagatatagaggaagaaggtggagatgcagcaactgcaaaaggaagggccataacgcacgctgttagaaaaggtttgattcagaacacgattccaatcttcattgagctcaagaggctattggagagcaagaacagtcctctcacaggttcgctcatggactgcctccgtgtcctcctcaaagactacaagaacgagatcgaagaaatgcttgtcgctgacaaacagcttcagaaagagcttgtttacgatatgcagaagcacgaggctgcaaaggcaaggtccatggctaaccaaggggttgcctgcgggacaagtcatagaaacggtgaacctgaagcatcagcagcaagcgaggagaatgttagagattcgggattggaatcaagagtggtttctgcggctgctgatgtggtggcggctaaggcagctaggtcggtgttgagagaagtgaacggtggagctgcaacgccgcctctgagcgcaatgagtgttccgaagctaaggtcgagccgtggagttagccagagtggtcgaccatcagctgatgtgttggagtctctgagaagaagaccaactttcatgtctgatgatgagagttagaacttaaaaatgagactgtagaaaatagcttttgctgtaaatgcatgacttcgatttttctttttgggagattagatcgagactctattaaagtctaaatcgtatttataaaccgcataagacactaaaacctggtgtgtgtgtgtgtgtgcgcgcatttgtttgcttgctcatgtttgtccttgtgtgataaatccatccctgccctcaaattgatttatgtgttgtatgtgttgattttagtgataacatctcaaagtgattaaatattttcaaaaatgctatttgatgtctataacggctttaaaacttttgcaagttcattagagctatctctagcacatatatggcgcttagagatgttacgaatatgtaagactgattacatatctctttggcttaataaatataagtatttgtgttgaactctttatcttcttcttgaagatgtcttatgggaaacatgttaaatggatagtaaatgagagattcgaaaatatagtgtgagcttccttctttggtttatgcattctccatgtggggggcaaggtttttgaagatttatacttttgtggcaaatctcttgtttgaatactccatgggagtctctcatcaaaactatgctgcaaaatatttgaaaatttataaatctattgtctttgagaaagtgttacaaaatttatgacctcaataatattgcatgaaaactttcatacatcatttggtatatgtatgtttaagaaaaggtaaaaccgtaattataaagagaaagaaaatacaatatcttaatacatatcaatctaattactcattaaccatattaagaaaatatgtgtctttattttttccttttaacataaagcttaaaaagaagatttgtagccagaaaaattaattgtgttcatttcccttttaaaagaatttttcggcgcaacaaaatcgtgaaattgatataaataaactcgagattattaatataaccctttttcacttcacttctctttctctctaaaccctaaaagaagaacgatgccggctccgacgacggagatcgaacccatcgaagcacagtcactgaaaaagctcagtctcaaatccctcaaacgatcacttgaactcttctctcccgtccatggccaattccctcctcctgacccggaagcgttagtcttcttcgatccccaattttcgattcgaatcttcattttcttcactaagtttttatgatttcttcgttttttttttttttttttgcagcaagcagattcgtctcagccataaggtaaaacattgagtctctcttaccagtctttagaaatttatttcagttattcgcttttaatgtctattgattggattttggtttaaagcttcgaactttaggtttattcaggtttttccataattgttctaaatcttcaggttttgttaccaataatagtaaagatggttgatttacttagactctctctctctctctgttgtgtatgttactgattttagaagttttctttgtacagatgaaagttgcgtttggaggtgtagaacctgttgtgagtcaacctccacgtcaacctgaccgcatcaatgagcagccaggaccttcaaatgctctttccctcgcaggtgtttttcatatcactatgtcttggtgaaagataaaaacttgtttcttgtttgctatttgcattcttatttgtattggaagggataaaatcatctgcttgatgaattctgcagctcctgaagggtctaagagtacgcaaaagggtgcgacagagagtgctattgttgttggtccaactttactgcgtccaatactgcctaaaggcttgtaagtgttatcttttgttgttggtttcgttgatctgaatgctaattgatggttctactttatcgtgaggatgctcataaaagaattcggttctcgaattgaaggaactatacaggttcctcagggaagagcaccaccattatacctgcaaatgtatcttcatatcaaaggtttttttctcgtcctcatacttgcttttctttatctggattgcaatacattaatggcagctctaggtagtgtaggtagttcatgggcatgcaaattagacttcccccaatctgaatttttttggtttgtccttataatgtagcttctaattctgattccttttttgttgttgcgttcctttgcgtgttacagaaatctgtcaactgctgcattaatggagagaataccaagtagatggccccggccagagtggcatgcaccatggaagaattacagggtaaaatccgtggctcagcattgttgctgcatcatacggattttggtcttttgttggtctccaaaaaactctggtttgaggagttacttaacttacgattaattattcttttcacaggtcattcaggggcacttgggttgggtcagatctgttgcgtttgacccgagtaatgaatggttttgtactggttcagctgatcgtaccatcaaggtagcagagatgattgcttattcaatatgaattgtattttttcgaatatgttttcttgttatacttataagtcatgatacaagacttcccttctatggctagttactggagcttagtttagtgcattgccaaaaatccactactttggcgattgtagaagcagttccgactttggtatgtttactgaatttattacttgtgttttattcactagatatgggatgtagcaactggagttctgaagctaacacttactgggcatatcgagcaagtacgaggttagcctttcaaatctgttctcgtttattaatatttgttagacttttcaataaataacactctcgggacaagttacaagtttgggctcttttgttttgaattttgttacaggcctcgctgtaagcaatcgacatacctatatgttctctgctggtgatgacaagcaagtcaaatgctgggaccttgagcagaataaggttacaactctattctcttcattatctggatttctcatatctaatgctcttggaatttttgatttgataggttatccgatcttatcatggtcacttgagtggtgtctattgcttagctctgcacccaactttggatgttttattaactggggggcgagactctgtctgcagggtaaggcaaaaatatttatatccatatttatatatcttctcgtttgaattcttgcactttgctggatttgtagtttaaaagtccatgtttacttatttgcaggtgtgggatattcgtaccaagatgcaaatttttgcactctcaggacatgacaacaccgtttgttctgtatttactcgtccaacagtaagtctcttttaatatggacttgttgttatggtttttggatttcttgctgaatctttttataatagtaactggaactcactttgatctgtgttgttgcaggacccacaagttgtcaccggatcccatgacacgaccattaaattttgggaccttcgatatggtatatcttatcattgtaaccattgtttggacttaaaatccatattatttaaatccttccttatttgattatcagttgctgcaaatatatggtttcatttgaataatgctgtattattattatatgcaggaaaaacaatgtcaacgctaacacatcataagaaatctgtccgagcaatgaccctccatcctaaagagtatgtgtagtcgtactgaatctacttttgtgtatcgtgctgaatctactttatctttccaatagcgaagtctttgcacctaaacttttcctttatgttatctctttaattttctttttaggaatgcctttgcttctgcatcagctgacaacaccaagaaatttagccttccaaagggagagttctgccacaacatgctgtaagtctctgctagataattatatactttgcatctccagtgcttttcaaataggagctgtcattattaattatgtaattgatgtgtttgaacaatgtttatctttttccatggaaaagttcgcaacagaaaaccataattaatgcaatggctgtaaacgaggatggtgtgatggtcactggaggtatataatcatttctgattcctttcgtccctgtgattgttttcctttgatagtaaaatgggtgagacataatcattttcaactgaaactgattctatatatgtgtgaatgaaggtgataatggaagtatatggttctgggactggaagagtggtcacagtttccaacagtcagaaactatcgtacagcctggtacgtacatttatagctttcatggtcttttgctcctgatctccttgttatggtaagatgtagaagtctcggtatgttcatacaacgtagtcaagtttgaaccctggtaaagactcaaatgttagaagtgtatgatactatgattgagctctagggaaaccaagaaagttgacgtaggtttatggtttatgtaaatgcctatagcgtcgtcttacaagcaaatagtaaatgggtctttaattggatgtggttgggcatatggcaggttccctggagagtgaagcgggtatatatgcagcgtgttatgataatacaggttcaagattggtaacatgcgaggctgataagacgataaagatgtggaaagaagatgagaatgcaactccagaaactcatcctatcaatttcaaaccaccaaaggagattaggcgcttctaaataacttgtatctgtaactcaaagctcttgttggaatctcactaatctcttcatgattctgtttcctagatcaacttttgagaggggacctttgttttgtggtggggaggaaacaaaaggccatgtactttatgtattttaagggcatttgtaattttttctatcaacaataatagatcatgtattgttgtttatgttgagagaactttgttacttttatctcccgtctcttgattctcttcgttagtacttatcgaagatctatcatgatttctgtgcaaccaaatctgtgaagttttgtaggacgaatctaagtatttgatcaacaacttatatctctagtctccaccactgaaagttttcagcctaaattttggctcgggttgtttggtttatgaagcttttatagtgtaactacacagctgatacgaagaaaccaagtgtaaaaacaaaacagctgatacgaagaaaccaagtgtaaaaacaaaagaaaatattgaaatagtaaacaatttgaatggaaaagatccactaaaaagagacggtgatggtgagctcgtttgcgcgaagacacctgtgtgttggttttgcaatacgtaagtgacacgttctagttatcatcattcagatctcaccgacctcttctgatcttttgtaccaaagtatacttgtttattcgcagatcttttgtagacttttcacctttttaactgccagtatcgtttagtggaagacgtacattggtttttacgtcttctatttctttcaattcaatcatcaaactatcaaagcatcaaactatcatagctttctcactagtcacttgtgggtttctcgaaaacaggcaaaaacataaataaaaccccccaaaaaaatgaattagccatttactattttcacatttcagtttttaaccttactttggcagtaagtatgagcagtgggtccacagtaaggcccatgagcccaaatttctctgtcgtggtctatataagtgcgcctaacccaaaccctaaagtctctcgaaaaaccatcaccggggaatctgacggcggcttagtaccggcggctactgcaaaaaggattgtgttcttcttaggcttgatacttgccttgggaagaatataacaatcattttgcggtagctaaaacgctaagctctatcgtcatatctttatcattgatacttatttgatatctaaatatcataaaaatggccgctcgttcactctccggtgccgttaaatctctttgtccgccgcatccggaagtctgtcttgttccattgtcttaaggtacttatgtttgaactgatcccattttttcaggttacaatatataaacatttacacactctttcatttgcttagatcgtataaagaatttataattctaattgaataatagttgatggtttgaatttgagtgaaggctaaagattgatctatcattaataaacgtaattaatttacttagatctattaaagataattatgcatgatattatcacgttattttctacgttttcgttatgttatttagtcatttgctgtttatataatcttaccttcaaaataaattattggaatgtaggaggagttacgttgctacatcgcagaatgtaacagcagcaggattgagtaagggaggttccaccagagttatggtggggaagatggaacagagaggtttagatcaagaggcagagtctgcttggggaccagatccagttactggatactacagaccttccaatcgtgcggctgagattgatccagctgagctcagagagttgcttttgaaaaacaaagcaaagtctttctgagaattttgattggttggttgacttggttccagtggaaggttgtcgtaggcgactattctgattatgtgtgtttatgtttgtcttgtatcaactattaagtaaaaataaagatcacattaactagttaaaaatataatatctgtttggatcgactaacacaacatctttagtataacagtgtcttaaatgttttaagagataaatggggatatacgaaaaatagaaaacgttgctaattatgactaaattatgatacttaacaacgtcaacaacaacaaaacaagatgatttcactatggcattatattttgtgaccacaatcttatacttgttgttgttgtcaacatcaaatacaacaatagaaaatgatggtgctttttcataccccatataaaattttgttgattcttcatgcccatagttttgttgaggctgctaatggcctaatagtcttagaaaatgcaaacggactattgagggttgagaatatgctgtaattcggcccacttctgggctagtcgagtgaatacgtaaggatcaatcatcaatacttggttgccacaatagattatgaatcagtgaaactgtgaagggttcaagatcttagtatatatcataactaaatattatcactttgtccactaaacttaaaatgataacatcgattctatgctataatgagatactgagatcaacgttttggctgcttttcctcctttggtcttagctagtggtgctattttaaaacttttcagtactttttcgttttaggtttactgatgtgtttgttatcggaagagttttgtctctgttcaattttttcttagaaaatatttttttttgaacatgtattatttctcaacatttgtcagtctaaacgtgttgtcactcacatttcttcccccaacaaatatcaaacatgttgtcactctcgttttcatatatgaaattgagcatcaacaagtattgaggaggacatatccctgagctagtcattatgaccatgttgttgtgtctgaaatgaatatcacgatccgaacgctaaagggaaatgtcaaagtccgagagacgagtaaaactgaaatatgtttgctccacaaataccgaaccgtacgtacgtctgtatgactgtatacgctcacttgcaatcgaacgtacacaacgacacaagacgtttttttacgaataatatctcacaaactcaaccgtcaagaatctcaaaacttatccaaacaaaaaagttactaagcctcaaaacatagtaaacactccattctcttatcttcgcttaacaaaagatgcattacaataacaatccctaaaatatgtaacatcttcaaattaatctaattttgtccaaaaaaataacgtacacaaaatcgcacaccacaataatgtaacaaaaaatataaagatttgtatttataagacccaaattaattaacaagctcttgacataaaaaaaaagggatttaagagaggagaggttcaacacgtgatgtgaggccttcctcttcatcttgagcaatctcacttaaaccgttgcttaaaccaaccggtttggcatttctgtaaattccataaagtatgagttgcattgtcccaaacacaaaccccactccatttggcacctatccaatttcaccacataactttaattaactaaattaatcaatcaatcacaaatacattatttctcaacaacataattataatcaacgcctatccgaaatcacaataaaacgcatttgaaaatgtccccacaaaatagtagttgttgcatttttgaaccagacacgttctttaaaaaattaattgtttgaaaaaaatggccaaaaaaaaaaacattttggttaatgttggagacttggagtccacaatttttaaaaaatcattgagcattaaatcgattttttcttttccagaagattttttataaactgtgacatgacctgacactaatggggtctaattggggatgtaaagaaaacaacaaaaatattttgggggtattgctggaatatcgaaaaagatatggggtcgatgaaatagctttgttaagttttcctttttgtcttttgaatgtgtctaaagccaaaacactaacgggacacagagacggcatgagtataagggtgtaatcataaattaagaagtgaataaaacagtgaaactatacttacgagtaagaaaacgtcgtgttggagtaaagcatagacagcccaaatcgcgccgtttaagaagaggaaaaacgacaaccaaaacggcatgtatttcacgctctttgttgtcactactgttttctgcatattgtattaagaaattagacactatgatcagtctatatattataacagatattgtgataaactcaaaacgtattctatttattttgttgcgaatgattgaaaatgaaatgttacgtatatatgtctttatccaagatatggacctaccataccaagtcgtggtacagtatagtagctggaaaataaataaacaattgggacgttgattttcatattttagatgtgaaaaaaatctaatgacgtacaagttcatataattgatatgtgactgcgatttttttgaagacgtgcttaaaaatgccatgtggttgttggtttatatatgatgattgcatgtatatatgaacgaaaataacctttataaaactaaatgaacaactaccaccaaaaataaccactgaccttatttctgaaaacagaaaaaaaaatatactataaaaacgatattcgaattccactaagaaaaagacaaaaattgctgcttaaaatataaagttaattaaattaaaatcaatttgtttgtctacaaaaattgaattttcagaccaggtgggtcgtttttttttattatagacggctataagctttttgtttggagtataaaaaaaaatcatttctagaaaggaccaagtggatatgaacaatgacatcttttattgcaaaacgtgtgtgatatgatactaccaaaacgctataaaataatgtttttgagttttgacagatgaggtaaaattaagaatgaaacttaccattgctgaaagtggagaaccatacattataatgtttagaccagcagatatgaaacctattgattgagaacgcatcttctcatcttcaaacgcacttctcgttgccacaatcgccgcgattggaaaaaacacgttcaacatcgcatccacatccactgttttcagctgtaagaacaaaaaaaaagatcacattgttgttaacatatatacaaagctcaattatttgaaccaacaactactttgtaaaatgtagaaatacattggaaactctactttacaagtcatcatcgtatttcttataacaagtggatcaaatattttaatcgacttgactttagggagaacaaaaaagaatcaattaaaagtgagacatagaaatctgataatcagatccaaatctgaataaaaatgaatcaaataaaatgcagattttgtaaccagctatcatataggaaacactaaagatcatgcataatagcatatatataaatcagaatatcataaaatagaataaattaaaaaccttgagatgtcgaggggcataaaagagaaaaagtgaaacgtagatggtttcaacaagagcaccaaagccattaacggtggagacaagatattctccgggagtgacgatgccgtaatatgtccatagcgatgatcctaacaacgtgcaaatgtacggcaagcttttgtactcctccgttgatctccgcttcactattttccaaaacgtctccctgatgatttttgtttggtatattaatatggaccgatcgattaataatctaagtaagaaagactatagattatacaattttgttacttcttgcaaggttagagagcttacactggtgagaggaaaactagtacggagattacatttcctgcgtcaaacacatatatatgttatgtattggatcgtgcacttgtgtttatacatgtacagattatgagcacaacgtacacgttagagaagaagtattacctatgactccgatatagaaacttgcctctgccattattggagaaagagtttctgagagagagagaaagagaaagagacagagagacaaagagagaaaggaaagaggaggaggcttcttaattgggggaaacgtgacttgaagtcttaataatgtttttattttatttgttcacactataatgattcaagtatgcaagtgtgtgtctattggtgtgaatggatagtatcggatgaatgaatgacaagaaaacaaaattaatgatttggttaaagtataatagaggaatgaagtgaaatagataatggacttttcttatctttctaaactggagattgtttttcatgttatgaaaaaagtttactggaatatagatttacctcactctgtagcaaattgtacccttttagtggaatataaaaatataattttctacttctttttacccatcatttttatttatataaactagtataagctacatactagttgattttggtctataatatccagatttgagactaattttggcaatcaatatgagaaaataaatttcatgcaattagttgcaccatatgaataggattggtaaaagtgatatagttttcttcttaaatcacccataaatcttaacctaaggatgggcattgaagatatgtaagtagttaagtcaatttgattacccttttctgaccggagtttgattctactaaatcgcgttatcttgcgtagtatggattgactatacatcgagtcttgtggatccaaaaatgtatataaaataaaagatgggcacaaatacttggtaattttcctttatccaccttgaaaacataaacactcatcattattaagataactaatactcattctatttcatattagttgtagtttaaggtttttacacacatattaagaaagtttttaaaaattcatttaatatatctcttttatataaaaacatcatttattataaccaattcaaccaataaaaaatatataattaagtatagttggttaaaaagtattgaatatatttattatttatacacaaagttgaaaacaacagttattgtgaaaaaatataaaaacctttaaattacatttatattgaaacaaagggaataataagtaacataactttgatacttacaattaatttgcaaatagttttacaaaaaacacgtaatagaacaaagcaagtaaagtaaaatatttttagcaaatatttgaaattgaagatactcgtttctcacaagtcaaatacgaatactaattttacccttacaaaatgggtcaagtagcaaatacttgtcctgtgcccatccctaatttttgcaagcaagatgcactaagtatgagagagttttgtagaacctagtgttttatagcaaatctgtaactaatcctaaaatatggaattacataagtagtaaagtagcaaccaccggtttactttctgaggaattagcaaactattaatggaatgaagaccctttctggggaattagcatacaaaactaatatgagaatttcatgtggtgattattggccaaggcaaaagtcttgactacataaattctaccttttattcagactgaacaacagctcttttaatttttacttcctgcgctagttttttgttcctattaaaagagtcattcaagatttcttaggtaaattcttaaatgaactaaaaataaattttgttaagtaatcagaatcaaaggaaaacgatggtataacagtctggtatcatatcccacttggttgctactcgctagtaaacttcaaccacaaccctctgtccctctatgacgttgatgccacttttaagactaacaacaataatattgtcttttttttcttctttcgaatccacatctcttgaaattttgttaaataatttaaaatatgtaatctatatgtctgtgtgtacatatgcataaatcatactccctctgtttctaaatatttgtagtttaaaatttttgcacacaaattaaaaaaccatacaaatctcatttaatttatctctttcctataaaaacatcattaattacaactaatccaaccaataaaaaatatgatgtaaaatacaattggttaaaactattaaatacatttaatgtttgcatagaaaagtaaaaacaacacttatattgaaaaaaataaaaaacctttaaactacacttaattagaaacagagggagtaatacggatctacgagaaaaatttagtgaagtcgcggtcgaaggaccttaggttggtggctagaccatttcgttcaaatcaatcccactttctttcatcaagataacaaagattcacaaacatccttaccaaatgatacaaccaaatgaccaaccaaatgataaaaactacctaaggtctatcatcaagtttttataagttctatttatcacttaatatcacaatggtgcattcgagaggatacaaccaaatgaccaatacacatgtatttttaactgcttgtaagtatcacatatctcatgattttaaaacaaaaatattgatttacttgtttattattattattattttttctatacttatttggtttgatagtagatgtttttatatatatttaagatatcattttatatatcttgagactgtatttatacctctcttctttattctacaaactacctgtcaaaatagttggttttgaaatgtaacattggtgatgatttttcttttgtctttaaatgtaactttggatgacaaaattcagtaataataatgggcctgaggttatgaatatagaattccactttatcacattggacccaaatttgccatgatataatataaaacgacgtggtatcaagtgttcagtgagtgtgagtcctccgacacgaataatctagaaaattttactaagactagtgtcagtatttttctaccacactcgtcgccttgctttacgctttattctctcttctttagctttttatttcttcagcaaatctgatttcaaaaaaatttcatcgaggaaactgaaaaaaaaaaatgagtgacgggaggaggaagaagagcgtgaacggaggtgcaccggcgcaaacaatcttgg

SEQ ID NO: 585 - DNA, 209164 bp, Arabidopsis thaliana
tattggagaaagagtttctgagagagagagaaagagaaagagacagagagacaaagagagaaaggaaagaggaggaggcttcttaattgggggaaacgtgacttgaagtcttaataatgtttttattttatttgttcacactataatgattcaagtatgcaagtgtgtgtctattggtgtgaatggatagtatcggatgaatgaatgacaagaaaacaaaattaatgatttggttaaagtataatagaggaatgaagtgaaatagataatggacttttcttatctttctaaactggagattgtttttcatgttatgaaaaaagtttactggaatatagatttacctcactctgtagcaaattgtacccttttagtggaatataaaaatataattttctacttctttttacccatcatttttatttatataaactagtataagctacatactagttgattttggtctataatatccagatttgagactaattttggcaatcaatatgagaaaataaatttcatgcaattagttgcaccatatgaataggattggtaaaagtgatatagttttcttcttaaatcacccataaatcttaacctaaggatgggcattgaagatatgtaagtagttaagtcaatttgattacccttttctgaccggagtttgattctactaaatcgcgttatcttgcgtagtatggattgactatacatcgagtcttgtggatccaaaaatgtatataaaataaaagatgggcacaaatacttggtaattttcctttatccaccttgaaaacataaacactcatcattattaagataactaatactcattctatttcatattagttgtagtttaaggtttttacacacatattaagaaagtttttaaaaattcatttaatatatctcttttatataaaaacatcatttattataaccaattcaaccaataaaaaatatataattaagtatagttggttaaaaagtattgaatatatttattatttatacacaaagttgaaaacaacagttattgtgaaaaaatataaaaacctttaaattacatttatattgaaacaaagggaataataagtaacataactttgatacttacaattaatttgcaaatagttttacaaaaaacacgtaatagaacaaagcaagtaaagtaaaatatttttagcaaatatttgaaattgaagatactcgtttctcacaagtcaaatacgaatactaattttacccttacaaaatgggtcaagtagcaaatacttgtcctgtgcccatccctaatttttgcaagcaagatgcactaagtatgagagagttttgtagaacctagtgttttatagcaaatctgtaactaatcctaaaatatggaattacataagtagtaaagtagcaaccaccggtttactttctgaggaattagcaaactattaatggaatgaagaccctttctggggaattagcatacaaaactaatatgagaatttcatgtggtgattattggccaaggcaaaagtcttgactacataaattctaccttttattcagactgaacaacagctcttttaatttttacttcctgcgctagttttttgttcctattaaaagagtcattcaagatttcttaggtaaattcttaaatgaactaaaaataaattttgttaagtaatcagaatcaaaggaaaacgatggtataacagtctggtatcatatcccacttggttgctactcgctagtaaacttcaaccacaaccctctgtccctctatgacgttgatgccacttttaagactaacaacaataatattgtcttttttttcttctttcgaatccacatctcttgaaattttgttaaataatttaaaatatgtaatctatatgtctgtgtgtacatatgcataaatcatactccctctgtttctaaatatttgtagtttaaaatttttgcacacaaattaaaaaaccatacaaatctcatttaatttatctctttcctataaaaacatcattaattacaactaatccaaccaataaaaaatatgatgtaaaatacaattggttaaaactattaaatacatttaatgtttgcatagaaaagtaaaaacaacacttatattgaaaaaaataaaaaacctttaaactacacttaattagaaacagagggagtaatacggatctacgagaaaaatttagtgaagtcgcggtcgaaggaccttaggttggtggctagaccatttcgttcaaatcaatcccactttctttcatcaagataacaaagattcacaaacatccttaccaaatgatacaaccaaatgaccaaccaaatgataaaaactacctaaggtctatcatcaagtttttataagttctatttatcacttaatatcacaatggtgcattcgagaggatacaaccaaatgaccaatacacatgtatttttaactgcttgtaagtatcacatatctcatgattttaaaacaaaaatattgatttacttgtttattattattattattttttctatacttatttggtttgatagtagatgtttttatatatatttaagatatcattttatatatcttgagactgtatttatacctctcttctttattctacaaactacctgtcaaaatagttggttttgaaatgtaacattggtgatgatttttcttttgtctttaaatgtaactttggatgacaaaattcagtaataataatgggcctgaggttatgaatatagaattccactttatcacattggacccaaatttgccatgatataatataaaacgacgtggtatcaagtgttcagtgagtgtgagtcctccgacacgaataatctagaaaattttactaagactagtgtcagtatttttctaccacactcgtcgccttgctttacgctttattctctcttctttagctttttatttcttcagcaaatctgatttcaaaaaaatttcatcgaggaaactgaaaaaaaaaaatgagtgacgggaggaggaagaagagcgtgaacggaggtgcaccggcgcaaacaatcttggatgatcggaagatctagtcttccggaagttgaagcttctccaccggctgggaaacgagctgttatcaagagtgccgatatgaaagatgatatgcaaaaggaagctatcgaaatcgccatctccgttagtctctcttactctctcttcgttgtttatccgattttgttgtgtacatttttcggatgtagggatttgttatcctgatcttgagtcttagggtatgagtgatactaactgttccctgggatttgtttttggaagtactcacttagttatctctggagttcgatttcaacttagtgttgttctctccaagtctcaatttgttgatctgaaggttattgtgtacggaactagatttgatttcctgtaaccttttccttgattaaacggtgtttttgaattgcctaatcaattggttcaactaagagtctggtgaattgtctatggagtgattatatgtgtactctgatagataaggatttgcattctgagatttgcttttgcaggcgtttgagaagtacagtgtggagaaggatatagctgagaatataaagaaggagtttgacaagaaacatggtgctacttggcattgcattgttggtcgcaactttggttagttccctcttctccttcacttagtttctccttaagatggcatttatcgatgaaaagttctcagttaggggatagtgatttcctagtaagtatatctagttttggacatgttatcctctttagctcatttttgagttttgcttctgtgaatctttgaatctcgtctgcttaatagtgactcatatcaatggtttggttacttctctgtcttaactagacttgctttggaaaaagttgttcttcttgggatgaattgtttttgtgcgcttagtgttggataaagttacgggtttagtccctgtgacattgacataagttcccaaactgcagataaataagatctcggtaccaatcaaactaggacactaggtattaatcctctgaagcaatttagtagcctgcaataggatgtgttgatcttgatcttataacctagttaccttcatggaatacattttgccttgttcaaatcttcttatgtacttcagtattgaatttactgtttctgtaagcatcactaagtaccactcccctagctccactgttcttgaatttaagatttctcttatctcaccaaaagtcgttgcggtttttagtcatgtgcataagatgatatctcaacagaagtgatacatctctgaaaccatactggcttctattattcatctgcagaatctttcacattcgaaacttattcaaccatattactcttttcttgcaggttcttatgtaacgcatgagacaaaccatttcgtttacttctacctcgaccagaaagctgtgctgctcttcaagtcgggttaagaatttgaaaaccaagaaaactcattgtgatgttcagtcccattatcatcatcacgttgtagctagtttcttgtaatttgtatgtatgtgttgcttctaaggcttttaaccgaaccaaatttggagaataaaccctataaaaagtcttttagtacatgtcatgcatcttcaaatgtaaatttgatttcaccagatctaaaactcagctttgataaatcagatattccggtttcttcattcattgatcaaaaatccgtccaattgatatcttaattctgaattttcaaattcttggaacaaaattccggtttagaatttacaaatcacgcaaattctcataatttgttattttcaaagtttaagggtcttacatgtgaaaaaacagaagtttgggattgaaatagtaaattctgttttggaagtgattcaatcacaaaattacaaaagttaccgaattccatttctccacgattctgaccaaaaaaaggagaaggaataagagaaaagtgagtttgttgtttgtatcgatcagaaaatggcgacgtcgatgatacagaggatgttcaagcaagggacgaagatcgtctgcgtcggccgtaactacgccgctcacgccaaagaactaggcaacgccgtccccaaggttcttcaagaatctcatctcttttagaaatctatctgtaattcaattgttacggagtttttgttcttctctgttataaatctaagagaggaatttttgttgttcctgtttgaattgggaaacaggaaccagttatattcttgaagccaacatcatcatacttagaaaatggaggaacaattgagatcccacatcctttggattcacttcaccatgaagtagaactcgctttagtgattggacagaaagctagagatgtacctgaatcaatagccatggattacattggaggtatttcaatgtatagaagcttcttttgatttgtataatgttcaattcttatcgtttttttgtttttgtttttgcaaggatatgcggttgctcttgatatgactgctagggaactccaagcttctgctaaggtagtaaacctcttttggttcatatcaatggatcttgtggtgatttactacatgcatacaatgttcgttctattctctttttgctttgcatttaccaattctttggattagtcttaggttaaacccgcacaaatggtcaaaaacatcgatgatataactcattctttattgaaaagtcttctataagctctatggattttcatatttgggatcgtgatttaggcttttaggactgtttttaaccaccatttttatataaaacaaaatcatgaatgtgtggttttgcatgaagggtaatctgtttattactttagttttgtgcttaagcatatatcgtgtttacgttctcttttttttcaggcatctggtctcccatggacggttgcgaaaggacaagataccttcactcctatcagctctgttgtaagtattgatctcaaatctagatgttaattgcagcacactataccatatgaaaaatgctacttttgtgctgtttgatggacccatttatttcgtttgtctgattgcaatgtgatcagattgtagtatatcggttagtttatgaccacaagttgtttgatttatatgtagttaagactagaaaagtcttattgcaggaggtctaatgctatcatatagccaacttgacatgaggatcatatgccctgtcctgctgagaatcaaaacacttttgattctctagtttaagttattttttatcttgttgcttttctgacatgaggatcatatgccttatcctactgagaattaaaacttctagtttacattttgtctcttctgtcccttttcagctgccaaaggcgatggtgcgtgatcccgataatctagaactttggctcaaggtttgtccctccaccacattttttgttctgttgtcacttaaaaagtcatttccacacttaagaatttgcagggactaaactgaatctaatatgtgacaggttgatggtgaaacaagacagaagggtttgaccaaagatatgatattcaaggtcccctacctcattagctacataagttctataatgaccctttacggagatgtcatcttgacaggtatctacttataacttctgtttgttttcccaccttaaaccattctgaacttataggacaacaatcccttcaacttataggcacaccagaaggtgttggacctgtaaagataggtcagaagataacggccggaatcaccggtctatctgaagttcaattcgatgtggagaggcgtgtaaagcccttgagctaataagtggttttatttatctttcatacaaaaatgtcaattttataaaagcatctctaaaattttcatcacttactgtgtttcctaaggaagggagaaataaaactcgttactcattttatttgtaatctctataacaatggctctaagaccggtttaaattgtttatatgggagagtatttgtaaagttgtgatatttactgttggaatcagcaaattttgatatattgtcgtctacagctacacgactccaacattcccattaatcctgagttatgtataatacatacaacttgtatgatacaagtgagcttaagagaatacgaaacaaactatccatgactagtcaagataacacagaccactgaagaataataaacacatgggctcaagtcgtgggctattaagaaaactaataatgatggaccctagtatataagcccaagaagcccaatcgttaatatcactttactgttcaattccaacagtgattctcttcactgtagttttgtaaagattgcatttttatctgttttgagtctttttgcttttttatctcaatcgtctctcgtagcagaaaaatgtcagagaaaggaggcaaggggctcaaatcctctctcaagtccaaagatggtatgtgtatttcccactctgtttctttgttgtttaacattactttcctcgagattcgtttctcagtgtctagggtttttgttgcaggagggaaggatgggagctcaacaaagctcaagaagggtagaaaaatccactttgatcaacctttaaccttttttgattctcttcatttgatttcgcattcacagtctgaagctttttttccttttttgatttgataaaaatgtcatctttttaatgaatgtgcagggactccacctgctaattacaagattctcaatgtttcttctgatcaacaaccatttcagagttctgctgctaaatgtgggaaaagtgacaaacctaccaagtctagcaaaaactctctgcattcgtttgagctcaaaggtttgtgaaatcttccctctttgcttgtgaagggccttggttcgttctggttctgtgatttgatcttttgctgtgtgatgattggtctttgtagatcttcctgagaatgctgaatgcatgatggactgtgaagcttttcagatattagatggaattaaggaacaattggttggcttgtctgaagatccgtctaattaaaattcctgtgttagtaatctcttaacacaacatttctctatgctgtggaaagtctctggctctcttttaacatgtagtttttgtttattcagatcttatgacagagcattggcttatgttgagagttgtgttcactacacaaaccctcaatctgtcagaaaagtccttgagtatccttttggctgtgctcaggctccattggattagattcgtttctcattctgtataatttcttattgtgtgttttcaaacttaactgaatatcagacctctgaaaacgtatggtatctctgatggcgaggtaaagagcttactacaagcatttgagtccaaagctttatcattcttttcttaatgctgagttgttatatgcagatgtgtgttattgcaaatgcttcttcagagagcgtagatgaagttcttgcctttattccatcgctgaaggtgaggcctttagaactaccagagtctgactctgatgtgtgtgttgttattctttgagatcttaattagctttgggactcttatcaatcccagactaaaaaagaggtgatcaatcaacctctacaagatgcattggaggagctatccaagctgaagaaatcggaatgatgagcagcagactgctgcagtgaatggttcaatgctaggagtagtttgcaggtagacatcataaaatgtaattgcgtctttgcctttctcaacattaaccaacctgtgcaatggcaatggcaacttttgtctagtttggtcattggcactttctatcactagtgtgatttagtatattgctagggaatcgtctgtatttatcgttgacagtagtattttcgcatctgaagacaccaaaatccttcatttcgtgttctcatatgggaatcttagaaatctgacttgaatggaatcggcctagctaaaaagggaaaatatataaaaaaaattgttgttgtttgagaatcttattatcacgcttggctatattggaaaataaattaaattacttgttatcttatagacttccattattcttcttctaaatgcatattttcgttaaaatatatataaagttgaaactctccataggtttaagttttccattttcattacgataccttggtggaatgaatactttacattttcattcttaacgagattacaatgtatcagaagatgttaagccgccaaaaaaatcagccggtttatagacttccattatttcttcttctaaatgcatatactgtatatttatttaatagtctttcatagacttccattatctttatagtttatactaaatattggaattttccatatataaattttctattttagtttttttacgatatcttaattagtggaatgcttatttccatttaattgagattaccatatatgagtgtatatatatatacacacagtgagacacatagatgtataggaaattaaagacaattatcgtagcaaggttttgaaatctcacagaagaaaactttttgacaaaaggatcgatcacaatgtcgctgttacgttttgctatactttgcataattttcgtttccctctttggtgtgcatgaatgtaagtatatttataagtctagttattggcttactgctttcgatcaccaccaccatcaatctattataatcatcgatgtctaataattgtgtttcgtatataggtgaaaacgtggaggcttccgtggagaaaagataaatgtacccgctcatccatgttaccatactttatgtggaagcatgatacgcaactgttattgctgccttggaaaaaagtttgattactgctccccaaaccaacaaaactgtttgtttagatgcgaggaggttaaccggattccagatttcccgaagacaaacggagtaagcaaaggattagggcccccaatctatttatttttcttaggacaatttatttattttgttttaggtttatagtttatttacgggtgtttaattataaaaccctcgactaataaattgtaagaaaatccttcaattatatatttagtgaaaaaccactcaattttactattacacatatttttgaggatttcgtctataagaacatcaaagtgaaggattttatcaactgtatgccctaattctaaatgttggcgcttgatacacatataagcaagagaatgtagaagcataaaagttggatattcttccaagagtctagaaacagaagagaccaaaagaaggaaacttgatggtttgtgtagcatgtaacagaacagatgattaaccacgtcatgcttgcaattgaacaagtgacaagaagaacacaactgaataggctaaaacatgcaagaaaacgatttctatagaaggaagaaatataacgctttaatcgttttcgtttgtgacaaataaagcgttttatttgctctgccctttcacatgataaggaagatgtatataactctttattcctttttgtttgtgatttctaaatacaatttagctctaaaaagtaagaaaatagtcgtgaatgtgtttacttatctcgtcaggcctttcctcgtggataaaatgaccgacgcctttaattaccacaacttcgtccaacaacgggacatggctcttaaaccggccatcgtggatgtacttcttgctaccgggaatgtgatatgtcagatcttggtcgccgattatgaacttaaccggaactttcactttagcgtttgatagtgaccccatcagctcccatgttctgcaaagagcaaagaaagaaatgtgacactaacataaagatcttgatccgagttttatgtctgaaaattgtgattacacggatccaaaatctaaatcaaagttcagcgtcaccaacttatataaacacacaattacaaagaggccactcaatgacgatggctttataagaagcatttacaatcacaataacccttctgatcttacataaagactaaaggactccatttaacagggcaggcctaatgaattaagaataaacactacctcaactattgctcaaagatatacatgcaaatgcatctgggtcctgaatgaattcaagcaagttttataaggcttaaaataaacaagcgattcgagagtagcagagtctataccggtccatatttcggtagtagtttactggtccagtgaagccattcttctcatactttgacacataatatttgacatctgaatcagttagccaagagggaagtgaaacagagtcatcatagcgttttacttaggtagtagatagaccagggttacgatatgttaagaaccttagcaaattccgactctatttccccatattcctacaaaatatataatcccaccagttagaaaacagtcctaatgtctattcattcaccaacaatgcacacatgaatcttgatgagaatttccaaaagctaccaaatataatcagatcaaaccaccacaaccaaaagatacattcaaaactgattagttgcattgatctctttctaatgactaatctcttcttcaaacatccaaaatcagcaatactcaaatgtttatcaacaatctagttactactgtgttttactaacaaaagcgtgattaacaccaaattccaaacacatttcaaatgttgaacaccaaagattcattagaatcaaattcaagattcataaacctggaatctgcagatgtagtagtcatctccatagaaagctttaaacgtcgaggttggtttccgtttaggattccaaggatcaaacaccacactcatgttaaccaaagctttaaccctatccggtcgaaaaagacagagatgccaagcgataatagcgccccaatcatgtcccactacgaacaccttttcccgatctccaaccacggcgtcgatcaatccaatcagatctccaaccacgtggagacttgtgtacgcgtccacactctccggcgcgtcggtgtctccgtaaccacgaaggtccggcgctatagtccggtaacctaacgaagatagtgccaccatctgatgccgccacgtgtaccaaagttctggaaatccgtggaggaatagtatcaccggaggtcggatagctccgttcccggcgacggaggggcttttctcggcgacgtgcatagtgattccattaaccttcacaaaactatgatcaaacgtaagatccattcgtagtgatgactgatgatgaagacgtagaagaagaagagatgatccaaatcccaaatttggaggaaaattcttaatttcatattaatcggtccgatcaagattaaatccggtttactccgattttcccggtatttattggacataagattttcactaaccggtaaaacacacgaatgttatttttgttttatttaacgattccttagtttatgattttaaaggaacttgtgaaagaagttgtgaatgtgttgattgatcacgtcagggttttcttcgtgtaggaaatgtcccaatcctttgagcacgacggtttcgtctaacaatggtacatctctcttgaaaccgccaccgttgatgtattccttagcccccggaaaattgtacgtcaaatcctgatctccgattatgaacttcaccggtacacggatcttagcaccggtccatggtgcagtcagctcccaatttctgcgaaccgattggttaaaatatgaaaattatgtgatgatactattgaaccgtgtggtgattaaacgtaccggtcaatgttgcggtagtagttaatgggtccggtgaagcctttgttttcgtacttagtgacgtaataatcaaggtcttcttgtgttaaccacagtggtaacgcagacgcagcgttttctgagcgtttgaaatatttgtctttggggagattgagcggtccaggggttttgtatgtgaggaactcttttaacacattctctgttcccaacttcttgaactctgtctctatctctccagctttcttaattacaaaataatcactcataaatgttactgttatataaaaaattaaaaacgtaatcaaattcacttgtcattcaactgtataatatttatttaaatttcttactttaaaatcatattattcgttttctcctcttttatatgattccattgatctttctttccatcgaactaaccaaacttattgatttggtatacggtcctaattttaaagattagggcagcaaattaattacctgaaatctgcagacataataatcatcaccgaacacgtgtctcagtgtcggaaccggaactcgaacagggttcctcggagagaagagtacgctcatgttgaccagagccttgactttctcaggtcggtattgacacaactgccacgcaatcatcgctccccagtcatgaccaacaacagaaaccgccttgtctccgccggtcacggcgacgattagtgcgaccacgctccgtccacgtttaagtaaggtgtagtcttcaactttctctggcgcttctgtgtctccgtacccacgaagatccggcgcgatcgtacggtatcccaaggaagagagcgcaaccatctggtgtcgccacgtgtaccaaagctccggaaatccgtggaggaagagtatgatcggatcttctccggatccggatccgggtttctccgccacgtgcatgtttatgccatttacctttagggttttgtgttctacgccgtcgagtctcgacttctctggtcgttttgtttgattgtcgggtaatgtagagaaatgggtagttggatttgggttttccccaagaaaacgacggagtctgagaggaaaatggtgtcggaatcgtgaaagtgagagttttctacacaagaagaacatgtgtagtttgatgtgtttggctgcgagaagacgttgtgtggataaatctccggtcgtttaagaataccgaaccaatggtccaatcaaatgtgtatgtataaaactgtaaagcagatcacaaggaatataaaagaagaaggtaatcaacaaattattcgaaagtgtttcagatttttttttgtatttctttcgaaaagaaagccaaattcttagagtggatacaataatgttaggatttcttttgtatttcttttgaaacgaaagccaaattcttaaagtggatacaataatgtaaggtctaggaggatacatctaaatagtaggtatatcaacctttttgcttgatggttaggtttggtatcatcgtttcttctttagtcatttcatcacttaccttcgaatgctagctaaaccggcatttgcgtgtcacccggaaaatctatgtgtctaattattctttttttttttcattcgtttcaaaaactcttgaaacacggaccgattaaacaacgtgagagtggaaataatagaaaatttatgtcgaaaactaatgatatcagtcaatctaacgaattgtgtatataggtttggtgaagtcagggaaaatcagaccggcagttcaattaattgagttaaaagttaaaacccatgtagaaataattattttttttatgtttaagataaacaataaatatgttacctgtgttgataaaacaaaaatttgttacgtttatatggttaataatataacacatgtttgtttggttaagaatataaatttagatgtaagattttctttaatgaatagatcggattgtttcatcaaaagcacatcctaagagagttgcaaaaacccactaaaaactaaatgcgaaccaatcaattgaattaatcgactagtccaaagcaaaaaaccattgaaaaaagatgaagaggccagaagcgacatactccaaccaacgtgcactggagcaacgtactccataccacatagcaggaagccaatgcccgatggaccaactcatacgtgctaccacgatggaagatcgataataagtggtcgagccatgcatccaaagatttggggtcgaaatacaacgaaagtaaaatcttatagatattacatggaaaattatatcatcccggataacatccaaaataatatatataaagctcaaaaaagctcttaaccgttagaacctcaagctctaatgacaacattctaaagggtttttggaagagtccacataatgtcccaagtgacattgaccgtctcttgcgtacaagtttttttttttcgctaaaaggttaatatcatataaatgaaagagaatttgggattacattttgattaccaaaagagatagatccttgggaaaaaaaagttaagaaaacaaggaaatataagtaagtagggcattcttactgagcctcaatgagtacgtacaagtttgataatctccacagtcggatattatgagtaatctgcacaaacaacaattattacaattaatatttgaagattgttaagaaaacaaattgacaataaaaatttagtaccaattggatttttaattgcctaataatatatttttcttaaaaaatcattttaaaaataattaaataataataactacaatatttaaaaattatattatctaaataattaaaactatcaaagtattttcctttatttttcttaataattaatctttatcataatttcttaactacatagtactaattttattttattttatttattagcacagatttatttacttatttagttttttttagtatgtggaagttcaagtctaaaggctctatattttccggaggcggatttatttccttcaataggctttctcatttaatacttgtttcatactttacctttcttacacaattaaaattatcttctcctataagtatactgactctcatgatccattcaaaacgactagcgttaaaggatttaaacatttgtttccctgttttccccgaattatacctttcttatacaattaaacttatctattttgttgtaatctagaattttacatgtactgtatatgtatacccataagtacattgacttgagattcagttcatgagccattcaaaacgaccacgaccagcgtcaaaggctgtgaggaagatggcgcaaatgttgctacgaggatctatgagtcgtgttgctggtcgttgccgatctgagtttggtgatctaccaaattggtgtttatccactacaactgtttctccacttctccgatgatgtcgttagtattcttctccgattcaccttatcatctttgatctatcatgtatgtatgtgtatatttgtttttgaatatctattttttctatacttttacaaatcctctttttcaacttttgcttattttttcctaccaaaaaaaaaaacttttgcttatttttttctctttctaatctcttttataaaatctttgaatttaacggaatcataggttttttttttcttacataccattcgcttatgattccaactaatttgtatgtgctgctgtacaattaactttaactttaaatcagttttatttgctcaaattttcttgttattaattggtttttcattttggcaagtactcttccttttaccactgtatgagtagcttaaaaaggaacgaaacgaaaataaacaattatctgttcttgaatcttgtttttaattattggacagcatcatcaagaagatctgaaaaaattggggaaaattttgacggaagcagcgacggaggataagacggtgataataaccaccttaaacaaggcttggtctgagccgaactccacgtttgatttgtttctccacagttttcatgtcggaaaagggactaagccattactccgccaccttgtggtggcgtgcctcgacgaggaggcctattctcggtgctcagaggtccatccccatcgctgttatttcatgaaaacgccaggaattgatttcgctggcgataagatgttcatgacgccggactatctcaagatgatgtggcgtcgtatagagtttttgggtactttgttaaagctgagatataactttatcttcacggtacctatctttcactctatttgtacttcatctttaatatgtcgttgattttggtttgtcaacatttgcatattgttgattagtgtgacaaaaccagatgatatatataggctttgaatcaaattaggaggattcttgtgtaaccccgtgggttaatattaaaatcattagtagttgatgacttcatctaattatggttagggaagtagggttcttcaagtctctgtgacaatgattttaatattggttggtcactgttaacgttcattaaatggaaatatacatgcgtcttttatagaccctaggtagcaattagtcaaaatttggtgcaagtaaaaacgaatgaattggtagaagatgtagaatttgatgattcataatgttttattaacatatggttaatgtgtgtaggacatagatataatgtggtttcgagatcccatttcctcgtctatctaaagaagtcgatttccaaatcgcttgtgatcgttatagtggagatgataaagacatccacaacgctgtcaacggtggtttcgcttttgttaaagccaatcaacgaaccatcgatttctacaactattggtacatgtcgaggctgcgatatccggatcggcacgatcaagacgtgctggatcaaattaaaggtggtgggtaccctgcaaaaattggactcaaaatgaggtttctcgacacaaagtacttcggaggattttgtgagccaagtcgggacttggataaagtttgtacaatgcatgccaattgttgtgtaggattagagaataaaattaaggatttgagacaagtgattgtggactgggagaattatgtgtctgcagcgaagacaactgatggtcaaataatgacatggcgagatccggagaattgcatgaagcaatggtggtggagaaacaaaacaaaacaagtattgagtgaaaattcaaaagaaaactatttaaatattatgttgtttatcaaaacttatatcattctaaatttttgtttacctatgaataacataagaaagttttttttttgttttggtagtattttcgtaaataggtgaaattggtaaaaggttagagaaacaccatgacatctttaccatttggtgtggacgagatgagccaaaccctactagatgcatcattaaaaatacgtaagtcaacaccacctttctatatttctctatcatcaaaaatgttattgttatatacatgattaagatcctatgagattattttgctccatctttttgatctctatacggattgtcgttgtagattgtattcagtgctcgaatctccccttgcaagttttcaatttggaactaatgtcaaaccatctttttcagctgacaatgtttttatgtcaattgtagatatataacgatgttctattattgttgagtctgttcctgttcaaaacaataaagtttaggtactctatttttgaaatttattgttgtattttagcttaatattatttttaaaatacattaatatgcaatagaaaataatcttcttcttacaatccagagagaaatcaaatattgataacatgagattttaaataatatttaatattcattaacaaaaactataaatgatataaaaactatacctctataatagcttggcatgcagtatttcaaactagtcatctttgaccatttaactaaagatgataataaagctcaaatcacacaaaactccaggaaagaaatcaaccaaacaaaacacatatgtaagagagaaacaataaaaaaaacagtcaacattggtgtcttggaaatcacaagtgtcccataactcattcttctctctcacacgccattactaaaacccctaaaatcttcattcacttctctaacccaacaacacactatctctcatttctcttcaaaaaaaaaaaaaaaccttgaaactatgagtttccatgaccaaatccaataagtccacccggtaccaattcggatcataaaagtttcgttataaacagcaaaatcatgctcaccaccacaatcttaatcttactcatagtgattcttatggtctctctccacctctactatcgttggtatctcctccgttctagccccttcaatcgcaccaccgctgcaagtacttttttcacggatccttcctccactcctggtggccttaacccctccatcatcaaatctcttccaattttcacgttctccgccgtaaccgcccttttcgcaatggaatgctccgtttgcctctcggagttcaaagataatgaatcgggtcgggttatgcccaattgcaagcatacatttcacgttcactgcattgatatgtggtttcattctcattcctcttgtcctctctgtcgatctcaaatcgaacctttcgccggtggagtaaaatcgtcgatggatgaagtcgcgatttcgatttctgacccggtttacggtgacacgaaccatcacgaaggaactgagactaccggtgattcggttcctgaagattcacagagaaaaccggcagcgattgaaatctcacagaggaatctcggagaaatagagaatgatttgtctcggagtcactcgtttagatcaccgaccgatgagccggatgatatctttcactcggaatttgagtcgagatctggagaagtgcttcttcttcttcttcttctatcagaattcctcatattttgtttccgacggtcagtagcatgcaagtgactgagttagatatcgaattgggaggagaagagactcgttcacttattcaatgttacatcacgtggattgtattaatggttgtaatttatctctttcttttttcagtttagagtttaatatgcaacatgttaatcaatttcgttctagacttattttttaaaaaatgtttacttatatatacaacattaatatttaaaaatggtttttttgtttcttcaaaactttatccataatatcagtaaagcttttgagttttatccaaatagtatgtaaccttattaaagcatatagacactacttttctatacgtgtaaaattttataaatgctttacaaaatactttgtaaaatatttttagctattttgtaaaccttataaaataccttacaaatcttaagaataattggatgagtatccaagtagtaattaccatcaagaaaaaaccttacaaaactttataaactttaaattaaatgatgggtatttttgaaagtagacatctaaaaaacaattttaaaaagcgacacactaaaatagacatttctcaaattctcaacatttaatatattttactaactacaaataatactttgttcacatgtacgtaagtctatcaattaagttagtcattttgtaacaacaccatcaaaaataaaatagtcgtttgtagttaatatatttatcactctttctaataatattttaaatctgggatttctcttaagatatatcttagacattattttataatatgtaatagaatatctcatatataaattaatgtttaaaaactattaactattaatatcttaagtatatgtgtatattggaaattaatcacattctgttaatatgcaaaaaagtatcaaatcacattaagtaaaatttattctgtaatttttttaattctgcaagttttcagtctcttgattttatttgccaatttacttatattttcgaagcaatccacagtttttttagtgtaaaattaaatccatgtctttgtatttccttgcttttgttactttatatatctatatgactcttttgtagagacaaatgttttaactgtagttatggctgcacttgtaccaactaaaaacttgcatgttcacaaagattgcatcgaattggttacaaaagtagagtaaatgggaagaacaaatagaagaaaaccaaagttacatcgaaaattgtagaaaattataattaccaaaaataatacaattataattaacttttattatgttttcttactatgtgtgaaaactctaaaattatattattcagaaatatagagagtatgtttctgtgaacaaagttgaagataaatactttttaaaagtactatactgaaatgctatatttattatatattgttaacaatatttaattaaaaatcgaatgtaattattttctataaatttttagatttaatttattagaaatattttcttatttcatatcgattatagtaaaaaaacttcacaaattcctcttatataaaatcacttttaggtgtaataagttaaaccagtgagttatcaaaacttaaagcttaatagtgtctacagaaaaaataattatgcaataacataatttcttattcttatctcatattaaaacttctgaactaattatcccgtgcattaacacggatcattaccaaggtttgtaatgaaaattaccttgttttaattaaattataattttagatttaaaataaatagtctaatacagaacaataaacccacacgacagtgccattattccaacgcgtaatttattatatgcgtatccttttagaaaagagaaaaaagtttgcaaaaattgatggttaagtcacaagaatttattcgttgatgatttttattgacatgaataacaagacatgcataattccatgagtatccttctcatgtaaacaaagaatagcttactaatgattcaatatcttattctatataaaaagtatattgtatatataaaccaaaagctctcataattgcgttacgtgaaaccaaaacataaaacaattatagaaaatagtcaaaatacaagtaagaacatagatcatatccatctatggaaattgatgatgtttatacactctttcaaacgcgtggtctaaaatgtgctggctgcaatcttggtaaagactactatagtgatggttactgttgctttcgttctggactcttctttcacaaagagtgcgccgaatccaatccaaaaatttccagcttttaccatccacaacattctttgtacatcaagatacttgcagaaaatgaagaagcctatggaaattgcaagctttgtagaggtaacttgccaaaaatatattactattgtttaatatgtgatttttccatcgatttgatatgtgcaaaaaaagaagttatggaaataattgagggtccaaaagcacatgagcatcctttattccttcttccaaagatgactatgtttacttgtcatttatgtgggctgcaagatgaccggttcccttatgcatgtaacttatgcaatttgagttttcacaaagattgtgccgaatgcacaccagagatgaagtattcttgtcatcctaaacacattctcaagcgtctcacacgtgttccaaggtacacagatggaaaatgttgtttgtgtgaaaacaaacttcattacatatttttatcattgttctatttgcaatttcagtgtggatatcaattgtgcaaagaatccacttccttccactattgttcaccttaaggctcatgcatttactcacccttatgcctcaacggaattttgtttgtgatgcttgtggaatggatgacgacccaaatccatatgtatgtcttccatgtaatttcatgatccatcaaaattgtattgataaaccaagcatcataaagatttatcgtcatgatcatcgtctttattacaatcattgccttgacgctggagattggaaatgtggagtgtgtaataaagagataaactggacatgtggggcttattcttgttcaaagtgtcctgattttgccattcatccaagatgtgtcaaaaggtttggcatttgggatgggattgaactcgaaggaataccagaaaataatgtagaggtaaagtcatacgaggtgatagaagaaggagaaataaggcattttagtcacgagaagcataatttaaagcttcaagaagaaagtgatgctaataatgaatgcatgttgtgtaaagcatgcaattatcctatatattctaactcattctacagttgcatggaatgtgatgatttcatccttcataaaaaatgtgcacctccggaaaagaaaatagatcccttctacaacatgttgacgaactttaatcacaaatgatattcgcataagcatttgcaatgcttgtcaaaacgtttctcaaggttttacttacgtaagtgatgatcataagattatcttggatgtgcgatgcggttctatttcggaaccttttgtccatgaaagtcatcctcttcattcgttatacatcagccgctcaacagaagaaaagttttgtattgcttgcggagataaggctactatggttttgagttgcgaggagtgtgactttattttagacattaaatgttctaatttgccaaagatggttaaacacaaaaatgataaagaccatttgttgtccctatgttacggagaaaaaacaagtgagcagtactggtgcgagatatgcgaggaaacactaaagcgaaaagaaatggtttattgcatgtgatgattgtgacattacttttcatatcaagtgtcgcttggagacttcgtagggatgtatcaggaagctaaggatgagtcattccaaacttatatgattcttaataatcatataaatcgaccagtttgttgctgttgtgagtctcgctgtcaattctcttccatcttaaggttttatggaaaattaatatgttctctacaatgtttgcaaaagaagttccaagaattacatgatgatatatcctgagattcagattgctagtgatttacctgaagtgggtttgaagcaaattcattattgacacatgttgcttcgcctcaaatgttatgcacacagaacatgtaaacataaaattatatttgtaaaagttaaatatttataatgtttgttttcataagatttactttattttttttaataatctcttgaatgtctgtaccttttcttttgttaaagattgttctttatctgttgtcaaagtttgttcaatatatatataaaatttgatcaattaattaaaatttactgaaacggtttctttgaaagaaacacacctatactatagattttccctcaaaaaataaacactatatacaaatcctctattttttttcttccctccggatttatatacaaacaccttttcctttaaaaagagttggacgatagagagacaagtatgatcagttagcattgtatggaatacgcgtttgtgggatccatgtgttgccacgtaagaaattcccgggagcaaactcccttgcggctctatcagagatccgcttgatacctctccacctaacccgacgaccctgacccgaaccacgacctctgttgcggtactcagtgtagaacaacgtgttgagcgcaaacgtctcgttccacttcaaccaaccttccgggtctatcacatcatcaatctctgtgttcattataattgtcctcgaaaactctttccatggccgtcccaaaaatgctctgttcctgtatatatagaagtccatatatataatgagcattaactaaagtgatatctagctagtacttatccaaagtttatagtaattatcattacttggctttcacgggaagatatgatgcatcaccggttatacggctattgtggataacaatcccagttgtctcacgccggtcttttcgtccttgtgctgtgacgatgcactgttggtgttccatgggacggcggataacgaattcgcagttctgaaaaacggccttggcgtcaccgaagacgaaatcgatcgtgcctgagacacggcagttacggtagaattgacgatgagtatggacgtaaagcgtgtcttggtaaccattcatatgacagttgaagaacacagcaaagtcggctgaaactcggagtgcgactgcttgatggcgtgcagctcctgccgtgttctcgaaccctatatcctttgccatgaaatagtccccattcaccgcttcaaacaaccacaacaacaaataattagaattttacgttaaaaataaactagttcaaatattacgaaaactatatatagtaaaatctacacattgcagattatttttgagatgaaattctatagataattttaagaaaacatgcataaattatattaaaacttaaaactatgtgtaaaatgttttttatgatttaccaacggaggcggtgcggtaggtgccgacttggtctggtaagaaggcaatgtctccagtgataaccgtctttgttggtccgtctccaacgaacatgacgtgtagcatttttttggttacctctactttctccttgtaaacaccttcctttatgtgaatcacaaacttctttgtgttcttcattggtaccattgccaatgcttgtgcgatagtcttgcacttaccactcccgtcctttgcaaccacaacattcgctttgattccattatttctaggtctacgtgcaagaagcctccgcgaatgcggtgttacccatggcgggaactctccttcctccgataagtgtcgatccttcaaagaatccaatttattaaggggattcaatttgcgaagaggatccaacggtcgattctcgctagaagttgatttttgaggagggttctcggaggaatccaacggttggttctcagaagaagtcgatttttgaggaagtttatcggaagagtcgtctaatggttgattccctgaaaatgccgattttttaggagtatcttcggaagattccatttgttgattcttggaagaatctaatggtctattatttgaagagtccgacgactgattttctgatgaagaatccactggttgattctccgaagagtccactgtgctaggagaatcatcagaagaatcttcatttggaggggaatcttgggaagaacccaccgattcgtctcgtgaagaacccgaacctaaaatgccgagtctgcctcttcttgactgttaaagacaaaaaaaaatccagtgtggattattcatacctaagaaaattagtttatagaaagttaaaagaaaacggtaactatagaaaaaattatttgatagagagtgacatgaatgtaccctaagaaatggaaatggaatacggaaagccttcaataatttatcgagatttgcggcaatcgccaatccattgctagtgagatgctgccccttcctcatgactctctccatcatcacggccgcttcactatcaatcccttcaaatccatcaatgcacgtctgttggtatgtgattgatccgctaagccacacacaaagatcctcaacgaagtctgacaatctagtgaacaaaaatcccctaaatttatccctcgtttttcgaagatcatcaatcgcatcatccataagctctctacaagtattaagcgcttctcttgtgtgcatatcggcatctgctctactctttagatcaatcatccctctgtcgattccacttcgaatcgagatgatagcaaggtcaaaagcagatcttattagatttcggggatccggcgacctcacggttgcgagactcgtggtgcaatcttgtttgtaatcggtggaggcacatataatactcaccgtcgtctttgttatcatcagcttgctttcacggtgaacctcttccattttcctactcgggctgttgccatcgttggcctctacacaaatgaccattgccataatgagagccgtgacgcctaacaagacatatttattcatcttgcttgaataattccatccattccacattctttttttttttttcggggaatgttttgggattttttagaatatcaattgctaaaagtaagttggtttcgaagtcaatacttatatgtggaagaagggagggaaagttaggtttttaccgttaaaaaacttgaggcagtcattagtttctcaaaaatcccaaaatatttaaaatttgtttccagtggattttgctatacttgcggggaaattcatattctttttataccattggaggtgattggtcacaaaattgaatgtataaaactcatctttaaaaaattgtgtttgctaattctctatcacatgggacccttttttctctgtaaacttaagatataatgacaaaaatggaaacattgagagaacaggggcacacacaaaaaaaaaaagagataggattgaacaacattttttaaaattaaccataccaaataaataaaaaaattagcacatgtcttcttttctaatcatttatattcatattcatattcgctaataactagttcttatttaatagtataagatatttaagagttcggtgaccacatatttttcctttcaactttcttgtcgtcgcccaaatctattgtcacctcattttcaaaactaccatttactttggaaaattccttcgaccatcatccacgacttgatgttggaattcacacaagatattagggtattcatggtgcatgtgactgtgatggctcccgattcatccgcgaaaacatcatcttataattatgttaaagcaaactaaatttaatgtgagatgaaaaaacatgattaacttatatctggtaatatgtttttatgattttttttgtttgtagtatatacaaatcatttcataattccgataagattagaatttctgtacacatgatccatatgcacagccgccttgaagggagtctattattggtctgcttagcgtttctaaaatatgacgtgcttatttatgttttttttaacatacgcttattaaattatgttacaaaaagtcaagacacacatgtttacatagtaccgtaacattttacattgcataagcttcaacataaagtacttctagatagataacagacacgcacacttagttgtgctctaaagcttattctacgtcaaaaccgttgcaacaagctttcgcatatgtgttggtctgaacttttttcgcaagcagaaacaaaaactatcacacttatttacaaactcaccatggatcttcaacataacttgaggttttcaccgcttatttacgaaattcctttataagcacccctccatagagttggaccgcctcatcgcagttaataacccgtcctttcggcctctcaaacctgttgggattggcaacaaaaggacgggtaccaccatagtattgaatatgttctgtggggtgagaaacaacaggttcttttatagttgactcaggtgcgtacatataaatagctcgaccataactataagtactagtcgcctctcttacggtatagatttttggaccaccatatttgtaagcactttgggtaaagcgagaaggggactcgtctttaggatcatatggtttagtggttaggtttggggacttaccatacaccttatcgaccatttcaaaagccttttgagctatccttgtattcctatccttttgagccattggtgaagcacaaagaagagaagaaaggtcttttggtttagtgtattatctttgtttctttggttttagtttgatttgaaaaggaagccaatgccgtttatatagaaaaatcttctaaagaaaccaacatattcttttaacaagagcatttcgttacttttctatccacttgcattttcttatgaacactcgttttcttttactatatcaaatatttaatatgaagttgtaacttctgatatattcctaattatgaaaaatatcgatacgtgtaatcatcacaaagatggaatcaaattttaataatcattcgtatcaaagaatttaaataatcactattccctcaataatgtatatctccttccaaagccatggacggtttgacggtctgccctatcctttcctttcattcccatatatgatatattatgattgcttatattttacagatttaacatatcacatgttaaatttatctcatatatatattacttagctgcaaattgactatttgaactcaatttaagatgaccatcattcgctctataattaatagttttgtttcatactgttcttctatatgaacttactcatggttctacctgaagggaaaaatttcaaaaaactatatcaataagaaagaaaaaatcataaactatattccgtgtatttcataagagacgccaacagaaacagaaacaagaaaactactcaatcatggctaaaaaaacatcaacgtaaaagaaacgaattgtagaaatatatatggaaaaaagtatgaagaaagtaaacaagcaggtttagagattacttctcgataacagatacacagatgtaagatcttatcccttgaaagtaaaagcaaagtgaaaaagaaatctaaagcttggaggcgagttgctttgtttggagacgtccctaaggaggctctttggttgctgctttctatctcttctgtttgctggattcgttctcccttagaaagttcgtttaaaacgtgtatatattggcttcgggcgtcggtattaggtttaggcctttagggtacttaaaagtcaaaacaaaacacttcgttttacttcaatgagggaatattggagcttggcagtggcaccggccgcgacgtggaggtgcggcgatgaggtttttggccatagacggatgcttgcaggacacggcgatcaaggctttgtccgttgttggttttctttctctgatgcggctggacatggctccattcaatcgggtataaaaacgtttggattgtcggtttggatacttcaaggcggatcctgactctactagcttttcatagactccaagaacgctttatttggtggtcgagaaggccttcaacggatgcaaacttctaatggtacgaaactgtctttgaatgctcatcataattcccttcatttataatttttatcttgtaaaaactactctaattaaagcataaaatgtgataaacacttagtcacttattgaaaacattagaaaactatagctaaaatagacgaaaataagatgttatcatcacacaactgtccacatcatatattcatatggcttgagagaaactgaagaagacatggtgaattccccttcagccttcatctgcgcgaatagtcagaaaccgactttaatccctcaagaaactaggctcgacgtatatggccgatggcttgatactctggtttggttcacgcaggtagttgcttatgataggatctgctctgttttagctcccaatgctgtgtgttttcactttgagtcttgtagatatttcaatttaaaatgcatattatgtaaccaaagtttttgactgaataaagttttatattctcttaaaaaagaaataacaactggtttcttaatctactaaacaaatagggaaaatattatgcactacatttgaggttccattatacattaaaaatatatcattttcagcatcaaattattgtttgctttcattccttgtttctattagttaatactattggattctatcaaattactaaatttccttatattaatatatttattttacattaatacttcaaaatatttattaaaagtcttaaaacataaaataataatcaaatttagctaatatatatacatttcttttttacaagagtctctaaaatattaggcccagcttgttgcatatatgacatgattattaaagtctttaaatacatgcttatttatgtttacaaagagtcaaagacgcatatctttacatatatagcaccgtaacattttacattacataagctttaacatatagtacttctagctagatacataacagacacaaacacttggttgtgatctaaagcttattctaagtgaaaaccgttacaacaagctttagaatatgtgttggtctgcactttttccgaaagcagaaataaaacgtatcacacttatttacaaactcaccatgcatcttcaacataacttgaggtttacaccgcttatttacgaaattcctttataagcactcctccatagagtctgaccgcctcgtcgcaggtaataggccgtcctttcgacctctcaaacgggttgggattacctacaaaaggccgggcaccaccaaagaagtggatatgttccgtctggcgagaagcaaccggttctctaacagttgaatcaggtaagaatcggtaaggaagccgcttatcaatcatttcgaaacccttttgagcgacccatctattcctatccttttgagccattgccatcgaagcttaaagaggattagaaaggtattttgttttaaacttttagtgtgttatctatgcatcttccgttttagtttatatagcaaaaacttttaacaagatctttttttttgtggaatcaaatttaaaataaatttgtaagtgctgttatattcgttacgaaaagtatatatgataagtgtaattatcacaaacattgaatcaaattcagtaaatcattattccctcactaatgtatatatccgtcaaagatcacggacggttggacggtctgcccgatccttaataggtgatcataagaaaatcttaccaatcgatgataaaattttgctctgtttttttttatgtcaagaacatgtaacctaatgaaattcatctaaatgatcagaaggaaaccataataccacaacccactaaaaataagagaattttttgtctaaaataaacttgtcttttatttttatttttataaaacttaggatctttatgattactttcacgtgggattaaataaaatttaggctttttccaagaacttaatgttatttaataatgaatctttccgcctctatctgtttttaaaagtatacaaagattcaaatatctcaaattataaaatagttttggatgcttttttgttaaagcaaagatatatttggattcgggatgcagattgatatattttcctaaattatattataccaagttctttaacacgaaaagaaattatactataccaagttgaaacttctttctatagagaacttgatttctttaaaattaagggttttttccaagaatttaatgttgtttaatagtgaatctttctgcctttatctcttagaaaatattaacaagaattcaaatatctcaaattatatacaatagctttagattcgggacgaagattgataatcttcttagaaattatatatatcatatcaagttctttaaccaaaaatattatcttatgccatgttgaaacttctttaacagagagactgatttttttatcaattcaataatgaattaaaaacccaccgtccactggatcgttgatatgattttttatatgtatggtaaatagattccgggagtccacatagcaagtttgtatcatttcgtttacagtctattgctttagttttcttctttttcattttcggtgtatagcttcctcttttttttttttatggtttataataaagatgaaacacaatcgtttttaattaatgatcagtacgtttgtgatttaggggtttatctccagcctttgatgggttagatttcaaaaactcttttaatttgatcatctgtttcactgtttcaagtgaaacattgaatatttagggtttttttttttgccatagaaatagggtaatcaaatcatttctagcattaaaaagttttataaagatgaaaatgaatttatctattatccttaactcaaaattcttctcacacgtagcaatatgctaaaaagaaacaacggattttaatacatagttagaaacaacgtaatcgattacgtgtaacctgaaattattaaaacaagttcattcatcttcgccaaattgtgtataaggtatgaaatatctcccttgtaaagcttacaatttccgaaactatagatgaagaacttagaaaaatataaggtccatgtaaaaaactaaggtttaaaagcaagaaaaatcagatctgatagatttgggtcaacccggaattaattaagtggaatatttggtttgctgaagtacttaatcttttgtaactctaatttagtattatttgtaaaaggatacaaattatgtcaaaaatgatctagtatgatttttatttagcttttgaagctattattcatgtgattaaaatctgctgctaatcaatatttttttatgttgataaaatttagtaaaatatgaaaatcaaaaatgtaatcttataatctcatgatacaatatattttaggaatgttagttcatggtccataaaattaatatatagaaaaatattttactcactttcaaaaattttttataaatattttactctttcggtggggtttcagtcttaattagtacttgtaagaaagaagagaaggtttaaataatttaatactgtactcagacgccagccatttgtaaacagaaaaacttcacgagaccaaaagaatcaaaattttcgtttcaatattatgtacctaaaacattatgtgtagttgaatatgaaggaaaatagtggaaactagagaaaccaattgactagagaaacaaattgtttattcaaaccaattagtgaccacatattttactgtcatgaatgaaatataattcgataataagtaaaccaaatatcttttggtaaaattggtagacaacgaatgctatgttctcttacaaacaccggttcatgaataccattagaaaaaggggcatacttggatatatgttatattctgagaacaaaagactgaaagaagtctttaaaaatcagatagagaggaatatataattgtagagttgaaatataccaaatcttaaccgacctttctcttttttctcccattgttgctttaaccttccgaaagcaggattccatatcccttctctcccaagatttctgaagatttttttcttagtcatgtacattattaccacataaatatacttacttccattacacgatgcatatatatatgatatatttagatatatattccctataaagaagatcatgttaaaagtctatgaaaatattgctaccagagtttcaacttgcatatttgaaagcttggttgtcttgtcgtagaagagtcttcttgtatctatttttctaggcttattaatgacaaatcaagatcattttcatcccaacttatatatatgccaaaatgttcagccgaatccatcaaagcccttagtttatttatgtattgggcgttaatcacaggttggatacactcgcaggtttcactaacgttagtgaaaagaactgggctctaagaaatcatatcttcaccagccacatgatctgtcaaaaccttacggaccaaactagtatattgcaaccattcttataagaaaaccaccaatctaacactctagtcataacatataacacatacacaaaactaacaaaatctggcagatttcattttgtttttacttaattttaagtttaatctctaaaaagttcgtctatatatattgattagattttcaatatcctccaccaatacgttaatagataaaatgcatcaaatacattcaagaaaagaactaaagtagaattttatgaatatcgtatattaatataatggtaataatgtcctgcccttatgacaattacaccctcagtctctgtctatataaaaggcactaactctgttctatctcctaaccaccctaatcagcaaactctcaatacattcttaatatctctcctccactcgctctttctactaccatggaactttctcgaaaggaccaccgtcatgtgatgattgcagaagatgggtcacaaaacctcaacagaaacacttccaagtcaaatcctaatcttccttatccttataaccccaacccctcttctctctatacacataatagtttctacatctaccacggtccacaagttcgtaccgtcaaagagtccataatatcttccaccaatgcttcttttttggtctatcaatccaactagttagttcaatccatttaaaacagccggtcattttggtcaatcactctaaaaagaaataaaaaatagaaagcaataagcatcaacgttccagttatgctgattttcgtagctaagggatgaagtatggtgtgtctcttttgcagtttttttatttatttagatatgttgtgagtacagatcggttcaaactttactctcttcagagacttgttgtaagattgccacaacttgaatttgtagcatgtaaaaggtacatatatgaaacccttatctttatgtatatgagtacaactttatatgtactttatatatgtagcatgtaaaaagtacatatatgtaacccttatctttatgtatatgatgagtatgtatgtttctatatcactccgatttaataagaatctaacaaaaaaatacgtacgccaaatttttaaggaaaaattccaataacaaaagtcagaaattacttgtactgtacaatttccaaaactatatataacataaggaaatataccataacatattttccagttaaataaagggaactatttaccggagtatatagtataacaacttgcaacataatcagcttatattaattctgtgtgatatgacatttcaaaaaaaaaaatccttataaaactatttttagtacagaaagtttatattgtagttatatattgatttaaatataaaaatacaaaattctcctgcgtatgttcttttttcttctttctccaaaatttttgagtcgaatttaaatttgggtggatctgaatgaggtgatcctaatcactagttgaagttactagaccactgctccaaaacgacatcactcctgcaagtggacctgcaacagaaacaaaagtgttgggccaaaacacacttaagcccaaaccatttaagttcaagacggaaacgacgacgtccagctctcaacgttcgtcttcaatgttcctgcaaaaagacaaaggaaacagagaaacagagatgacgaaagcaaaagcttgtacggagacgaccaagctttcaaaccaattctcagcccttgatgggttagagacaacaggatgaagacacctgtaagggtttagctagggtttcagttctcaagtgttcttgtataaaagctaaagcttgagccgcttgtaaaactcttaagaatgaatgaaatctgaaagttaagttacaaagcttctcatagattcataaatctcttcatggtatcagagctcatggaaagaagatccatggagctctatactgttcctcaactcaacatttcaaattgcgttacagtcactcttacgcagcagaactatattctgtggaagagtcagttcgaatctttcctttctggtcaaggcttgcttgggtttgtcactggatctatttctgcaccgtcaccaaccattcctgttccagatatcaatggtgtcaccacagacagaccaaatccagagtttgatgtttggttcaagacagacaaggttgtcaagtcttggcttctagggtcctttgctgaagatatcctgagtgttgttgtgaactacgtcactgctcatgaggtatggtctactcttgcaaatcacttcaatagagctacttcatctaggctatttgagcttcaaaggcgtttacaaactctagaaaagaaagataaacctatgcaagtctatcttaaggagttacaaaccatctatgaacagttagcttctgtagggagtccagttcctgagaagatgaaaatctttgctgctcttaatggtctaggtagggaatatgagcctatcaaaacaagtattgaaggttccattgatattcctcccactcctaagcttgatgaaatcatgcctagactcaacggttatgatgatagacttcaggcttatgcagcaaactctgatgttagtcctcatctagctttcaatacagttcaagctaactctgtcttctacaccaaccgcggcagaggtcaagggaaccgtcggtttggtgggtcacgaggccaaggttccttctccactcggggtcgtggcttccatcagtagctctcatacaatgattcttcttccaacgcctctgcagaacgtccaacatgtcagatttgtgggaaacatggtcatcatgctctcaactgctggcacagatttgataatagttatcagcttgatgtgttaccacaggctctcccagcaacgcagatcacagacattactgatcactctggcagcgaatgggtcacagacagtgctgctactgctcacatcaccaactcgccacgtcatctgcaacagacaaagtcctatgctggttctgattctgtaatggttggcaatgggaattttctacctatcactcataccggttctacaagtattggttctacttcaggtaagcttcatcttaaagatgtattggtttgtcctctaattactaaatctttgttgtctgtgtcaaaagtcacaaaggattatccctgcatttttgagtttgattgtgatgaagttcgtgtgcgtgataaggaaaccaagaagcttcttcttcagggaagtaatcgagatggactctatgtgctggatgaaccaaagcttctggtgttctactcttctcgccaagttgcagcgtctgatgaagtttggcacagacggttaggacacccaaatccccatgttctccagcagctatcctcaacaaagtccattcttattaataaacacagcaaggctatttgtgaagcatgtcagtctggtaaaagctcaagactgtcattctctgcatcatcttttgttgctagtagacccttagagagaattcattgtgatctctggggtccttctcctgttatgtcagttcaaggattcagatactatgttatatttattgacaattactctagatattgctggttctatcctctcaagttaaagtctgatttctacacaatctttgcaaagtttcaagctttggttcagaatcagctacaaagcaaaatctcaatttttcaatgtcatggagggggagaattcaccagtaaggtctttctcaatcatcttcaagaacatgggattcaacaatacatctcctgtccttacactccccaacagaatggtcttgctgaaagaaaacacagacacattactgattttggtttatctatgctttttcaaggcaaagtccctcaaaaacattgggtagaagccttttatactacaaactttctcagtaatctgcttcctcatactgctcttactgatgctaaaagtccttttgagctgttaaacaagaagaaaccggattatcaggccttgagaatctttggatgtgcttgttttccgacactccgagattatgcacaacacaagtttgatcctaagtccttaaaatgtgtgttcttgggctacaatgaaaaatataagggctaccggtgtcttcttcctaccacaggcagagtctacataagtcgtcatgtcatttttgatgaacactccttccctttctcagatacttatatgcatctgcaacccactggtgttacacctttgctctctgcctggcaacaaagttttatgcctcagacaactgcttcttctacagcctctgcaactgcaacctctccattcaatgctgcagagattcaggtttctcctgtgattaccagtaacaacaacacaggcgcttcagtgttagaaaatggttcatctcagctgcctatacagaattcatcagtcttgtctactgtggctagtgaagagagttctgagtgtacggagagcatcaatctcttacctattggcaatagctcttcttcacttgctaacaggacggataatgctgatacttctcctcttcaagaagctgcaacagaaacaaacagctctactgtgcaagaagctgcagaatcaacaactagctctacaatgcaagaacctgcttcaaatcagtctactcatccaatgataacacggtctaagaaaggtattacaaagcctaatccacggtatggacttcttacacacaaagttaaatatgcagaaccaaaaacggttacagaagctcttaaacacccgggatggactgctgcaatgcatgaagagtatgataattgtacagaagcacaaacgtggagtctagttccgtatacttctgatatgaatgtccttggaagtaaatgggtgtttcgaaccaagttaaatgcagatgggtctttggacaagttaaaagctcgcttggttgcaaaaggatttgatcaagaagagggaattgattacttagaaacatacagccatgtggtaaggtctgcaacagtcagaatggtgcttcatgttgcaacagtcatggactgggaagtgaaacaaatggatgtgaagaatgcatttcttcatggggacctcactgaaactgtttacatgcttcaaccagctggctttgtgaataaggaaaaacctactcatgtctgccatctacataaagctctttatggtttaaaacaggctcctcgggcttggtttgacaaatttagcaattacttgcttgaatttggtttcaactgcagtattaaagatccatctctgttcatttatttaaaagggaatgatcttatactcttacttctttatgttgatgacatggttttaacaggtagtaactctgcaactatgatcaagctgcttgaggatttgaatacacaatttcgtatgaaagatcttgggcaaatgcattattttcttgggacacaagcttaatttcacgagaattgatgatgtttatacactctttcaaacgcgtggtctaaaatgtgctggctgcaatcttggtaaagactactatagtgatggttactgttgctttcgttctggactcttctttcacaaagagtgcgccgaatccaatccaaaaatttccagcttttaccatccacaacattctttgtacatcaagatacttgcagaaaatgaagaagcctatggaaattgcaagctttgtagaggtaacttgccaaaaatatattactattgtttaatatgtgatttttccatcgatttgatatgtgcaaaaaaagaagttatggaaataattgagggtccaaaagcacatgagcatcctttattccttcttccaaagatgactatgtttacttgtcatttatgtgggctgcaagatgaccggttcccttatgcatgtaacttatgcaatttgagttttcacaaagattgtgccgaatccacaccagagatgaagtattcttgtcatcctaaacacattctcaagcgtctcacacgtgttccaaggtacacagatggaaaatgttgtttgtgtgaaaacaaacttcattacatattttatcattgttctatttgcaatttcagtgtggatatcaattgtgcaaagaatccacttccttccactattgttcaccttaaggctcatgagcatttactcacccttatgcctcaacggaattttgtttgtgatgcttgtggaatggatgacgacccaaatccatatgtatgtcttccatgtaatttcatgatccatcaaaattgtattgataaaccaagcatcataaagatttatcgtcatgatcatcgtctttattacaatcattgccttgacgctggagattggaaatgtggagtgtgtaataaagagataaactggacatgtggggcttattcttgttcaaagtgtcctgattttgccattcatccaagatgtgtcaaaaggtttggcatttgggatgggattgaactcgaaggaataccagaaaataatgtagaggtaaagtcatacgaggtgatagaagaaggagaaataaggcattttagtcacgagaagcataatttaaagcttcaagaagaaagtgatgctaataatgaatgcatgttgtgtaaagcatgcaattatcctatatattctaactcattctacagttgcatggaatgtgatgatttcatccttcataaaaaatgtgctgacctcccaaaaaagaaaatagatcccttctacaacatgttgactactttaatcacaaatgatattcgcataagcatttgcaatgcttgtcaaaacgtttctcaaggttttacttacgtaagtgatgatcataagattatcttggatgtgcgatgcggttctatttcggaaccttttgtccatgaaagtcatcctcttcattcgttatacatcagccgctcaacagaagaaaagttttgtattgcttgcggagataaggctactatggttttgagttgcgaggagtgtgactttattttagacattaaatgttctaatttgccaaagatggttaaacacaaaaatgataaagaccatttgttgtccctatgttacggagaaaaaacaagtgagcagtactggtgcgagatatgcgaggaagcactaaacgcaaagaaatggttttattcatgtgatgattgtgacattacttttcatatcaaatgtacgcttggagacttcgtagggatgtatcaggaagctaaggatgagtcattccaaacttatatgattcttaataatcatataaatcgaccagtttgttgctgttgtgagtctcgctgtcaattctcttccatcttaaggttttatggaaaattaatatgttctctacaatgtttgcaaaagaagttccaagaattacatgatgatatatcctgagattcagattgctagtgatttacctgaagtgggtttgaagcaaattcattattgacacatgttgcttcgcctcaaatgttatgcacacagaacatgtaaacataaaattatatttgtaaaagttaaatatttataatgtttgttttcataagatttactttattttttttaataatctcttgaatgtctgtaccttttcttttgttaaagattgttctttatataaagattgtaccacaggctctcccagcaacgcagatcacagacattactgatcactctggcagcgaatgggtcacagacagtgctgctactgctcacatcaccaactcgccacgtcatctgcaacagacaaagtcctatgctggttctgattctgtaatggttggcaatgggaattttctacctatcactcataccggttctacaagtattggttctacttcaggtaagcttcatcttaaagatgtattggtttgtcctctaattactaaatctttgttgtctgtgtcaaaagtcacaaaggattatccctgcatttttgagtttgattgtgatgaagttcgtgtgcgtgataaggaaaccaagaagcttcttcttcagggaagtaatcgagatggactctatgtgctggatgaaccaaagcttctggtgttctactcttctcgccaagttgcagcgtctgatgaagtttggcacagacggttaggacacccaaatccccatgttctccagcagctatcctcaacaaagtccattcttattaataaacacagcaaggctatttgtgaagcatgtcagtctggtaaaagctcaagactgtcattctctgcatcatcttttgttgctagtagacccttagagagaattcattgtgatctctggggtccttctcctgttatgtcagttcaaggattcagatactatgttatatttattgacaattactctagatattgctggttctatcctctcaagttaaagtctgatttctacacaatctttgcaaagtttcaagctttggttcagaatcagctacaaagcaaaatctcaatttttcaatgtcatggagggggagaattcaccagtaaggtctttctcaatcatcttcaagaacatgggattcaacaatacatctcctgtccttacactccccaacagaatggtcttgctgaaagaaaacacagacacattactgattttggtttatctatgctttttcaaggcaaagtccctcaaaaacattgggtagaagccttttatactacaaactttctcagtaatctgcttcctcatactgctcttactgatgctaaaagtccttttgagctgttaaacaagaagaaaccggattatcaggccttgagaatctttggatgtgcttgttttccgacactccgagattatgcacaacacaagtttgatcctaagtccttaaaatgtgtgttcttgggctacaatgaaaaatataagggctaccggtgtcttcttcctaccacaggcagagtctacataagtcgtcatgtcatttttgatgaacactccttccctttctcagatacttatatgcatctgcaacccactggtgttacacctttgctctctgcctggcaacaaagttttatgcctcagacaactgcttcttctacagcctctgcaactgcaacctctccattcaatgctgcagagattcaggtttctcctgtgattaccagtaacaacaacacaggcgcttcagtgttagaaaatggttcatctcagctgcctatacagaattcatcagtcttgtctactgtggctagtgaagagagttctgagtgtacggagagcatcaatctcttacctattggcaatagctcttcttcacttgctaacaggacggataatgctgatacttctcctcttcaagaagctgcaacagaaacaaacagctctactgtgcaagaagctgcagaatcaacaactagctctacaatgcaagaacctgcttcaaatcagtctactcatccaatgataacacggtctaagaaaggtattacaaagcctaatccacggtatggacttcttacacacaaagttaaatatgcagaaccaaaaacggttacagaagctcttaaacacccgggatggactgctgcaatgcatgaagagtatgataattgtacagaagcacaaacgtggagtctagttccgtatacttctgatatgaatgtccttggaagtaaatgggtgtttcgaaccaagttaaatgcagatgggtctttggacaagttaaaagctcgcttggttgcaaaaggatttgatcaagaagagggaattgattacttagaaacatacagccatgtggtaaggtctgcaacagtcagaatggtgcttcatgttgcaacagtcatggactgggaagtgaaacaaatggatgtgaagaatgcatttcttcatggggacctcactgaaactgtttacatgcttcaaccagctggctttgtgaataaggaaaaacctactcatgtctgccatctacataaagctctttatggtttaaaacaggctcctcgggcttggtttgacaaatttagcaattacttgcttgaatttggtttcaactgcagtattaaagatccatctctgttcatttatttaaaagggaatgatcttatactcttacttctttatgttgatgacatggttttaacaggtagtaactctgcaactatgatcaagctgcttgaggatttgaatacacaatttcgtatgaaagatcttgggcaaatgcattattttcttgggacacaagcttaatttcacgagaatggcctatttctatctcagcagaagtatgctgaagaccttctcaccattgcagcaatggacgaatgctccccaatgccaactccactgccacttcagcttcacaaagttcctcatcaagaagaactctttgctaatccaacttatttccggagtcttgcagggaaacttcagtacttgacattgacaaggccggatcttcagttttctgtaaactttgtgtgccaaaagatgcatcaaccaacagtttcagattacaatcttctcaagcggattcttcggtatgtcaaaggaactctatcaatgggaatccacttctccaagcactctgatttccagctccgggtttacactgaaaaagaccctgcttttagtcttcgtgcttacagtgatagtgactggggtggttgtaaagatactcgtcgttccacaggaggctattgcacatttcttggcactaacctcatctcctggtcgtctaagaagcagccgactgtttctcgaagctcgactgaagcagaatatcgatcactctcagaaacagctcaggaaatgacttggatctgtcatttacttcgagagcttggcatacctcttcctgtcacacccgagctctatggagacaacttatcttctgtgtaccttactgccaatcctgccttccacgctcgtagcaaacactttgaattcgactatcattatgtccgtgaaagagtcgccttgggatctttggtcgtgaaacacattcctgctcatcaacaaattgttgacatcttcacgaagtctttgccttatgaagctttctgtaatctcaggttcaaacttggtgtggatttaccacccacaccgcgtttgagggggagtactagaccactgctccaaaacgacatcactcctgcaagtggacctgcaacagaaacaaaagtgttgggccaaaacacacttaagcccaaaccatttaagtttaagacggaaacgacgacgtccagctctcaacgttcgtcttcaatgttcctgcaaaaaagacaaaggaaatagagaaacagagatgacgaaagcaaaagcttgtacggagacgaccaagctttcaaaccaattctcagcccttgatgggttagagacaacaggatgaagacacctgtaagggtttagctagggtttcagttctcaagtgttcttgtataaaagctaaagcttgagccgcttgtaaaactcttaagaatgaatgaaatctgaaagttaagttacaaagcttctcatagattcataaatctcttcagaagtggccgtttgttataacttattatgactctgtacaaggagcattttatcagttctgctttaatatatactagatgatcacccgcgctacaccgcaggttttttggatttttttgtattgtttaatttaaatataaattttatttatctaatcgttcactcatgcaataaataattacttttagtattaaaaatattttttcctaataacattctcaacaatgcatcatacatataattcataaatcatgtttgtattaaaccaatttaagagagggtagtgttggattctagaaacctaaaaatttgatgatggaactctttacgtatttttcaccctcagagatttattatataaatatccatttaagagaataattaactcaaatcattaagtaatccacgactattatacactcatactttgagtttggattacaaaaaaatcattaacctataaattagaagttgaagagcttacattaattatttaatagacacatggcaaatgctaaagtgatgatgtgtcaatcttatgaaaagagttggccaactttcatatatatgatttcgtctaaataataagattttatatatacaattgagaataattgaacaattatgttttttttgttgctaagagagtgaatctaagatgaaagtttaggtgttactttgttagaataatagaagaccttaagggtttgaaccttgccaaatatcattaattgaattataacgatgggatttaaatatacgtttatagaatatgagatagataacaataaggcacaacatgcctttacaaactcactaaaaatggagcaatactagaggggatgccaatttttaatcataagtagaaccaagcttgaagaatcgacttggctagagcatatcagcaagttgaccgtcagatgatataacgtgagagacttgcattgtgccaccttaaactttcacctgaataaaatggaaaggcaatatatatgtttcaaatgatacacaaaattagttttttgagagataattggcaccatgcattgtcataaaagttaatggaactagcaagaaaattggctataaagcgatatactttgcctcagtgaaggagtgagcaatatgttttttgctacttgaagaccaaaatattggatactttccgaggtcaacaatgtatgcaccaacgaggccgccactaaacatctgagtatggatacagtgagcgaagaattatgaggccatgattaaacggtgcaagcaagggaccaaaacacacgtttgatatatagcgtcccaatgtgtatttgtcggttagtgaataaattgggagagtttagttcactaaccataaaatactatatctaatagtgtaatagcaaaattctgaagactctcaattgcggctcgatattctattgtatcatggagggccaaactcatgtaccatatggatgtcagttcggccttgcattgatcagctgggtgcaagctaaggaggtacttatttttttgtgaggtaaacactagcagaggtgcaagtgaactctatttcaagaatgtacaagaaatcgccaagatcctttataaagaagataatgcttgtgatttcttttgttttttacttcgtaaatgatcatacataagatataaggatatgatgtttacaggagttaagccatacaatttcgagagaaaagcatattagattacatactagcattaacaccgtaacatgttatcttaggtaagcttcaaattatattgcttttaatacatagcagaccccaacacttggtagtgatctaaaccttattttaagtagcaaacacatatgtcttggtttgcacatttcccgaaggcagaaataaatactatatcatacataattagcttcttataattaattgcattttcaacataaattgcattttatcccccttaattacgaaattcctttataagaacccctccatagagctgaaccgccttatcgcagttaatagcccgttcttgtggcctctcaaagcggtcaacatggccaataaaaggacgagcaccactgaagtattgaatacgatccgtgggatgataaaccaccggttttacaatagttgactcatatgaaaactgagaaatgactcggcgagcagtaatatctagttgcctcttttacagtataagattttggaccaccatattcgtatgaattttggttaaaatacgaaggaaactcgtttctaggaacatatggtttaggggtaagtttatgagacttaccatacatgttatcgactatttcaaaagccttttgggcaattcttgtattcctatcattttgagccattgccaaggaagaacaaaaaagagaagaaaggtgtttttgtcttagtgttatctttgtttcttcggttttagtttgctttgggaaacaaagccaatgagcttccttatataagaaaaggataatgaacctacgtactcatctgttgacttatcttttaggaattatcccttcactttacatgtagtctttttttttgtctaaatatttaattcattaatcaaaagaggatgtacaaagatttttttttttatatgtacaaagttacatagtcatttttattagattatccctttttttagtggttaattgaacataaacttaaatttgacattacaaaggggtccttttttcccaaacaaatactgtttcggtaaaggaagacaagaatagacagtatatgtagtagatataaatctgacattaaattccttttgacccaaaaaaatgaacattgtattactttataaagaattaagacagtagtaggcggtagtggcgacaccaatttgcttctcatggtacgacatatatatcttgtccgcatttgacttatcgatatcagagagtcatcacggaaccatgttcactcttaaaaatagggggttaaataagcggatccttcacaataaattagttcagttctatagaggcctaatttagtttgtttttattggtggttgaatcatctaccttatgcaaattatttcaaagcaaatggtgtttccccactacaagcaaattcaaccattcataggttcttgaaaatttgatccgaagagtaaccatgcgatgaatgtatttttttagaattaacaaaagactaataaatcaaatttaaatgaaagaaattgctcaaatattataaatttcatgtttgacaattgattattcatattcttaaaaaaaaataataggatagtatagtataaaattataaattatttgagttgttaattataaattatttcgaaacgttagttgttctgaaaatgatctcttaaatctacgtaactatcaatattgactctatttttaatagagtcataagattagtttaaaacgaattatttcagcaagaaaaacattttccacaaatatgtaataaaactatgaaaggccctaatcgtattaagaaaacagatttgaaattatttaacaagaaaaaacgtttatgatttctgttcctaaaatattctcttcaattttggagagaaatgtttttgttttataatcatcaaatggtaagcttttaagaataatgtagggtcctaatatctgtctaaaaattgaaatatatatggtgaaaatttggaggaataaagagaaatatcattctttcttatattttttgaaacggcatgggatgctaaatgaagtctatactctatacatcaaggataagcaatgttgaggaataatagaagaaattaacgggatgctaaatgggaagaaataatagagaatataacaatgagaccactggtcttttttgcctagtgcaattaactttcgcaaaatagattccctatcaccaaatttgcatatatacttccattacacgtttcatgcctatgtagactgttaggattacaaagtccaacaaagtatctttttaattaaaagtgcagagtcgaagtagcagagagaggagatacggctccactctatcttctcattcctctaataatatttacgccacattaggccacaaatatttccacgcatctcaatacataaaattaaggaaaataaaattacgtacaaccttcattttgtaagaatttacatctcactaatcatttatactataaatcatatcataaaattcccttataagtatcaattcctctatttttttgccatgatttattatatattatattctatttatacgatttaattagtaataataaatatatacttctagaatttttttatataattcgagaaccaaaaagagtacacatttgtaatttattgttcttacattattatgaaaactttttttttagattaatttaaagagacgagttagagtagggcttataaacaaatataaaacaaaacaggtcgtttaggcccatttatttgttaaggaaacgggtaccgcgagaaactagggggaaagtgatagaccaaaaaccctaaatctattataatcactcttttataagtagtccatttatttcaccgccgaatatgacaaagaggtggagctaggtcaaggagataagaaatggtgtcgatccatttccactcacgctctcgtgcaaggagaaagtgtcgtcacactggttacggtaagtccgaatgaaaatgagtatccaataatctttgataggtctcttcattttggtactttaataaacagtttgtcttcggtactactctagttttttggactgcaacgtactctggtttggtggtactgtaatattatttatgatcgatgaaaattatttagaaagtttttctggttttcaggtaaggatacaatggaggctttgcgccgaataatgaaacgtttgacgagaaggctgaaaatgttaaaacgcttgctaaaaaagttctgttggaacaagaagatcgacaagcttgtgtactaccatgacatgttcatgaaggtgaaaggaaaagtttacaagaacaagtgtgttcttatggaaagcatgcacaagtctagcagggagagaaagttttccggaagcgagatgcgtttggctctggtaacaataaaatcatgttttattaaaatctgttctgtatttatttttgtattctttgttagtttgggtgattatattttggtcatctcacaggagcctgaaggagagaagactgcatcagcacctcaataagaagagtaagaaacccatcttcgcatggtgcatgttcttggtctgcggttaagcaaagaagatgagctttcctaaaaaatgttaaagatctcgatatcttagtgttgacggggtccttcatccttggtactcattgtgaacccaaaagaaaccacaatgtgttcctctacttgattcatccgatcattttcaccagctttctttcttcataaggcgttgaagagagaaatatatatccgattcattggtcttctttctttttcggctctaacgaaaccaagaagatttgttgtttaaaggatgaagattctggagttcttaggtaaagcgttgtggcttcaattgacgacgacttttcggcctactggtttgaagctctgtgacatcggagaacgatgccggcgatctaccgcttccggcaatctaccgcttctcttacgcgtgtttttgctttctttaggaggtgacaattgcctgtgtgctgtcttgcttatctcatccatgacggtttattgtattagagttaatttgtttctgttgttagacttaatttgttttttttgggctttgtttaatttgattgttttcaaataaaaagatgaatgttcagcgttataaaaaaaaacatgtacatatagtactctttctccacatttactgctcataatgtccacagcttttggcaaaggtatcaagtatagtttggacatctccacactaaccaaaagtaaacccgtgacacattttgaaagaaaataaaaacatggaagaaatggaatgattattaggaaacatggcacaaatggcaaaattccacacaaaaaaattaaaaaaacaaaggtattatagtatatattgtagtttatatatagaatatcatccattttttgttttttaattttatttttattggttagttttgcaaatttcctatactagttttaaatttcaaacaaataagaaaataaaaacatcaccaatgatctaactttaaaattcaaaaaaaaataaaaatggattgcaatattcagtcgtcgactaaataaatttcaagtttatttacttacagccatgttggtttattatttacaaaataacctttattaaaaactaaaaactatatatatgcatcgatatttaggagaatcttaatgttaataatcattataacttcactatattatattccatcttcctctcctttcttcactgcatccttcgcctgatggtggatttaccatcgtttttgtcgactgtcaatcgatcacaataagcccaccgtttgtgatactcatttttggcatatccggagatttcgtcttcatggagataaattcagggggtttgtacttcctgacgtctggtagggtcggaggcttcattagaggaagcattggagtgatcttatgggccactgtgtctaaatggtaaccgagaaatctggctgaatctggttaaattgatgaatccggctgaattgtttagtgagttttggctgaatctgactaaagatctttgaattcaaatgttaatggctgaatcttgatgaatcaggatcgtcgcttgggaggaacacacttctgctgctgcgttacacttttcagatcaccattcacactctatggcgagaaaggaatactcgaagacatggagaggaggaacctatcacagcattggctcttggaaaaaccgtcgacaaaaatattcgcaatcggatcatcgttcttcagaaaaaaggaaatccaaaatatgatgatttatttgtgttttggctttccactaggttctaatttgctcaggtttagataaagtatgagtcaaaatatcttaaacaaagatgcacttgttgtaacccaggttttttttggtgaataaattttgcattcattcaaaaaaaaataaaaaattcaaaacatattaattaaataaagaaacatatgaacatattagttacataattttattttgtcaacaagaccaaataaaaaacaaatgaaaacattacacttgaaatatatgattgaataactttattaaacacaaggtaataacttaatttaggaaaagttccaatttgtaaaacattaagaatgtattaatacatttaatctttttcgaatataaatatcatataaaagcataaactaataaaataaagtagtaattgttaaattaaactatctgttttgtctagtttatgagtttacttactaacaattctctagtagaagtctcctactattaaattaaatattgtagttttagtaattatttagttttactcgctaatgattaaattgattaatttagtaaacaacttacaaacaaatctaaaaatttgaaacatcaacaattcctcacaaaatcctcaagtattcctcaacatgcaaatgatgttaccaatttaaattcttagagaattcctcaagaattgctcaagaacaatgttaccatttacaaccattgtctttctttggtaaaaaactttttgtttttgtttttctttgaatatttttgtgttctacatgtttagcatattttcgtaatcccaaccatcaaaaagaaaccaaatttattagtaaaaaacaacggatccatatgaaacgagagagatagagacgagagaactaaaaattcatacgaaactcatcggatttcgccttggagagacgagagacgatagacgagagacaagagacgagagacgagagacgagagacgagagagaacacttctattaaaagctcgtttatttattattttacttacaggcgtagtttataatatttacaaaaataacgtctgttttaaaaaataaataagaaactataataagtataaactatatatgcatcttaatattattacttctataactttattagcttcatgatttcgtaatcatgtcttctacttattctccgcatctttcaccaccggtgccggtggatttaacggccccgtcaccgccgttccgtcgaccattatgggtccaccattgtcggtgctcatattcggtatcggccaaggtttcgtctgcatggatacagatacaccgagtttgtactcgcccacggatcaggcttcaatggaggaagaaatgtaggtggtatctttactaataagtaatatgtagatcgaggggtttattaatagcatcagtggtgtcacaaataagtaataaagtatttgatcataatcaactaagtccatcatatctacataaatctgcgaaactggctttcccgtcttcactggatccttcttcttcactattggatcctgcgaaactggctttcccgtcactgccttgtcgtcgatcatgattggcccaccgggtgtgacactcatctttgctatgagcataattgatgaaaacaaaatttacatcacttaaataaatggggagacaaaaatagcaaaaaaaaagtcttccaaaaatagcaaaacaatccacaaatagcactcaaaacataagttgctttagatgttgagatcaaccatgagagagaaacacaaattttttcagttaaaaattaaccgtcggatttcgccattggatggatgccacatcatggtttcttaagagccctcgattaaaaaatttgtcaatgttttcatttatttttgcttgatgattgcttttaaggttttttttaattttttaactcccctcaaatttttcagagacaccattggagacaaagccactagataaaagggatcgaaattaaggatattgcaatagtcagtctcgtagaccaaataaatttagttacttgcttacattcatggtttcatatttacaaaatataagctttattaaaaataataatactataaactcccttatatatatatatatgcttatatatatatatgcttggagttcttattatatactattaataactatcacttcactgtattcttgattttccaatcatgtcttcttcagagcatctataaccaccggtgaatctaacggccccgtcaccggctttccgtcgatcattatgggtccaccattggtgacgcttatgtttggcggcgtcatcttagttcccgtctgcatgcagaaccggtccgccatgtaagaatgctttatgcaaataaaacatttaggccttctagttcttttgtataatcacaaataataataatatataaaagtcatactaaaatttctagaacattttttaattatttttaagcattttgtaaagaaaaaagaggaaaaaaaaacaaaattaaaatttttaaatatagctttattcagatttttgtctgtaaaactattcatcaaattcatgtaatcgagcttttcaaccattaacttaatggatagcaaagtcaactcattatttgacccaaaaaaaaaagccaactcatttatttgattaattaaacaaagtttatattttgtaatcaaagttcaaccaccttacattagaaagtctttgattttttattttgtaatcaaagttgtaaagtttaagattttatttttcttaaatttaaaattttactaatctaaattcattaacacgatattttataaaaaaattcccacaaatagcacaatttcaagtttttaagacaaaaatagcacacaaatattttgaaaaaaaaatagctgtcaaataattattttattttcatttattaaaattaacaattaagaaaagtacaaaaatacacaaattcatcaccagaaattcccaacaatatttttccgccaaaacaatttccatcaaaaaatttccgctaaaatatttttcgacaaaaaatccttcaaaattttaacaaaaaaagttggagagaaatatttacttttatttatttattttgattagttaattacttatatttaatatattaagtttgagtgctatttgtggaattttttgttatttttggaagaaaaaactttttgggtgctatttttgtcaatccccttttatttttagtgtgtttatcattgtttcttttgttttatttgctttggaaactaagtttttgttctaaaaataccattactacaaactttttatgctacaaaccctagaatgatttttaagactttctaatttaatagttggggtttaggtttagtattttggatttatcttttagggtttatatttagttacttaaaatttagttttagttttgtggtattttcagaaaaaaaaatagttttatttttgaaaaagaaacatagtgatggtatttttggaacaaaaactcattttactagtattttaaaattaaccatatttatatatgtctagagaaagaaatttaaatttgacgacgaaataggattacaaaatggaagatttctttttcgaaaaagatttgtagatcatgtttatcatataatagtataatgttatatttaatagatctttctgtaactgattgaagaatattactctgttatgctagtaacttttctttcccttaatttgttacttcgtatatcttttttttttataagatacttcgtatatatcttacactactgcgattaagctttttctctctgctctgctcttcgtgtaagtgttcttttctaaattttaaagattgacttttagggttacagtttactggtaaggtgatgtgagatttttggtgttacgatttaatctataggtttgtctaataatattatggttttatattatctttgtttgataatttgacctgtgtcatgtctatacgattatttgtgtcatccttaagatccgatatacttgcttaatctttaatttccgtagtttgaaggagatagatatgtccgagatcactaataatgaaacttctggagaagggactttaactaacaacgtgaatgattgtggttagtattttgattgttttattctcaaatgactctagtattttagttgatgtaccacaagtatgtgttttcgtggtgtttaaattacttgatatcgttacattacataggatcaaatccttctgaactatatgggacatttacatggaagattcataaattttcacaaatcaatgagcgatccgtagcaatgtttttgagattggtggccaccgatggtaaatgacatcattttcataataataaagttgaaactttctgaatatatatgttttttgtttgctttattataatcttacctatgactatgataggtatttgttaatttatccacgaggggttgatgtttccaactgtctctctttgtttctctgtgttgcaaactacgaaaaacttcttccaggtgagtattgtaatgtataattttcactttcttgatttgcaaacctttatcattatataagtttaacattttgagacaggttggagtcatttagctcagttttctgtagctgttgagaataaagatccgaagaaatcaaagattgcaggttattttctgcatcttttactttagcttgaatccgcaatagcgcaaacaaactgaacacgttccttcgcagatacgttacaccagttttggaagaaagagcatgattggggatggaaaaagtttattgagttacctaaattacaggatggattcatagataagtttgactctctttcacttaaagctcaagttcaagtgattaggtaaatgccaagatttagagtctcttgagtgatatatatatatatataaccacatttttccatgcaaccattaacatacaaccaacttttctcaactcttgtagagagtgtgtgaaccgaccttttcgctgccttgatggtcagtataggaaggaacttcttacggtttatttggaaaaagtggagaaaatgttcatgagctttgtggaagagaaaagaagcaagcttatgaaggtgatagacgacaaaaagagatggaagaggtcttttccctaatagtttgagcatgttgcgaatcattacaagaaaataagttttagttcattttttctggtgcagcttatgtgtctttggttagggatggaccataatgcgaggctcgaaatatctagcgagaaaatggatgtgattctgaaacaagttgtgaaacacttcttcgtcaagaatgaagtaacatccactcttttgatggatttcttgttttataggttaaagtctcttgaagaaaaacgcagaaggctcgaaacacttgtaagagtggtcgcaaaagaagtgatcaacagtaaccaaagtgaatccgctatgaagaatcttgaagaggaaactaagaaagagagaacaaatgatgacaaagaattcgctttaaagattaatgaagacgaaactaagaatgaaagaacaattgacgccatggaatttgaagcttcaattgcttatgtggtcaacgatatgcttggtgttacagatccgttgttacgtctagagagatttgttcttgcaccattgcctgaaatgggttctccaaagcttctgcaggttagtctcctatgtctcaacgttaacgtctattagaagttattggtaatgttttctttaaggaatttatttcatgtgactttaggtttccaatctccgtatacagcataatatggaacccgatgagaagcaattagctgattatggtagatgggccttggaggtatttgttcttgaccatatattctgcaacaaaattgaattcacatatgaagaaactattgcattgaaaaggcaagaagaacttattcatgaagaggaagcagagaagaacactaaactcaaaaaaacatttgttggtaaaaaagtgaactaattctttttagtgttttattcctaggctgctctggttttaagactttttaatataagctttctatcttttaactatgtgattaaagattatatatggtggttgtgtttcttttatttttctttaaattaatgctacatacttataaatttaaggttatgttcaatcttgtcactatcctactggcgttaagtcttcgctcacacgtcacacactgcaaagcactgaaattatttcttaattagtgaaaaggtttggggtatgttaacaaataccaataaataaataaaacatatatagtacatgttcctccacctgtcacaggcaacatttgctttcaaaagcaaagaagcattttttcctccattttcttcttcttctccaaatggattcaacatttagagatgaagatctcgttgaagagagagaagaactcatggtgtcttacagtgagaataacagtcgacctatcatgaaaaaagctcactttttaaaaccctttgtcacctcctccattgatgggtttcaaggtatgcttcgtccatctccttctcctgagttaaaagcttcgtctttaagtgtttcctttcgtgggtggaggttaccaaacaaaaagtttcagttttgggttaaaaaaatggtagctttacacaaacccacttggttaaaatctgggatttttgaagcaatcaaagcatcgacttacagaatccacaaaaatccgtctttgattctctctctcgctcagaattggtgtcctgaaactaatacatttgtgttcccttggggtgaagctaccataactcttgaggatgtgaatgtgcttctgggtttttctatctctggttcttctgtttttgcttctcttcaaagctcagagatgaaagaagcagtggagaaacttcagaaacgatgtcaagggagcatgaagcaggaatcatggatttcaagctttgtagatgatgaaatggagcatgaagcgtttctagtgttgtggctttcgaaatttgtgtttccagacaagttttgcagttcgatttccagtgatgttttccccttagctgttcgtctagctagaggtgaaaggattgcttttgctcctgcggttctagcaaacctatacaatgatttgggtcatatctgtgttttagcctctatacaaaatgttttagctagttctctgtttaagcttgtccaagtatggatttgggagaggttcaagagtataagaccagaagctaaggtgataccaaggggtcaacctagaattgctcaatggagtggtctgaaacagagatttaagaatgtgggactgattatttttcatggtaattttgattggcgtccttatagtgaacctttggagaattggaacccacctcggttttatgttgaagaagctaagtgggtgaggattgatgagagtcttgatggtgattatgatgacgatgatgagtttgtgtcgtttgctagatgtgtgagagtttctaagcttgtaggtattggtgtagtagagaactactatccaaaccgagtggcgatgcaattcggattggcgcaagatgttcctgttttgggtactaatcatagaagaaacttcacagaagaagaagcatgggatgattacaacaaaccgcttgttggtttaaagctatattttccttctcgcgtcgccacagcttcggttactacgagatacagagactggtgggctaaatcagtttcagaaatgcggaaagaatcaatggaaacttttaatgtaagcagtacagttgatcattatgatgatagtgatgatgatataccccttaagatagtaccattgagccaagtctatcagaagttggacgatgaaatgaagaaagccaagcattcgacaaacaagagacgcaagcgagctcgtgaggatgatgagagtgctgctgagacagaagatgacgagagtgctgacacggaagatgatgagagtgctgacacggaagatgatgagagtgctgagacagaagatgatgataacatgaccattgctcagaggatcaattctagaaagaagtctgatgacatagagaatactgaaggagaaagaagtagacttgtggcggataacaatgtttcaggccttcctcaaaagcttgcttatggagatgagacagtagcaacaacacaagaagaaacagagcaaaagaataatgaaaacaagtcttctaatggagtagctgctgagaaggaagaagatgatgagagattgaaacagagaaagcttgcaataaaggaactagctttgaagacggaagcacgaatgttgaaggtagagaacactttggcaaagattaaacaatggaaactcacaagacttcacaccaaaaaacctctagtttcttcttaagctatatcatctctatttgcagcgtcttctcttatcaaagacaaaagctttgtgtcataaaaatggcttttacgtacattcttctctgcaaaaatgataacttttggaatttagaattttgttggaattatatatattcgtatttacgttaccaaattcacattttcgtcttcgtctccaatgattgctctctcactctcagtctcactcacatcattaccattctccttcgcgttttcatcgactccgtgcaaatcacgcgcctctcctccacgtagcaccgtctcgttgagttcttccaggagacgacaagatcgccggcgatcaattgaggctatgtctcaggtgatggaattggaagatgaatccgatttcgagaagcttctctcatcggataatcggatctcgatcactggattcggttctcttctctccggttcgtacacatttcagctccttctccttcgtttgtgtataattgatcctcgagaatgattgattgcttttgttcttataatagagagaagcgcgaggagtacattcccagatttggagaatttcagaatcgcgaaattgcaaggattcagaagagttttcgctcattctgctccgatcttcttcgagcgtggcatcgcgaatcctgaaactaaggtctgattcgagcttggagtttttggaaactgattatgaaacttctgtgaatgaataatgtcaaaggcttagagattatagatattgtgatttggaattagatatacaaagactctgcttcttaggtaatgtagatatactctgagtgtgatgaatgaaacaggagatctcaagcttgagtgttgagccatgtgaaggagagagccttgtggttactgtcttcgagatcaaaagctcagaggtacaccaaaacatatctctggaaactgctataatcttttgatagaagtttatgtatactctttgacggttttgatacatcaaaatacagattccggcttttattggaagggagcttgagttccggtttctcgctgtgagtcactagttcctctttttcccctagtttgaagatatgctttactttgtgtcacactgctcatactttccctccctcacacataggttgttcctgaaacattggaaggcaaaccttacaccaattctgcggttcgtctagtttaaacaagtctttgttcttaatgacatttgttctgtttgtttactctttgccaagtctgagtttttgaggcttgaacaggtactttgtggtcgatacagtgatgaggagtttttccagattagatgcaaaggttagttaggccccttaacctaatctctatgtctcaaaagttaaagctattatagatttataggattattcatttattgttttctgcaggaaacaaagggatttactttcaacattatggaagattcaagatcgataagatatggcgggacgacatcttaccttgtcgtctctatctaagacactggtaaactctccttagtccttactacaggttttctttatttaactttgatgctatgatgctaactagtttcaaatgaaatgagagaaacatgtgttggccgaagcaacaactaattattctgttacaccaaaacttggttcttgaattatctctgaataatttttggtacttggatgagaaatttcatggttttcttctggaacttgatgaaaacttcttacatgttgaagattctcctgtgtttgcagtgtgttggctgctaagaatctgggagatgaagcttacaataactttctggatcatacattcttgggagatcgaaaaacaaccatcagagagtatttaagcagcacagggtctggtatcatggaagaagaaccaccggaggctctaaagtctagatatggaggttgatcaaaaaccaacaaaaaaagttaaactgatttttatcaagcttcaaacgttataaataaaaacgaacttataggttgtgtaatgtttaatttgttatcgaagctagttataaaattaagaaaacaaaaatcaacaaatgtcccacatcgggagttttagaggagggtagcgtttctttggcctatataagagaatgagttttgtcatattatgtaacccgtttctgtcagaggtgaaggatgatccgtcaatgatcgtttagagacggcggatcgtgccgacacagaatttgacgaacataattttcaaggcgagtgggccttgccttactttggttgggcctgcccgtcaatttttggaagcctcgatctctcaatcgaggttctgccaaaccaaaagtggatactttaaattgaacaggatcaaaccaattaaactgaaccatatgaaccaaatttgatgtcagtcgttaccaaatccaagtgggggcttctgtttgagaattagatcatcacaataaaggtcttctgagtgttgatcagccaagaattctgctagtccactaatactctttctacatttgaagaaaaaacaagtaaactctgtgtataataaatatttataatgtacagttgatgaggatgatgaagctgagggagctcatgacgagtgtgaatcacactcgagctcagtaattaagagttccatcatctttttatacattggcatataatgatcgtttatcattgttctcgatagcctaatctttctgtacagttctcttggcgtctcatatatccttacacgctccaccgtcgtcgttcccactaccaccacttcgtcacgctctgtttcagactctgtctcagttactgacactatgtgcattatcttacccggcgggtaaaaccgctggttctctatcaaatccattgaagatgctgataccggactctggttctgtcctgtggaggaatcgcccccgccagtaatgacagtctcttcctctgttatctcctttgctgctgccgcttcttcctccatggcttcactgtctctttcgttctcctgtcgagtcaattctctgtccagttcgtcccatagctcaccttctgtcacgtcttcttctattgaagatgtttcagcgatgacttgatcaattgatatcaacggctcttcctcttcttcttcgtctggttcatcgcgatcagattcactgctgctcgaagaactatgttctgttctcttgtgacctttacggtctatcgctacagtttcagccagtagagcttcagtgcttcttctttcagccataatagctgatgcttccggcatgtctgtgactttggagttaagctgagagctaatagctctacggcgtggtcctatgcaagaccatgaagagagagttgaacgggtctgcacaacggcttgcgctacatcctgagcacgctttagcatgacctgaacacattttccagcattaatcatcatcaagacaaaagaaatacctgtccatgaatctatacatttaatttttccacatccattcactaaaaaagccgcaaccttttttctcatgatattacagtatttgcattgtgaaccacatatgctacctgtgtgccgcttgagacaggccgcagaatcgccccagcaccagccacttttgctttcgcgctggctatagaaggcaaacgagatcctatagcagttgcagaccgataaacaacactaaggaccctggtgtgttcaacctgatcacgtaggtcatttgaccatgaggacgaggttacctgccagtaaatagaccaaacaaggatcttatctgtgtcaaaaatgggtgtacgtataatacttacaagaaaatttgaaccatggtttgcaaaagtggatataaactggagaaccaggatgggaacaacccacagtaagagttaagaccatagtttcccttttccattgaacacttgtgggagaaacttttgtcaacttgccaaagagtgaatatatctaagttgtctggaaagactgaatcatttagcaggggaaagatcatatctctatacattttctctctacagaagtaccaagttaaaattgcaggcttgtatccactatttgatataccaaggttagcaatatattgtaccactacagaatcaggaaaatttctcctaatggtggcagagataaatcctgtgaatgtagcttcacatataagcaaagcaggtcatatacctcagaacgaaggtcatcgactgaagaagcagagaatgttgggactagatcagatccattgataatagtagtaatgaagtgcttgcctgattctgctaaatcccaagtcatacaagcagctgcgagttgttcaatttgaaattcagtgcatattaacaatttttgacccagagaactaattgacatataaagagttgagcatcacaattaagggagaggagcagataactgaagacaaaaaaataccaccattaatcattaaattgggtgtacctggtgcaaaagtgaaacaggtagccgaggcaaactctttttgctcccgaagaatatacgttaaaagtgaagctgtcccacctccaagagaatgacctacaatctgaaacaaagatgctccttagattcgatacagtagataaaggacttcctatttcaacagtgcaattctcaagacaaaatgtgtatcatgtaaaaagtatcaataatctctccaatacggatctctaaatgaattaagatttgcgcgtttacctgaaccttgaaactaggattctcatcaagggccttgaggaggcaaggaacactaagtttagcaatccatcgagctgcagcaaccattccacaatgtgcataacctaaaactaagttgcttagtccaccatcatgcaaaactgaatgatggaatgggacaactgcaccagttgctgctgttaatgtatctttaatgctatgagtgccacggatcaatagcaggatacattttgaattggtatctcgtataatcgtgaatgcaggctgcataatctgcagggttcccaaattcaattgtttatggttccggatataaacgaaaacaacaaaacagagctcaaaagtataaaatattcaaccactgagctctaattaagcgtcctaaccgtatcctaatcaatctaaccatagtctcgtatcaccactatgataaccattttatcaaatttacaattcaactgataaaactctttttaacaagttacgtccaatctttaatacaagaacagcactgaggatcaatcattatggggaatatctactgtcattcaaatatctatgtgagacaaactctttttagcctcccaaaacatatgttcctaagagaagctatccaaaaagtaagaatatataatgcttcaaaattggatttctagtctaacaaagtatctagtcactataaacaagctaatcacaagttatagcacgaagaaaatcacattaacatgacctacccctgctttaggcttctgaagaaggacatcttcgtgggtataaccagcactctccagaaacactgcaaatggctttttggagaagagcatacagagggtcaaaaatctcagtaactctgtcaaatccatgataatctctggtccttttaactctatacaattacttccagcataaacactagcagttggaaagtttccctggaaaaaaaaaaaagaaaaacgcaagcaagcaatgtcactagctacacacaaaattgtcccatgaatcagaaaaaagaaactctgcattggaacagcaacacacacatgaaaagagtagataatgaccgcatcactattcactagtcatagattacaagtgtaaatttttttccacatgcaaaataaccaaacaaccatcctacactgaaatgaacagagcacatatatgtcttatcaggaaagtaaacaatataggactcataatatcccaccataaagatgaaagcacacaaagtacattagaaaaaacaactctttatatgaagcccatttgtatacatagtcacagactcacagaagatatatataccaaaagatcaaatcaagttcaataatttatgcatccactgataagattcaaacccagaagaagtatgagataaaaagctcaaacctgcctacgcatcaaatagttaataccaaaagcgagatcagcaataggccatttgcctagagtctctgaatacgtaaaccgtaacgtctctgacaaagttgaaatagtctcaagccaagtcgccggtgcttgagccggtctcctaacaatcctcctccttccagatctccctgatttacccaattcacctcctgaatcatcttctccatttctcgcccacacgatccgacggctcagtaagtacagaatcaccactgctcccgtggccgttaccattacacccgccgccatctccgatcctcttcctctttattcagaaatcgattcaaaaatccaatttcactcctcagccgaatctagaaaacgtaacacgattcagcgattcgaaagcaaggacgaagatgtcttcacgaatttcgaaactaatcatcagagatcctcataaatgaatgaatcgaagctccaatttctccaaaaatttcaagccgatttgggaattccccgggaacgttgagagaaggaaagcgagaatcgttatgatatcaatgtttcatgatttttttttactttttaaggtttaaaattactaataaggacatgaactcgtcggcatctactcaggtgaatcaagggtattatcgtcattatttagataagtaggtaaccatttaaggttaagttaagaggaaagaagaacgttaggaataatatatacgtaaagcaatccaatgatattaacactctaatcaggattagtacactaatcattttattcatataacctaaatagttagctccacgagccaataatataatcgaatttatggtggaagataaacacgatcaaacacgatggcttttgagtacgcaacggtgtttcttgtttaatgtattaacaaaaatatccattgctttcacgactttacttcacatttatataaaacaactagccaataacaacaaaatgaagaacttaaatctattaatgtatctatatgttcttgagtccacgaccacgaccagtgcgttgttaaacaaaaatagaacctcataattttcttttccatgtaagataacatatagtttaacgacgaataataaatttgagtacacacagcataatcttgcataactagtgaaggacatgtaactagagtctagagagacattggggggatccagtaagggaggactatttgttccgaggaggaacttggtgtagacttgggtgtgaaggaacgtggggatctagtggcgatatcataaacaccgtagccttcaccgaggaaatagatggaattagggtttagtcccgggaatgagctggccttgacacaaaaaggctcgttgttgccgaggaatatgcagagatcaccaatgtcttctgtgtaacacatgttcatgtcttcctcttctctaaacaccatgaaccgctttgtgccgccacaattgaatactaacgacttgttcgcagggctttcaacgtacctaccaagcagagccaaaaagaaagaacatgttataacatgaaaccgcaaaagcaaacagacaaccctaacatgaaacctcgtaccatttgagtaagaaacgttgtcctgaaggagactccacaagctcgtgtgccctgtaacaagaatcgaaaagctgcaactcggaatgcgaaaactgaggaaggttatgaaactttaactcatggtactgaggcgtggtggatgggagaccaacccaagaccacaagtggtggccaccagaacttggcatgtagaacctttgatctctcttggaatacatcaacttagattgctcaaaataatcgaataatctagtggacatagcaaggaggaacccctgactgtcttgaccaggcgtatatatactcaccggacgtcccatgtatttgacagcaataatgcattcttcctcttcaggagaagaggacattgccacaccacttaccaattcagtttgagaaccatttagactaggacgaggaggcagatcaatgatcttgggatttgatttagacctcgagggatagttgctgattagtatgtaatcaggggagctgagataaacaccccatccatgggaacttcccactagcttagacttaatcaaatttttgggaagtggcttatcaacggtggtgaaataatcctctttggccgggtccaacatgagggactctgttctttgggcttcttcaccacaagggatggcatgatgcagcaaaaaagggttggttgttgaggaggagaacatcctaaaggtgttacatctctgtgggatgagtaaagaagtagacattagaagaagaggaagaataaaacagagattatataaaaactagaaacagagagagattgaagagatttacgagagcaagtttgtggagagaggacttggaagagaatctgagaagcagagacgacatagctttgcgttgatagtgaagaatcaaaaagaaataaagaaagggttttcgagttagtcaaccaagaaagtcccttcttgactcgatctaagaccaaagtgcctggccacaagaataatgtctctctcgtttttatctttgtttccacgtttctccacatttcctttttcccttattatataatcttatgaaaatggaaacgaaatatctttgttatcaaatttgtgcacaagattctttactttgcaccaattattttttctttacttttcctttgatgacctatgtgaaaacccttttgtttctttttgattttttcacatatcaaagcaaaagctatgtcgtctctgcttctaagcctctcttccaaggcctctctccgtaaacttcctctggtaaatctcttctagtttttgtatataatctctgtttccttcgtcttcttcttctgatgtctatttcttacttttcaccagagatgccacactcttcggatgttttcctcctctaccaccaacccttacttgttgtatcgtgtcataaactatggaagttctatggatgatattcatgtaacaagtaatatccactattttgacccggtgaaggaagatgaagttattgtccgagacaaggtattaccaatggagttgcgtaaagggtgtctggtcggaatgtcccatggttggggagttttcaaggccgtgtgtgattataatgaatataaagccatatatgttactgactactacaatccatgtggctccaaatctgtcaaaagcattcctttgcatccccttggtaaacctatagctatccaacaacaagctatcactaacgccgcaatgacttgttcacctgatcaaagcaaagattttgcagttgctgtcaagtgtttaggacctatgatcaatttcaataggcctggtggcacacacaaggactcgggttcggtcatctttaaaaccccttttcaatattttgatcaatcaaaggttatgtattcaaagagagatgaaaagttctacactcctagttttggagggcacttcttggttttttgggattctttcttcggagaggatatgaccggctctgagttggttgagttgcggttttgcaacgttcctaagttgacccagtccgagtgggagctcttgactcatgttccaagactgtataccttgtggagtctccctcaggccaacgtttcctaatcaagtagtacgctcagaaccaccaaccaggtgattcgatgacattcctgtgtcgcggaacaaagcgtttcatggtgtttagagagctggaagaagataaaaggaccatgtgttacacggaggacattggagatctctgcatattcttaggcaataatgagcccttttgtgtcaaggcaagctcattccctggtctaaaccctaactccatctattttgcaggcgatggcttcggtgtttacgatatcgccactagaaaaccacgttccttccgtcccaagtctccctcagccttctcgtcagcatcactcctcccttactggatccctccaatgtctctttagtttacttgttcttcactagtcatgttctgtaacttttgttttttatgcttataattgttcttttgcgagcccttggacgttggccgccatcttcatacgagttaataaattttggtgtgaggaaatatacgagtcaatttatgaaacgaaggtagtaactttcgtaattccttttttttttttttttttctctggttgtatgaatcattcatcatcgatatcttatacttttgtatcatgatcgtatggatcattcatcatggaccttgaggggttactcaatagagagcagtagtgtggaagaccttcttggtatgactaagctcagaactctcacggtccattcccttgatggttgtacgttagaaactctgtctgcatctctctgtgaatcgagagaactcgggcagctttcattgtacgaggtcatgcatgataggcataatgaaggaaaattagttcttgatttgattcaactcaaatttttaacggtgggcatgcatatgcctaggttgcctgatcaacatcgattccctccaaaccttacgaacatatgtcttcggtattgttgcatggaagatgatccaatgccgattctagagaagttgctccacttgaaattggttgaattatcatatggtgctttcactgggaagaagatggtgtgttcaaaaggtgggtttcctcaattgtatgagctaaatttatgatttggaagagtggatagtagaagaaggctccataccatgtctccatactttgactataaatgaatgcagaaagttgaaggagcttccggatgaggtcatatacataacatccttaaaacaactgacaattggaggaaggaatagtgaatgggtgtggaaattgtctgaaagaggacaagatcactacaaagttcaccacattccttgtgttcagtttatttactagacctttgtctaattttatgtataaaaattataacaatgtagaaaactacaacacaaatgagatcaaattctgatttttaaaatccggttgtgatgattattaatcgtggaaaaaaatcagggattataacttttgttaaattgtgaacgtacaatattgaactgaaaatgccaaatgaattggttattattactttgatgaaaatgaattgatcgtttaattttttttatatttataacaaaaatgcgatatgctctttttaattctttatttctatttttgcttcagaattttttttcattttatttttggtcaaaaaggttattaatttccttttcaatttgtacgaatttaaacggtgacgtttttgtttaaattatcaaacaaatcaaaacaaaatcaataaaatctaatctctcatcatgaggcatctttgactgctctttaattcactaaaaaagtctaaaaccctaaccattgccctttttcaaacgaagaagaagaagacgaaacgctaccatcatctacacacacacacccaactacttttttccatcgccggcctgtacaaatgtcgactacccgtaggatccgcggcgagaatcggttttataacccacctccgatgagaaaacttcaacaagagcgtgagaagaagagacttgaagcggaggagatagagaaagagaagaagaaggcaaaggagattctcgatcgaaagattaaagtcgaggagaaggagattaagcaacctgaggagtgctcgacctccgattgctctgtgccgagtcgggtctcctccaccaccaccaccaccggaactacttcttccaatttgggccggtttctggattgcaccactccaattgtttctacgcgcacttgcctttggtaattactccgattttgaagttttacttgaatcgacgactagggtttgggcagttttagaatgagaacattagcatcaagcgttgaaaatgggaactttttatcaattcttgggaacgattatgatctcagtctcttattgaagatagaattggtttcaggttttagaatttatcgctatttaggattgtagatttgagaaacagattcagttagtagaacaattgtgatgttgttgtggtcagtcatagtttctgtgtttttgcttcagacaagtagtaaggggtggagaactcgtgaaccagagtaccgtccctatttcttgctgaatgatttgtgggattcatttgaggaatggagcgcctacggtgtcggggttcctcttcttttaaatgggatcgattcggttgttcagtattatgttccttatctctctggtattcagctttatgaagacccatctacgagcctgcacaactaggaggtgagttcttacattctgcttatatttttgattgtttcctatcaaccattagcagtagtgatcgggttctttgctcgttgattggttcttcttctgatagaaaaaaggatagcagttggcttttttgtcaatttatatattttgagatgaagccacttctttcttgggttgttcttaatcttcggatgcacgttctttaggagataggaaaaccaacttctaagcgttctctgctacaatatctagagatattcatttggatgactaatacacaacaacttttatgctctcaaatactagtcagtggttcaagtttatcatggtgttgaattccaaatttgtttcatctcgttggttttctctttaattcccaattcgtttctgctttctagagtaaaattcgttgttttgatgtttgttcttaaacaggagagttggtgaagaaagtgatggtgattcgcctagagacatgagtagcgatgggagcaatgactgtagagagctttctcaaaatttatacagagcctctttggaagagaaaccttgcattggttcatcgagtgatgagagtgaggccagcagtaactctcctggtgaacttgtctttgagtatcttgagggtgctatgccatttggccgtgaaccattgaccgacaaggtatgtttattatgtaattaaagtggctcaacttctcacattggtgttcaatttcatagccggcgaaattgttctgtcctgtgtcataataatgtttaaccttaatattgcagatctcaaacctgtcatcacaattcccagcactcagaacatacagaagctgtgatctatcaccttcgagttgggtctctgttgcttggtactgcatctaacatgtcccttccacattttcatgagtatattttttccaatcactctctataaatattgatttcttctcgcattcttgaaggtacccaatataccgaataccattaggtcaatcgttacaaaacctcgatgcttgctttttaacattccactcgttgtcaacaccctgtcgaggtaggcctgctctgcatatttaaaacatagtctatacatgggcttattagaaacatcgcaaatcaactcttgtattactggtaaaaggtacaagcaatgaggaaggtcaaagctcaagcaaatcggttgcatcggcgaagttccattgcccactttcggtctcgcatcctacaagtttaaactgtcagaatggagcccagagagtgacgtagacgagaaccagagagtcgggacgctgctacgaacagctgaagagtggctcaggcggttgaaggtgattctaccggactttagacacttcatatcgcatagtggttcggcgtggagatgatgatatttagagtcattttctaaactctaaataaggagagtgatatatagcaaaagtgaaatatctttcagctacttttgtttgttttgttgaaggaaaatgagaatctgtatagacactgatcgtacatttgtttaattactgggaaaacttatgtaattgaaacagtttggaaaaaaagaaaaaaaaagttggtcgaagagagtttcttctgctttatgatcgttatagtttcgttattgtgtataatatatgaatgtgtagactgtgagcgatttgtatttaagtataagtaaatgattagggctttagtaacaagatgctctcgtagctcagttggttagagcacccgtttagtaagcgggaggtcttgagttcaactctcaacgagagcatttatttattatgtgttgctcatatttatctttttgtgtgtgtatactactatgtgttttgtcttgaagagttgcgtatgataattgttccacgttaacgtacggcctcttttcttcggacaagaccgatgacacctcaaccccaaaaacatttttgctgtttacacaagtgatatttagatatcttgcttcacttaattttatcaattgccgacacttgtattaatattgctaattatcacttaattattaattgccaaaaacacgatttaactgctcattcacgtgaatatttgattactcaaaagtactatttagatgtgtagagagagtcgattgacaaaaaaaaaaaaaaaaaagatgtgtagagagagttcaatgtcgataattgcaaataacgtcagtattcctaaaaaagagttgggtcaaagatggtttcaattggctaaagaagtggctggtttcacatgcgacacttacatttttcaaataatgttatttaattcttatccacttaccattaacacgttgcatcacagggaagctcctccgcaaattgactccacaccaactatcaattttgtggtcactaactttgagaaacaagacttttaaattacaggaaatatttttttttgtaattgttttaccaaaaataagttgcataaaaattggtatctatatatatatgaatacgctatacgtctacggattagaccaagtaaaattttagaacttttgtatgcgtgttatggatatggtatagaaatatattttacaaataatcaaagtggttaactttatcttttgtaacttagatataatttgaaaaactttcagttatcttaccaggttgtattccaataagcagggataatctatatttttttttaaatgtaactaaatattttacttagtatttgtggctaaagaaaaaaggttgacgagtaatgttgtatagtggaaatcaaacataggaggagatccaccaatatcacttatcaaagtgcgttgttgccacttttccccaatactattggacgcgttacaaacaaaaaaaaagacatatgtgaatcatatgaatgtgtctctaaggtttattgtttcctttattataaggtttcgaccaggcaagtggcaatgcaattgtgcacttctttttgtttcgtttcctttttcttttcctttgtcttatgcttgcttaataagaaaaagttaaaaatgaaaacagggtgatgttcgataaatgaccactaaacatttggtattgtcaaacacaacaaattgttttacactttaattagtttcaagggccgaatctggtgtaatctctaaatgttatcagaacaatcatcgaggggaagagttgctgacattatatgactttactcgtgaagtcttttgggaggcgtttgtagcgatcttgatccaaagtcacttaagttaaggaattgactttcacctaaatgttagtatttttcttcaatttaaatggggcaagttttgtgatcggtttaaagaacttaccaagctggagttagtaaacgatctacaattgatccaactaaaggaagtaattgttaatggctatgaacatatgaaagaaaggtcgaaacccgtaaatcaaggttcgagtacggattaacaaacgagtggctcggatttacgaggagtgactcggatttaaggcgagtgatctaacccatggatcaagattcatataaagtatatatagacttgaaatgatcttagctgataaaccatattctatacttttaaatctaaatttgcttcataatcataactgcaagaattaaaaagtaattggtatattttaattatgggattttgttacaaaatatatggtcaaatcgctgatgcatatatatagttcaaaaaaaaaaatctaatgcataaattgtttagaaaaatgtataagtgcatggaaggaaggccacacatttgatcttttacatgctccaactagatcagtaacttctaaagcaaacaccactctattcagcttctagctatgcaagaatttgttgctattacctattgggggttatacctttctaatatttttgttaacgattaagtttacgagcgaatacacatgtgtacgtacatatatgatatatactgtcaacatataaatagttgtgtgtatacatgtagtgttgttagaaaatgcgttgccttaatcatatgctagaatgtgcgttgatgtattattctgttttatttaagatagcatatattataatgtattttgcccaataatttaatacttgtaggtcatagtctcataagatgtaggaggcatggtttatacttaatactttatagtctccaaataaaatcatggtatagacctaaatttttgggaggataatttgataatgtcatgcctttggggtttcgtaactaaaaaaaaacttacaagaaaattataagatgattaaagaaaataagtagaaagaaaatatattttatatcttttaacaaagtaaaaacatattgaagaacaaaattaacaatattttgttaaggttgagtttataaaatgagttaatttatgttttcatgtatgagctggatccacgtatcaagggtctctggtccaactttttctcaattgttatttagtttcgtatcctgtagtttaaaacaatataagatcaaccctgcaaagttaaaaatcttacagaaaaccccatgttttgagacattacattaattgttccaaaaaaggctgtactgtccgaaaatgttgcattattgcaaccaattgtgttatatatgtgttttacatatgatatactaggaaaattaaggatacacatgatttatcataacaatacttaaaaaataaataatattatattttcatctatttatatcgcattatttaaaactcatatactgtcaaattatatcgaataaataatagaaattttgttacataacattcaaagtagtactatgactaactaaatacacactacataataagagtcaaaacccaatatatcttggccaatgccttaggaaaatgcacaaacaaactcaaacacattgaagtcattaaaaaaaagtggtacagagaatattggatgaggaatattcaccagacaatgatcctgagtagaaagttgaagaactagagcatgatttggactagtagtatacataataactagattttaacctgcggtacaccgcgggaacaatttattttttaaattaatatatataaaagtttgtaaattgtatatagttataaaatgtttttattttatagtttacaattgttattaagtaacgtcctgccaaacccgtcccgccaacccgtcctcttaaaaaaactcatttattttattaatgttgatcttatttatgatatgtttatgaattattgtctaaatattttgtaattttgtagtaattaaatgctatcaaagatctctacggtttgatgattataatcatgtagaaaagcaatatcaaaaatgataattttgtagtaattaaataatattaaatattttggaagttttattttaataattaatcgtgtagttaaggtagagagattttgggaagattattaaatgtcaaatatttaattagaagattttctttctaattatcaaaaataattattaaatgccagtggcagccgctgtaaataaatcccaactccaggatttatttcacaaagtggctgcaaaaatgtatatatagataatttaaaaagttatctttatcaaattttaaaaatcaaaattttaaatttataatgtattatagaaattagtataaatttaatatacaatagaccaaaaccataaaaggatacgagaaaagaaactcaaaacaaaaaaaaaatcatgaaatttaatattttaacgattattattttagacaaaataaatcaaatctgaaatttattttatatcagattaaataatagtaattatataaagtatgcgacaaaaaaaaaatctacttaaagcatatgagttgtagacttgtagtgaaagaaaatgtgtaccaataatctattttaagttttcactaggtttgaatttaggtttggtaatttagcatttagaaaaatggatctaaaagtaaacttgataaagtacatggtctatatctggagaaaagaaaaatgtaaaggacatctctacaccaacgtatatacaacaaagtacaaacatagacagacatgtataaactatattaatactgtttaacattttcacatttaaacctttttcaaattattagttcaacttacttcaaaaaaagaaatgtaacagagaaatccgagctttcaagctgtgaaacaatagccatgcccctcataaatctttctactaattattttttttcacgtaagattctcaaaacaaatcaaaatctcatcttcttggtatcaaaaattttcttactttttttggttttgttatcccgaatttttagaatcaaaacccacgtcaattctttttcaaaggcatatattctctctgtttcaaactttgtgtctcttcttctccttctctgatcgttcgttttctggacgagagagatggtaaatccgggtcacggaagaggacccgattcgggtactgctgctggtgggtcaaactccgacccgtttcctgcgaatcttcgagttcttgtcgttgatgatgatccaacttgtctcatgatcttagagaggatgcttatgacttgtctctacagaggtaaaattcaatcaaaatttcgttttaatattaatctaaaattttattaatttacaaaggtttcatggtgaaattatgacccaatttgtgaaaatttattgtaattttggtggttaactatggattttaattacggtggttgactctgccaaaaatagtaaacagagcttatggaattgactagaagttttcattgactgttgaatgaatcactgttagattcagatatatatacatcgcttagttctctgttctgttctaatattgtgatctgcttaaagattctccttttgaggtttattttcaatagatcttttagttctcaagaaaagtgtgattcaaatttcttaaattttgttcaaaggttttaagagttagtttgagattctggtatttattttgatccagttctgttttcgattattttcaaaattttgttttttgatgctttttgactctgattctgttattacagtaactaaatgtaacagagcagagagcgcattgtctctgcttcggaagaacaaagaatggttttgatattgtcattagtgatgttcatatgcctgacatggatggtttcaagctccttgaacacgttggtttagagatggatttacctgttatcagtacgtatcttaatcgctaaaaacttattattaactctaattcgttttcttgagatctgaatgttttgaaacctttggttatagtgatgtctgcggatgattcgaagagcgttgtgttgaaaggagtgactcacggtgcagttgattacctcatcaaaccggtacgtattgaggctttgaagaatatatggcaacatgtggtgcggaagaagcgtaacgagtggaatgtttctgaacattctggaggaagtattgaagatactggcggtgacagggacaggcagcagcagcatagggaggatgctgataacaactcgtcttcagttaatgaagggaacgggaggagctcgaggaagcggaaggaagaggaagtagatgatcaaggggatgataaggaagactcatcgagtttaaagaaaccacgcgtggtttggtctgttgaattgcatcagcagtttgttgctgctgtgaatcagctaggcgttgacagtgagttaaaaacttgcttgcttatgcatttgtgtgtgtcgatgtttgttttcttgtctaatctttaccgtattggggcattcaatgcagaagctgttcctaagaagatcttagagatgatgaatgtacccggctaacgcgagaaaacgtagccagtcacctccaggtatatatgtgatcgaatagtattacattttttcattgttgatgtgttctaacagtggtaacattgtggaattccagaagtatcggatatatctgagacggcttggaggagtatcgcaacaccaaggaaatatgaaccattcgtttatgactggtcaagatcagagttttggacctctttcttcgttgaatggatttgatcttcaatctttagctgttactggtcagctccctcctcagagccttgcacagcttcaagcagctggtcttggccggcctacactcgctaaaccagggatgtcggtttctccccttgtagatcagagaagcatcttcaactttgaaaacccaaaaataagatttggagacggacatggtcagacgatgaacaatggaaatttgcttcatggtgtcccaacgggtagtcacatgcgtctgcgtcctggacagaatgttcagagcagcggaatgatgttgccagtagcagaccagctacctcgaggaggaccatcgatgctaccatccctcgggcaacagccgatattgtcaagcagcgtttcaagaagaagcgatctcactggtgcgctggcggttagaaacagtatccccgagaccaacagcagagtgttaccaactactcactcggtcttcaataacttccccgcggatctacctcgcagcagcttcccgttggcaagtgccccagggatttcagttccagtatcagtttcttaccaagaagaggtcaacagctcggatgcaaaaggaggttcatcagctgctactgctggatttggtaacccaagctacgacatatttaacgattttccgcagcaccaacagcacaacaagaacatcagcaataaactaaacgattgggatctgcggaatatgggattggtcttcagttccaatcaggacgcagcaactgcaaccgcaaccgcagcattttccacttcggaagcatactcttcgtcttctacgcagagaaaaagacgggaaacggacgcaacagttgtgggtgagcatgggcagaacctgcagtcaccgagccggaatctgtatcatctgaaccacgtttttatggacggtggttcagtcagagtgaagtcagaaagagtggcggagacagtgacttgtcctccagcaaatacattgtttcacgagcagtataatcaagaagatctgatgagcgcatttctcaaacaggtttgattattactcgaatacagtgcactctaaaacagccatgaattgatagcttgacacttacttcattgtcatgcgtaaatgcaggaaggcatcccatccgtagataacgagttcgaatttgacggatactccatcgataatatccaggtctgactacagaaactcagactagactgcaagattctttgtttttcttctccctccttcgaggtacaaagctcaaaacatggcaataaccgaagggaaagatagaaacgatcatgtgttgtatctttagatgataatctgcaggaaattccaaaagcaggttttagaagacaataattgttttctttttggttattaggagtaatgtgaatttccttgtttctacatctgtctaggtcttacaacaagactcttgacatttagggttcttgatcgtctaatttcctataattagaaatgttttgcttctctctttttgagttttaggaacattttgtgtaaatatgtttctatgcgttgttgcttcataataataaagatacggtatttgatccgttcaatcaacaaaaatccacaaaactagccttgaccagttctgctattttctgagcctttaccagttttactacagtgtatttgcttctcagacaagaactggttggttcggttatttgtgaacttatatgaataccggtttggaggattaggaacaaaccaatggcggagaatgagtaaacaaaatatagtaatacatactgattagtgattactgacattctctaatcataaacaatacaagaatggtaacatatcttcatagcacctatataaagcttgttccaacactcatcaggttgaaaaagaatcgagtgattctccatccataaactgcggattggacccgttctcgagtaagccggggaagaatcaagaaactgtatcgccaacccaacgggaggcttcagtgtagttacgcccgcagaatcaagagagccaaaacaggtaatgccaggaggaaaacagagatgtgtttccggtgttggctacttctcattgggagtatggttgggagagagcactcctcaccgttgaagaacactttgctcgggaagccatctccaccagggacattgattccaggagtcagtttcttagtaaaggacataacagattgttgttttcctggaatccgaggattcttcaatggattttccccgtctctttctgcgacgagataattcaatccaggaaggccctccatgaaaatagtattgttcttcccgttgataccaattgtagatgcattgaatgagtaggctttctcgaaacccggtgcagcatttttcatctgaaccgcggtaaaccaatctacaaagtctgtttctccccagttgaagactgtgacccgggctgtccatccacctcgataatctgtagccaaatgccagttgatgctaactccgcagttatccccacaaggcatcgggtttggcacgggccgttgttttagataagcccaagcgacggtgagttcagttcggttctcaaatggaaccagaagagcttgctgcggtagaagaagagacggagctgtggcactgcaagcgcgggctgctttgttgctggaacacccgcaagcacatgtcttgcatgggacgattgagtcgttgaagtaggcagagaacgatacacaacatctaggactcgcatcttttggttgggtgatgttgcagaccacctgccagcttgcaaaagcagtccggtttgaaggtaatccactgggatcgacgaactggctcgggctcacccgaacaggagggccacacttgtaatccgggttcagtgtaccgtttattctccagttctgaggcggtgatagagcagagatattgagatcaggaggcattttgtacacctgcatctggaaaactgagctcgacttgctaggatccattgaccgtggtagaatcgtcccatttctgcagcaaaatgggataagaccgaatgtcgaatcattgtatttcgtaggagggagatctatgacggttggccgtcttgcacagcttaacacgttagagaagtcaagatcttgatagtgcttcgcctgtgggccatcaacacaatctgatgaatcaacaatactcgggtaagcccctttcatggtgtagataaactcgtcccgcatccagtcaaaactcagtttccagttatccagccggccaagcgggttatggttctccatagtgacctgtgccatataattggatgaatatgatctgaccacatcgtacatgatagtgaggtctccatcttttcgtggaagaaactcattatcaatgatctctctgttatcatagtctgggtcaggaatgcaacatacttgcagaacatttgtacctgacaaaacagagaaaaaacacagaaaataagcaagcacggactccacctgtaaaaaccttcaaagttacttatgctttacacgccacaacacaacatagattcctaagatcaattagaaagaattaactctatcttgtcaagtcatttcttttatcaacagattcatatttagaaatgtgatgaaagtggatcgactcatatactagctattcgattacttctgcagaagatcttaaggctcttatgattgaatccagatcaatcacaaagaatgtgttgcaaagactctcacatttgactaattcaaacattaggtgtaaaaggaagctaacaagtaacatacataagacttttatcaacgagtgagcacatgggacttaaacaatgcaattgttgctagcatttgactatctctactaatctgaaattcctccttaattatagggatctacactagatacttcatccttaacataccaaaactcctaaatatagcaaaccaagatcagtcaaaagattattaagccataaatcaagtaaaccaaaatcaaatttaaacctttttgagtagctttgggacatttccatccatcagtagcgagagtgatgttcttaggaagcggcacattcggcggcgcaactccgaactgagtcccgacgagctcaacacgagcttgcatctgagtgacatcaccagcagtctgaatagctgatttcaaatccgacgaaggataaccagcgaaaacggtaccgttttcgacgctcaccggtaagctcgagccgtctgagagtacagcgtttgaagcagagacgaggatctctcggtgtgcgaatttgacgaagacacgccatgatttgagctcgtcgcggccgtggttgagcactgttatcacagattcgaaccggtagggttgatttgcggtgtcgttgggtgggatcttagatcctttagtgtgagtgtatgaaacgaatacaccgttgcatagatccgaatctgacggtggtgacggtgacggattagtagtgttggcgtcggattgtgatgatgttagaggaattgatacgatgagaagtgatagtagaagtaaccgagggatgaagttgggagctgaatccatggaaccctaaaatctcgctcttagtcaaaaagagaagttttttgaatttgaattttgtttgggaattgagagaagttagaaaaatggaagcttttgaagagatgatgactgataaagcgaccgcgatagtgcaagctgtaatgaaaaatgtttgtatttgcaattcaaattttcccctggagcattttttgttggctttttttgctttttcttttgttgaaaatctaagaaactttatggataccaatactcttacattattacataattattttcttaacaaaaataatgtatggatataatttcttaaaccctattttataagaaaaataaagattaaaaataaaataaaaaacacctaattgcaacaaaaacttcattttgtattcaatttttagatatatttaaaacgcactaaacaagtgagagcacatgagttctgtcgcaacataccaaattcttattttctgttcaacggtggtttgcttacttataaatggtatgagcatgagactatgagagcatcaatacatattccttaaaaccatccttgtacaactttccgagtcaatgagttcgtagactttctcctgaatagtgaagaaaatgttttgtatcatcgccaaattccactctttgcgatattaagctgtgttcagtgttctcgttcatagtcaggtgattaaaacaaaataacttcagaacatataagaaagcccaaaataataaaaagcccaaacccaaaataaaacgtatagcccgatacaatagacgatacatcactatcactagtactaagccaactagacataagacatctcccgtgaaatgtttgcttggtcttaactcttaagcttaattaagaagacaatgagataatcctcatgccaagttagatcactaatacactagtaacctccaatccattattaacagtatttctaatcatcggaccagacaagaatattaaacattcatgctactgtcttgagtgtctatgatctctttcccttaaactctcttgctgctgctgctcacaaatgattcgtccaacagaaaacggtgccgtcttttcagaaactttataaataatggataagaatactatgttttttactacttgggttttgtcacagatatcatctgcctcgtcagaaaggtaacagataaaaaaaataaataaaaaaaatgatgaccttatcttcaaccgctactcctacaacttggtaactgctgctctagatagataaatttgcatcttaaaaaattgtactatatttagaaagaattatacaaatactcagagattagttacaaagatggagaatgttgagagttaacttgcaattaattgaattgcaatcaactaaattacaatataccaaacgatgatcatatcgacatttgcggataagatcaattgtagttataagtccaaatcatatgatattggtctttcctttcttattgtcctagagagtttagataagaaaacatatatagtacttttaattatttctgcaatccattctttcccaatagtgcaattttcagtgtggaatttatatcccatatataaaattcatattcacgaaattcgttttatcttttttcttgaattgcggtgttacgtaaccatccttcgcatcataataaattattaataatttataacgattttaaggaagaaaaaaaagcttttaaaatcggagaattaatttcggttagttcagatttatgagtgaaagagcaaaattgcaaaaaaaaaaaaaagtcactgaagatttattagactctcttcttcttcttcctccttggcgcaatttcgcaatttcgcaatcgcatcagtcaattatcgaatcgtcctcccagagattaccggagaaaatgaggattgatgagaacgaaggtgtctctgcttcaagcaagcacctagtcttcgcttactacgtcactggacatggtttcggtcacgccactcgagtcgtcgaggttccttctccttctctcactctcttttctctctgcatcggtctcatttctgatccatgcgttttgttttcctctttcattgtgagtgattaatccggataatttgtggtgttttcaggttgtccgtcacctgatcgcggcggggcatgatgttcatgttgtcaccggcgcgcctgattttgtcttcacatctgaaattcagtctccgaggctcaaaattcgaaaggtttcttacttcttcttcttctggcgatgattaacttgcttggtcttgatacatggaattgcttactcgttaggttcttttggattgtggggctgtacaagctgatgcattgaccgttgatcgtcttgcctcgttagaaaaggttttactcatatgatcacttttatgattcttgtccattttggcgtatttttggctttgttaacatttcgatactggtttggtttagtatgtggaaacagctgtggttcctcgagctgaaatattggaaactgaagtggagtggcttcattctatcaaagctgattttgtggtaattttgattttgttcatacaacaatctcagcacttttatcagaaacgcattcatctagaagacttttgctttgtactccatcattttcataccaagagataaactttagttgaaaacaggtgtctgatgttgtccctgtcgcatgccgtgctgcggctgatgctgggatacgttctgtttgtgtcaccaatttcaggtgacatttttatacttctactatccatttttgtgcgtcttgtttggcctgatttcttctcctggtattagtccttgttcacggcctgtaactctgtctctattcaaaatctcttgtttttgttactagagggagatggttttagtgaaaaaaatgttaaaactttattttaaatttgtatgttacttttagctgggattttatctatgctgagtacgtgatggctgctggatatcaccatcgctccatcgtttggcaggtaaaattcttatacaagctttatatactatcttttatttggctagtaggttgtgataaatattcaattacttttattccctgacatagatagctgaagattattctcattgcgagttcctaattcgcctcccaggatattgtccaagtaagcaacatttctaattacagtttctagtaatcttttcttttattttttcctagtgcattctgcttactgccttaactttatttccttgttatctcgtagtgcctgcttttcgtgatgtcatcgatgtaccgttagttgtgaggagacttcacaaatctcgcaaggaggtctgtcaacaacatttcattgatcttatattcagtggtacaactaatccaaataacatctaatgcccttctttatcaggtgaggaaagaactcggcattgctgaagatgtgaatgttgttatactcaattttggtggacaggtatggctgtctgttcttatatttgatagtttcatggttttgttttaatttctcaaaacaaatgctctgattttacctttaatgtgcatttgcgttgtttctcattgatcatgcctttttctcatgggcagccctcagggtggaacttgaaggaaacatcactaccgactgggtggctgtgtctggtatctcttaacagttatcttgcgtctgtttaatgtctagttactctcaagttgaggattttatgctgtttattaaacttatcaatatgttgttcaggtttgtggcgcatctgagaccctggagcttccaccaaattttataaagcttgctaaggatgcttatacgcctgatattatagcggcatctgactgtatgcttggtaagtaacctgattaagaaatagtcaatgaatttagatggctagtgcgtttctataatatatgcttccatggtttcagggaaaattggttatggcactgtcagtgaagccctatcctacaaggtgccgtttgtctttgtacgcagagattatttcaatgaggaaccttttctgagaaatatgcttgaggttcagctaaatcctctttttatattgtttttcttgtcctttattacctgttttttcaatccaaaaatgtggatcgtatgttaagattttctggtcaaatttccttggcagttttatcaatgtggtgttgagatgatcaggagagacctattaatgggccaatggacgccatatcttgaacgtgcagttagcttgaaaccttgctatgagggtggcatcaatggtggtgaggtagatgttccatcttgttttcatttatctctgaacttgtaagattctgaaatatattacggctttacctggaaccatacgtcatgtgttctaacttttctttttgcacactggtgtaatgatagattgcagctcacatcttacaggagacagccattggaagacactgcgcatctgataaggtaaatcccatatctaaatagtaaaatcttattgtttgacatgaatcatcgagatagtgtgtcatcaaaagtatcttgtgtagtgtgtgtgggatcatctgatatcttatcagcagaattcttcttcacagaaaatttttcagttgggtcttatgtttgttacagttaagtggtgcaagaagattacgtgatgcaattatcctggggtatcagctacagagagtccctggaagagacattgctattccggagtggtattcaagggctgaaaatgaactaggtcaatctgctggatcatcacctactgttcaagcgaatgagaacaactcattggtggagtcgtaagtattgtttctgtctggctattctctaatttttattttttttccttatctcttcacttatcttgcaggtgcatcgatgattttgatatccttcaaggtgatgttcaaggtctttcagatacgtgtacatttcttaagagtttagctatgctagatgctattcatgattctgaaaagagtacggagaagaagaccgtgcgtgaaagaaaagctgctggtggtctcttcaattgggaggtagcatatttgttttactcgactgttttttgtagcttcagtaagcattctactgaaatgtgaaatagaacaaaattaatggcctaagttcatgcctagtaccttgcaaaaatcgacttgcaactcctccaaaaggatacttttattataaagtgtttttggaactcacagttaagatggtggcatcatttttttttcattggtgcaagcatattatataaataacaattttataactctgagataagttgttatatgttaagaaacctttgtgcttttgcaggaagaaatctttgttgccagagcacctggaaggttagatgtgatgggtggaattgctgactattcaggaagccttgtcttgcaggtcaaaattctctactattagttttgcgggtcacttgtgtctatttatctactgccaaaggaaataaatttgaataaattcaacttagtggcatttatctaagtccctttacataaaacattattttgtcttatgtgtaatgctataatgtagtaattgtaaaaataccgtaagttcctccttgcgtatcctctattttgattgatcacaacaatttcttatcgatattatcacaacttcagatgccaataagggaagcttgccatgtagctgttcaaagaaaccttcctggaaaacatagactgtggaaacatgcccaagcccgacagcaagctaagggacaagtaccaacaccagttctgcaaattgtaaggatgagtatttgagtgaagtcacattttgggattgtcctggcttaagattttgaagattttgctttgtagtcctgctgagatttccttgaatctttgtgtttaaggtctcatatggatcagagatcagcaatcgtgcccccacttttgacatggatttgtctgattttatggatggagatgaaccaatttcttatgaaaaagcaagaaagttctttgctcaggatccagcacaaaagtgagtttctcctcttttgttcaactgcttcttcagttctctccgttaacaaggtaataatatcttccaggtgggcagcatatgttgctgggacaatcttggtattgatgatagaacttggtgtgcgttttgaggatagcatcagcttgctggtgcgttttttttcatccttttgttaaaatttatcatttctgctgcagaatctctcctaatttatctttttttactttgccattttaaattttgcttgtactctctgttggtaaaaaatgtttatcctgttctttgttttgatgcacatactttagttttccatgttctaggagtgaagtcatcaaaacggtaaagaaacgtttagacatgcaattgtaggatatgaaattagcaagtttgccatccccttagagggccacaattgcgaggcctctcagttataattctgacaaactgtgatctttctgtcactagtcctttatgagtttcttaaaaatcttagacctctgtccgcatttagttcttggtactatgcatattagatgaatattagagctgactaattatttgctttgctaggtttcttctgctgtacctgaaggtaaaggtgtatcttcatctgctgctgtggaggtggcgagcatgtccgcaatagctgctgcacatggtaattcactttaacatattgtcatatgatcacgaacgctggtgaaaaaacagaggtcatttgagatagctgaatataccaccatatagatatacggaaattttgattctatgcattttagttctgtctatcccaacaattatttgatatacatgtgcaggactgagtatcgaccccagagatcttgctatactctgccaaaaggtttcatgttcagcatcatactaactcctttcctgactttgtgcaatggtttggtttactaattctcttatattgccttgtaggtggagaatcacattgttggagctccatgtggtgttatggatcagatgacttcttcctgtggggaagccaataaactgttggccatgatctgccaagtaggtcttagtaacgcctaagctagaagcaaaacatcaccattcctgatatctcctttcttaacaagatttgatccactcatttctcttataaatgtttttaaaaaacatgtagcctgcagaagtagttgggcttgttgagattcccaaccatgtcagattttggggaattgattccggaattcgacacaggtaaacggtttcctcattctgttttcttctcaataggtatgcatataatgcttcacacaaaatattttaacgtcactagacataaattttctccttttactcaaaaataatccctcaacgtattatctcaattctgttgaacaattagctttgtcttgcagcgttggaggtgcagactataggtcggtcagagttggcgcttacatggggagaaagatgatcaagtcaatggcgtcttctattctgtcaccatcagcgtcaagtgctaatggaggcaacccggaagaactagaggatgaagggattgacctacttgaggccgaagcttcattagattacttgtgcaatttgtcgcctcacaggtgagaacacaagtcgaagtaaaagcgtttcgtaagtcacacaccagcataatatcagctaatccacctagctttggttatgttgcagatatgaagcccgttatgcagataagcttccagatatcatgttgggtcagacattcattgaggaatatgcggatcatgacgatccggtcacagtgattgatcaaaagcgttcttacagtgtaaaagctcctgccagacaccctatttacgaaaacttccgggtcaaggtctgtcttttgttatttcacaatcatcttctgtttttgaatgcttttctggttggtttaatatctatgctcagcctatataaatgtgaaatgcttcttcttgtagacatttaaagctctattgacttctgcaacatcagatgagcaacttactgctcttggaggacttctttatcaggtattacttcaaactactgtgagaccaagagttgttgagtttcttgatcatggatttaacatatcgttgatgctcttttactacacttggtttgttcagtgtcactatagttacagcgcatgcggactaggatcggatggaaccaaccggctggtgcagttagtacaagggatgcagcataacaagtctaattctgaggatggaacattgtatggagccaaaatcacaggcggtggatcaggtggaacagtctgcgtcgtaggccgtaactcattgcgcagcagccaacaaattctcgaggtatgtaaacacactcgagattccaaggtagtaggaacttagttatatataaaagctctaatggtgtggtggtgaatgttcagattcagcagagatacaaagctgcgacagggtatttaccgctgatattcgaaggttcgtcacctggagctggcaagtttggttacctccggatccgacgtcgtatctctctctgattcccttcccattcaacttctccctaatttggtaaacttttatttatttttatgccacgtttcttaaatcatattcatataggagtatcatctcacaaaataagtaggtccgttgttctccactttcaaaataataatgatgataataatcatcttttatttagataaaaatgatatgtatatactgcaatgttatgttaaacatcttatgcaaaagaaaacaactactcttcttttattattgttttatgttaatctcgaatgtgttcaatgtgtttgcatacatatttgtatttacttcaagattttgtttgtgtaagcataaatgaaagtaagcataaatgaagaaaaaaatagcaaatgaatatggaagtagtaaatacgctaaaagcaagtggaaagatgggtagtagtatcataatagcaggacacagtactcgatgatccctatttattattgctcatctcatgtgcctttacttgctttttcatttgcttttatcaaaaaagaaaaggaaaattcctattcgaaatgatgcgagtaaatgtcttcgttattttatatagtagtaagattgataatttaataagtccggtttcatctgacgaatcataactcactaatgaagtcagaagagaaagaagaaatcgtgatctcgtttagttaagaagaaaccattaaagaggatagagagattcccaacaaatatgagagaagaaggcaccaacttaagttactgataaacgagccgacatgcacgtgctctcttcccttgttacgcgttcgttcattctcatcggatcctatacgagcttttttcatccaaccgtccttatttgtccacgtgcatgctctgcactcaacccgttccatcatttggaaaatgaccaccagttcaataacccatcgtgcaaaaaacacaacgtaatactcaaaaactatttctatcgtttgagcacaaattttgtatcacgggcttcactatttctttcttgctttgtaattccatgaacaaatttttctttaaatctagaaaacagtaatcgaaatgtgagttcaagataatttggatctttctgtaacacttttggtcaattatttttaactttcaatataaattcagtaaatgtgagtatatatattacatacagtatactttaaaattcttcaatgacgtatttatatttctatagtttttttaacaaatggtgagaaataaaaagaagtggtgtacacaatctaacacgttccactggttcactctacaaagtgaccaaacacttgcccttcacacttctttgtcatcttccctctttccttcttctttcttcctcaaattcacttattcacattctctcaccagacacaaactccagattcatccgacaatggaaactttcagaacattccatctttttctcttcttcttcttcttcacattcactactaccctgacgtcaccatctcagatcgcagactgtacaatgtgcacttcttgtgacaacccttgtcaaccaaacccttctcctcctcctccaccgtcaaatccatctcctcctcctccatctcccaccaccaccgcctgtcctccacctcctagctccagtggtggtggtccttactactactaccctcctgcttctcaatctggctcttaccgtccaccaccttcttcctccagtggtggctactactatccacctcctaaaagtggaggaaactacccttatacaccgcctccaaaccctatcgttccatattttccgttttactattacaaccctccgccgcaatctgttatgtccggatccgatgcaaagatcagattctcttacggagtttcatttattttaattttctctctttatttcggttgcttctagtttaaaacataattaaagaagataattaaaggaagaagtagctttattaatatatcaaccaaacaggttcatttcctcagatccttgcagagattttttgcagataagaaggtagaagacaagactatgcatgagagatcttcacgctacaaatattgagacgatgagaatattgtttctccatttttctttttactacttttgcttgtacaagtagaaatatatttgtacttctatctttaacaaatttgtgtgttaatgaatgtaactctcttttttaataataagaaaaataatcaaattgggttttaattacttttgtgtacttacattccaatctcaacaaactagttgacgcaatagtttggttaaaaggacaaacaaaaaaaaagcatcatttttttatactaataatcatatagtataccaatagtataacactattaaaatgagtatatattaaagagatgatgtagagaggacatgagccacaagtgactgtattgaatataaacctactcgaggctaatattgggtcctactttcttctttgatattggaaaagccccaaactgctataagtgcttttgggcctacacgttcgacgagcatccgatgtaagttgatgttccaattttggattccatcgtcattatttgtttacgacaaattatgtttgttataaaccagtaacatgatattccgacaacgaaatttggccattagcgattaaaacaatagaatgtagtgttcttttattattgttaatcaaccgaaatgtgttactaaatcagcaacggaataacaaacatcctctgttgctaatttgcaatcactagccaaaattaaacgaacaaaactataaagatcaaaccattactattttggagtcaaccaagatttcagtttgagttactagactgaatcaccaatggctattattggacattttgtatcaaattaattcagttaaaaaacttaaaacaaagagacacacaaaactaggcaatgataaaagtgttttcgagatgaagtgttaatagttgaacttctatcaaacttatgtggaaaataaaccaattcacattttaatattattattttatttgctaaaatcattagcaacatatatttaaatctttatctgctctcttaatctgtttctttacacgaaaatgagagtttctttttcattatttcttctatgtaaaagatacattacattaaccaaagagattttggagtcattttgctacttaatatttcaaagtcagaatcaatctccaacgtgatacaaataatgttttttttttcttttttgtcaatatacaaataatgtttttagcttgtgtttcagcatgttcacatttgtgggtctatttgcatgcaagtgtatacacaaaaatggttcttccttatcatagaatttgcagccgcaaaatttaatctataaatgccattttcttattatccttccatattttagacgacaggacgacatgctagagaaatttatatataatcgttttagagtttaccaattaaataaataaatatctaaaaatataaagagaataatatcttttaattttggaagccagaaaaatgttttataaccttttgttgtaaaaaaaaaggacgtgaaaaaaaaggaaaaaaagaatcgcaataaaatgagaagagagacccaattgtctccatcaccggctcttaattttttttttgtaataaaaaaaatctgtttttattataatcatcaacgaaaagcccaaaactcatgagctgtttatagctgtctcgttctgagatcacgcgcttcaagatcgcgtggaggtcgagatatccaatatatgaacagctggactttattttggagcaaaattttcaaaattcacattaggtttcctttctaattcataatagtttttaaaaataaaagactctttatcaattgattgaccattagagtttactcaaacaaatcgttactagcgagtagtagtgacaaaaagatccttaaaattcacaattttggaactaataaaagatcattttaagccacctttaagcgaacaattaagaatagagacatattacaaatcattcaacttcaaagaaatgatcattaatcaactaaaccagagttcatacgataattaattagtagatggcatataacattagcttgcctctaaaattacattaactaatatatatgataagtaggattaataatcctctcttcatcatttcctcactaacttattttccctaatctctttcactcaaccattacgacacatcaaaaaaaaagggttaagagacaaaatctcaaccacaagaaagagccatgagaagtactgcggctcgttcctcttccccaagtttcctccatagcctcttcttctccacagccgatctcttcatcgccggtaccttaaacccaaaatccaaaaatctaccaacccttttcacgttcttcttgttattattgctgctactggaattctcaggatctctcttgattttgttcttgacatttcctggttcacctttggcaatcttgacaattcccggttcacatttggcaatcttaacattaactggttcgccttttccggtcttgacatttcggctctcaagaccaagattgttattacttttgctcttgattttaatatcatcttgtctaattccaagagctgcttgtctcttctttctgctcttgataccacacgcattgcacaatgactgcaaacaaagtcaatccatgatcagaccagagaacaaatagtgaacaatcatcaaacagatctaaaattaaagagacataaccatctcttagtaaaaaaggcatcataaaaacagtgtaacaataatcttaacctgatcaattagtaataaggcttcaaacacagaatcaaaacaaaacatagagatcacataacaaatttaaatatcaaccacagattgacacaaacctcgcatacctagactatgtatacacatgatcacatcaatgagacaaaacccactagcaacagagctaagcacacaagatcaacctacattttaagtggattcaagtacctatttgactagatctaacacatgagaccttaaagcttggatttttaagggtttaaaagaaaatggtagagagagatcatgatccttactttagggccaagcaggtccaccacgccaaaagaggagtcctgcttgttccgcaatcaacgcatgtcttcttcgtatcacctccacttccactgctactacagttcccgttgtctacatcggacgaatctcccgccgattcgagcttcgtcgtcttggtttcttccgtcattgacatctacaaaagaaaaagacaattattaaacgtgatcatcaactacaagtaagagaaggatcaaaaacgatcatggaaactcacattgatccacttcgaagcgagataggattgagaagaatagaaaactctgaaacagaagaaaggagagtaacggaaatggcagagaaggatcaaagagctcttcttctgcttgaatggctctctgtgaagtttagagtgaagatgatgatgataaggaagagagagagacgccgcagaagaataacggataaaacaaacggagagggtttttataataaaggaggaggcggggactaataaaccctagatttctctttcttaattacttttttaccctcgagcgcggtgttttattactatagaaccacccgccaaaaaataaaacaaccacaaactgaaaaaagaagagggaaaatcattttacaacaacaacttgtaacaaagatcttgtggaagggggttttttggtatcttgcttgctttggtaccaaatttgaaattttaattcaaaacctggcgcacgaaatacattggatttactcgttgtggttgtttgccacgttagatttccctaattgggcttagagatatgcatgcattttttaccagtcttttagatattttgtgtaattcttcacaatgaaatacgaaaaatttatgtaataatattaggtatatcgaagacatgctcgtgtagtgcaactttttttgtatgaaaattacaaaacatctctctttttggtcaatttcatcttatttaaatttgtgtaatcgacttatgaatatttgagttcttttgggtccaaggcatacctacgcttataaacgacagggattgaacaaaacataggatttttttattattgaaaccctccctacttgaagttgacgataaccattaataacatcgattaatggaaatatgttgaaactagatacgcgtgcatatgtagacaatagcccaaaatgacttggaccgcactaaaatagattataaaaaaaaacatttactataaacaataaagagacgaaccaattgggcttttatgtcaccaataagaccaaataaagtttgaccaacttttttatgtttgactttgcagtgttgtgtagtacaaatgtaacaaaaacccagagagacacattctcatcagatcacactttaaaaacttataaaccctttcccaaaaataaatatcccttgatgactcctacccaactcccccccaacaagcttattccatgactcaaacccaccaaccactggatctgaccggaccaggccagactaagtaaggcaccccatctgacttttacacagaagaccagactctctaatcataccctttttaaccagtgcccccaaactctttaagctccttcgactcttcaaatcgtcatgttcagctcctgtggaagcaaaaccagactcacagattcacacaaggtagacacacaggcagatttactctgtttgctagtctagccttagatgcttagataaattagtcccaagtagtgaggtttttttaccttcactggaagttgaatccacctggtggtacggctgcatcattacctcctccaaactggaagccttgtgcagagggatcaccaggtggtaaagtttcatcttcctcttccaaccagtacgtttcaagaatcttcactgccttctcatagatttcgctgttgtcatgactctgcagattctcaatcttttctaatccctcagcatcatcgatcagctgtgcataaaagtttacatccccggtatttcctgtgaccttttcagcttccccaactttcaaaatgttctccaatccttccagacacacagtgataatccttggatcagggcacaccaaaagatcacacagtggttcacgactccctgttccaccatgtacctaaaacacacaacggaataacttaattgactgtttgaaaaataaccaacaaagattctaaaggagttgagatcaacagaacatggagtttatatcggataatcttacttgatttggtcaggagaaccacctgaagtggcatttgatattgcccacgcagcttctttctttatatcaaactccgcattttgaagcagattgacaagagggcaaatcaaaccagcttcacacacagcctgcaataccacaacaatattagagaacataaacacacagaacatctttcttcaaacaacaaaaaggcttctgaaacatgtcttccaacattagtgattagtttatgagaaactgataagctgagcagaaacaacaatctttagcaaaagttcacctgaatctggtccctgtttccagcagtgatatttgagattgtccagcaagcttcctttttgatgctcttcttatgattgtgagtcagaaggctcaaaaggctaagaagtgcaccatgactaattacacactgtagaaccaaccaaaaaagaaagcaaaataagtgaggaatggtacatgtgtgagattcttaagagtattatacatactgccttaaattagtctaactattcaaaaggaatgttaggtattgcataactagggtaaaaaacatgcagggggggaaataaaatctgggaagaattgacagttcccattctagagattcatctaggaagaatttgacaagtaacttttgacaactaaatgtcattatcaacaaactcagattcagctttctagccagtgtatttcattcttcccatcagtattggaccatgtatcctgaataatatgaatgaatgacactataaaagaaccaacataccctgtgtctgcagatcatctccagtgacaatgttaccaatactacgaagggcaggaataagcacagatggtgattgatgcctacagcaaaataaaattgataatattcattaacacataacattcattatacaaaagcacggtgaaatcatgggatttgaaactcactggagaagctcgacgagtcgaggaacaacacctgcctcaatgacagattggattttgtcatttgtgccatcggaaaggtaagagagagcccaacatgcatccgttaacacttcctcatcagtcgaatgaatcaggcgttcaagggctgggagtgctggacggacctgttattaagagatcacaagaattaaaaagaaaaactccttcatctttgggcagagattaagataggaatgagagacaaacctggtcaaagggaggctgtggcttgcccctgcagaaattagagagggtccaagtagcatttctcagcatcgagagtttagcatgctcattcaactgagagagtaatggtatcaaagctccttgaccaaggacaagatctctgcaccgtggagaatcaccagcaacattccctaatgcccacacagccttacacatgaaaagattaagaaacaaacaagctttagaacatgcttgttcccgaaaacaaacaaaattgacagtatattgagtcatgagaaaaaaccataaacacatatcttacctgctcacggacatcatcactctgagaagccaatagttgaacaaaaatcggaacagcaccatgttcaatgaccacctttgtattctctgaagtcccagaagcaatgtttgtcaatgcccaagcagcctcaaactgaaatcacacacacacacacaagtaattagtatcagaagacaattctagcaaaatatgacagatacataacgatccaccaaacctgaagctgtggataatcctctctagtgagaaattccacaaaccgaggcacaacaccagcatcaatcacttcttcaatcggaggactacgctcaatagaaagcaatttccggaactgagtagtcgcttcaagctgtaaacttctatcatctgaccaaacaccaccaaccatagcaggcaaactctccaactagccaaaaccaaaaccaaaatcaaaatcgaatcgatctaaaccaatcaaatcctaggaaacggttccagatcgctagtaatattacctcttctccaacagttgatgaagcaggaacaggagaggagcgaattgaggtagctgattagcttgaaggccttcacgacgcttcttctgtaagctttcttcacgcttactcttacggatctcgaccatgttgtcctctctcctccgtcttccttcctcagcatccaccgccactttgtagcggttccggcgaacctcagtcttagcgttaggtctcaaagacatggtggctaatacgaatctcctcttgcttcgtggcggtgaatgaaaaatgagccaacgagagtggagacgatgtatgtatatatatgaaaagtgtatgtatagaatcggcggattggtagaggatgataaaccctaaatgaagtagaggggaacgagaaaagaggaaaaaaggcacagagagaaagattgaatttcgttggtttacaaaaacattttggtaaatctaaattttaagattcgatacagagaccattaatttacttaagttgacttgtttattcattagtcttttcgcaccgactaaatttaatttaaaataaaatacagttttttttttggcaaaacttggttttgtgaaagtaattttaaaagtatattatattcgtttaagaaagtttagagtagagaacttcgcatttgagtttgacgttgaggaagacgtatgagcaatgctcatatattggggtagattcgtctgttggagccataacgattgcaagtacctctggtagcattatctaggaggtgaaaatctgttattctctctccgttcttatctgatgaaagctaataacagattttcacctcaactttcatggtatcaggtctttcccacagactataatgaattttaatttaaatgaaaaaatcgtcagaaaaaaatacttatgtttttttaatcaaacatctggctttgtgaaatggtgcatacgaatttaaaagtgtactcgttataaataaacacaatcatcattacttaagacggctcagccaagtttggaactttaaagagaaggtttttttaagaagtatacacatatatgtacggctgagacatctgatctctgaggtctttttaatgtctctttaaagttaagactccaggaaaaataataacatggtgatggaggttggcttttagcggagatcgaggacttcatatttgagtttggcattgaggaagacgtgtgagcaatgctcgtagattgggttaccgtcttctgattcttcgtgtgggtggaagcctcgttgctggcagtttcggatcacagatacgcctgatggatcagagagatggaatattccatgaggtgttgattcgtctgttggtgccattacgattgccaccgcctccggtagcattatctgggacaatagatatagatgatggttttactataatcgcatcataagtgattaacatagagatattgataaggggagtttgttacctgatacgagtagtgtgtgtgtagatcaactgatgacatgaagcaagtttgtgtagggtgtgtctgaaaccaaaatgtaaattagcaagacgaatcgataaagcttatcaactagtggatatatggattcacaattgttctgagtaacgttttggtaagtcattatctggaaatggaagattttttagttcgggtgagagaacttacatgaatccaacccaagggaaatagagagagtctgtcctgtactcgaatatttcttctcgtttagtgtttggcactgtacattacccaaatgatgatgaacctaagtgtgagaagcataccagcgagaattaaaaagattgttattgatgtaaatggttaagaaaaatgaagaacatacaggaatctgaggtagactcctgctttgggattatgagagtagtgatatgaaaaaaccctgtttttctgtaaacatggcaaatagacagaatataagtaatggcgagctgatcatgatattggaatcaaaaattataaatgcaaaggttccatctactcaccagagaaccagcaagtactccacaagtttctaaattccgttctgtgtttgaccgagctagccttaggaaatcatccattatgcgcacaggcttcagcaaatttaaataaagggtgacaacattagtagtagattaagaagaggtgaaagagaaagatttccagaaccgattctagcaagcttttaagaagctgtaatggtcatgaatccaatacttcgatgatttaatgtgttgattcttgaacacataccaaataattagactaatcatggataattttctacttgatatgcatatcccttccactttactctcacaaacactatggaattggtggaaactgcacaaaagtgaaagaagatacagctggaacataccacatgcaaatgctgataagaattgctgccctcttttccttctagggaaggaattgcaggtcctggtctaggatcagctactttagatgggcaaatttgggctaactcttgatgcacttgagcaagcacgggaggaggggaaggttgcttcataccgacaaactgaaacgggtcttcagttgcgtcgctaataaactgggaatttactgcctcagaatgacgctgccatcgaccatcatctaaggagagcacagagttcagtgttgagacttcttgagaatcaccattaagtgatgctgaggaactgctaggtccagcttcaattaaactgcagaaatacatggagtcagtttgaaatagccatgacttctttaaggaaaagcttagaaggtaacagaagatgagtacttaccctgaattgtccgcagaaccccaatctgtattactcggatattgaacctatcattccatacaaaataaagatttttctcagttccttcagatctaagataattaaacattgaattggaccaagagtaaaagaaagagtgagaaaatgtgagaaaggtaacaatgatcagcactatacctttatctctgacttgggtgcaaccatttgccttttaagaccattcggacctagaaatgaatgtcttgacaaggttgcttggtttggaggcaggaaatcaaaagatctgcaggttcaggagcacaattaaagtctcaatgatcatcccagattaatatggagtagcacttgagtctcatagactcatttcttgtttcaatatcccaaaaccaaagaagaattccacaaaacgcaaccaataaacatgataccataaatagaaaatccaagcagcattggcagtttagtccatcagaatggtagtttttctggtaataactaataagtgacccaaacatcgtatatatatggtgatcacagaaacaggtagatgtaaagcaagaaaaccagtgacacatatcggatggcatacccctatttctcagggttcctaaagctcagagagcttatagtgtttgaattcctattaagcagaattaccgacaattatattaagggagaatactcacagcttctggaactgctgatcaatctgtgtacgatttgatgatgaagtcagattattgttatacgtccaggatggttgagatgtcggtaagggctgcatccagagaagacaaaaaaaatggaaaaggcattgctggtaagaaatcacatggattttgaagatgcaatgattatatagaaatcctagattatgtactcaatgcaaactccaagtcttaccttgttaatatcaggtctggagtatgaagctttgtgagcaggaggccactcaacagcatctgaactatatgatacgaccgggagatcacttccatcctgacgggattcatcctcaactctgttcagcttatccactagctggttgaattccggtttcagagactcgagctcattgattacagcacgcaacctctgtagcacaaaaaaaagaccaaatctgaggacactactaagtctagtaacactaaacaacattcgaaggttaaaacagaaatacctgaccttcctactcccaagtctttcttgtggaagcgatgcctggtaatctcgatggaaaggaattgtttcagaaatcaaactgcagaaaaaaaaaaaacttgtagctctttcatggaacatacaaaaattcaaaactacatatagagatacttttatccttaccttgaatatctaagaagcatgatatacaaatccaccacattcttctcttcgcgatatatactggcctgagcaatgttcaaacatgttaccatttgattttgtaactttctcagaaatcaatcactgttttaattgataacctaaacctaacaaaatcaataccaagtttacattctccagtttctaaacttgtcaaatcctaaagatgctttaacatgaattaagaatctacatctagagttaaattgaatcgaaactccgttgcgatatcgggaacagacctgtcggaggagattatcggcgatgcggtagtaattacggagaggaatacgattatccacttcgatttcacgagccaccttgttcagatcaatcttcatctcaccgtatctgattatacaatttagtgcttcacgaattcaatcactttgccggcgaaagttttgctgagatcgaaggatcaatggcgctgagaaaacgtaagagacggagaagaattaaaactgcgtcgtttattaagaaaccaattggcaatttcgacatgattaccaaaccaagttaaaaaaaaatcagtcgaaacatattgggcaatgtcgacattttcttataactttaggggtatatttgaaattttcaatgtggaatgatatcttatggaactattaagtggtttcaaccagctgatgatcgaattgtgtggagttgcaatattatatcaagtggaataaagatggatgaaacatgccaaagatgtttttcagtcaattatgattgttgctacttagtacttataacaaaaatttgtgatcattatggactccaaagtattggtgtttctagggtaaaatttagtaccactagaagctgaagcaatccttgttaaatgtaactcaaaacatatggaacatagggtggataagattttgagggtgattgtcaagtcttaaccaagacacttaagaaatattggaggaggaaatttcagtaactaaaaattgtgcaaagaaatcagatattaggcatctaaatcttgatttactcgcttcacctatattaatcgaacttgtaatgaagttgcacatatttagctagaaaatgacaatatttctataattctattcaagctgtatttaccctccaccacggtgaaagtgaaacaatctgtttttattatttcagctactaactaagcatagactcagccacaaaacgtaaaaataagaacgcataatcactagtgattattgaacatatgaaactaatgtacatgctacacatcaattgtttagcctctcatctaattataaactatttcatgatcgttgactccaatttgcctatgttaagtagttttaccagatttttaatcttctttttctcgttgaaggaaaaactaaacaccacaaggtttatgaatggagaagaagaaaaagaaagaacacaccaacaattgtctgcgcaacttattgaaacgacaagcattttaggaaccaatagtgaaaataaccgaacaactgtcaataactgcatacaagttttttaatggaaacatgaaacacgtgagtaggctaccaaaccaatcacgttccatttccacgtcaaacccttttcattgtaccctaaaagctcgactctgtctgcaaaaagtataacaattttttttataaatacatgtttaaaatactaaattgcatgtacatatactatgaaaatacaaaatagaaagaaaacaaagaaaagaataagaacaaaatagtaataattataataaaaacctattttcttaccagattctcatttcccgtcgcacatgtgggtctcctaggagaaagttgcttgcgaggcgttctctgaaattagcaccaaatgaaccaaaacttaggtgaaataattaagagtactaattatatgtaattactggtctaagtagatttaaaacattacctgcaatttgggtcttagtttttctattgccgctattgttctctgatctatacttgcttcttgctgtagaatatcaaaatatataataaaaacaattacaataatgttttcatatgtaaaagatttaaagttagatatattgcacaaactgagctaccttgagtaaagcccaatctgctgaatcaaagaaagcacgtttggaatcctgcattgattttaaagtcgtgaatattaacaactacttatttgcaccagaagtagactaatgacaaaataattaaagataaattcaccttagagatgagaggctttttctttggcacaagtcctccgtatttatttgcaccagaagtagactaaggacaaaataatacaaaccaaaataaaccgacaaatacaaaaaccggaaagcaatttccataccggtatgcatactataggttaacaaaaagggtttaatttgacaaaccgattatccggattttgtaaagaggttcattgtaccaatcacaatcggacagaaaacaaaattaggaaaaaatgagaatgcatagaccaagacgaaatcggcaatttcatgtggaccggatcacatatcaaaggcgaagatccggattgggaacacatgtgtcatcaaacgtatcacgtggcagtacaataaaccgttgatttagtagttggttcagatgaagatgaatttatcgtttacgaccgtccgtttcattaaatatcttatgataagattttttatcataaaaaatattgtatacctatcagaaatatcttccacccgacaaattaaaaatataaaatcttcaacccaattaagattagaaatcataatattaatttgataattaataagtaatcaaatccatttatatttaattttgaccagaaatatgttaaaacaaaaacagtgtttgaatgatagaagtattatgaaaccaaacgtgtacgccgctgttaaattgccgacgattaggttggtaatttaccacaattattttgacttgttgactactaatccgaccttaacttaaaattatcaaattaatttctaaataaaaaattatgttcaattgtagtcaacatattttcttaaaattaaacaaaaaggaatttacccttaaatttttattttattgctacccagattcaataccatctttagaattttcaaaatcgaatattcaattttgctcctaaaccaaaaacgctaaatataccttaaataaataccaaaacattgcaccacggcttagaaaaaaaaattcatgaaattagagaaaatacaattaattgatttaattacctcttgctgctgagaaaacaagaaatcgttgactctattgcaatccgtcgccatttttgcacttgtcaattttcttcttcgttctaatcaaattaatttaacaaaagcaaaatcaattacgtaattactaacagcataaaatctgcattttgaaatttaatctaagttattaaagaagataattaggtttaaagagagagaccttagagaagaggttcagagacgagaaagatgaggaagacgaaataaaagacggtgagataaaaaaaaaggtatgcgtttagcaaaacttgtatatgtatttatatacatcatacggccacacgtgcgtagtagttaggcacattaggctaagggcaacatacacgtgtgtaagctttttagatattttcttaatttatttcattttcttggtggtaagttatgaagttaaatattatctcatgtagtttaataggacttttggctattgaatagacagatggacataaaaatgattttctctatcaaaaaatttgtatgcattatcctatattaagggctaataaataatatagttaaagatcaaaaattgggtttaatatgagatatctatattgttaagaaatttattgtagattatcatctaatggatccgtctctttaaagaaaatcttttgtaaataagaaaacatgtggaactttgaatattagtttgatatcttgtaaagactttcaaacactttaataagtatttactatcaccaaacatgatcataaattagaaataattaagaaatagagaaaataagatattacaatgaaagatcttcaacatactttgttttttttgcagtagctatttctgtggtggacgagataaaagtaaatattttgaaagcaaaaaaaaattttaaattcggctcaattcggcagaattgtagaaataaaaaaaaaaccaaaaagccgattaaaccgatttaaccgaactcaaaaacctacataaaaagcgtttagtttcattgttcacctattatagaacaaagacaagaaagagaggttaacaataccttacaacagaagaatttcaaacagtttgggcattccaacgcataaatattatacaatcttgtatgctcaacatattcatcacagacaaaagccatttgggaatcaacggcagcaactgagtagaattgaagtaagaaaaggaaaggaaatgaaagtaataggtcaatagtattggtttttttttctactctttgtaaaatagatcacccatcgaaaaaattaatctttttacataacactaaactatttatttaagtctgtttaaaattacttataatttaaatatttttttcaataaaaagataagacaaaaaaagttaaatgcattgaaaaaaggaagttgaacgcaaatagaatcaagtcaccttattattattggtaaatctaaaaacatctagctactaattttataagacatgttgtgttttggttatcacagtaaaagtgatagcaaatacatattttgttacctaaattcttctacacagttttaatttttttgtacaactattgttctaagtgtgataatctaactcattatctattttttgagaagatttgatattagtagaatagattatttgattatgttttattaactaatccaatttgctggtaaatccactatatattaatagagaaacacttaaaagaataacatctagctacctatttatagaaatgtcatgctaacgagtcaaccaaaacaattttcaatcaatataatttattctttatttactagattgtttactaaatcaatagaattattttgcaatatttatttgacacatttactttatttgattctatatctaatttttacttttacgggtcaatatttttcaccaaacaataattaaatgacaattcaaattaaataattcaattatcttaattacggacaatttagttttaaattcaattttaatctgacccatttatgattcacacttgtcttctagtagtataggtatttttataatgccactttgtataatgatttatgattttattgcttcaattattctcgacaaaaagatattatttattgattatatatagttttttaagaaacacatcaaatataatctacatatatatttttgcagctattttgtgaaataaatcttggagttgagacttatttacaatggctgccactggtttttaattattatttttttttgtaataaattgattaacaaacgaaaaatattccaaatatatttcaatcccatatatcacacagatttctctaaaatttgaactagatttcgacaactatttaaaacaaaaaatgtttgacaaaccaaaatacaattgcaattccttaaaatgagcaaaacgcacctaaatacattctttatcgatccaataaatcttatttctccaaaatttgaattagattttggcaactatttaaaaaaaatatttgtttgacaaaccagaatacaattgcatcccgtaaaatatttattttaattatatatttaaataagcggtgtaccgcgggtttttttatgggacaagtttggcaggacgttacttaataacaattgtaaactataaaataaaaatattttatagatagatataatttgcaaacttttatatatattaattaaaaaaaaatttgttcatggagtgtaccgcggattaaaatctagtattgtaacaatcttggacatcgtaaaagtctgaagaaattaatagttaatcaacgaaaacatataaaacaaaacatgaaatgaaatagaagtcggcaaccaactttaattggttaaacattagcttaactcgtaactttaaatttggaaactaatgtacactattaatctaaattcgaaatcttaaactcgaaaatatgtattcttagttattaatgaaatttttactagttgacaaaaaaaaaaaaatttaaaagattttttttatatatttgtgtcttattagaaaaacttggaccgtccggttaaggtgtctttttctggttttttttaattaattaattaattattttggcttctttcggaccagtcctactgtacatcgtatctttcagtatttgtcaactagtttaaaggggcaagttcacaaatgggacctgcatcttgtcctagccaataatatcgttccacgtcgtactctatattgtttgtcacacgcggaaaattaactgtgcacatttgcaggatgctattttttactattagtgaaattgcttcattcactttggcccgcttctttattttgttgtaacatttaccctacagagttctcgaattatcaatttggtacttaatgaatcattttttcaattatcgtacctattttcattgaaataatattaaagcataaattcagtaccgaagtataattaggtcaaccgatgtaattttacaaaactatatttgaaaatacaaataattataaagagaagttttaatcgaattccaaaataaatccattaattttaaaccaaaaatcttataaaggttataaaatacgtataaaaattagttttgtgaaaacatatatcaaatgttttagggggtcagggtgtaaactgtgaataaaaataaatgttatggtaaaaaaagaatattttgtttttatgcgagttaacgcataatgtaccagttccgttgaatcgtcaacacaagagtcacaaacaaatttatcttttaacaaatttctctcttaaaaaattatttataaaaactctgagctcgaaatcggatttttttttcgtctctctcatcattttgctgatttctcaatttctgtgtttacactactccatcgacttgtaatttcactttcttagggttcttcttcatcggatcatcggccgtatctgaaaccggagatggccggcgttgattccggcaagcttatcggctctgagattcatggattccatactttacaaggtttgtcgttcttctaagctgatcgttcgtcttgattcataaattcgattgtctctgggttttagttttttctttccttttctcgattgctctttgattctcgtagccgttgaactagaatttgtagatagttatggaattggagagtctttgtgattttaatgtggtgatttggaataagaatccagggacatttaggttggccaatcgaatatagaaaatactttgatgttgaatctgctaaattcgttttttttgtaaagaatcgttgaagagcatgtctcagtatactcagagttcattcttaattcatatgatattgaaaagatattagatgaatccatagatacaggaacttgtaattaaatgtttcctggagtttttttgttgttgttgattagtgacattgttgattgtttggtgcagatctagatatacaaacaatgttagatgaagcatacagtaggtggctccgtcctaatgagatccatgctcttctctgtaaccataaattcttcaccatcaacgtcaagccctgtgaacttacccaaaagtaatcagtttttctatcgctcttttagttcttctggacttgactactacttgttgggaacttcttaaatacagattctattttgacttggatgaatcttttatccagactcttgttctgtcaaatgttgaatatgtttgtatttggtaggtggtacgattgtgttgtttgatcgtaagatgttgaggaactttagaaaggatggtcataactggaaaaagaaaaaggatggaaagacaattaaggaagctcatgaacatctaaaagtgagttttcttaatgtctctgagttcatatgcgcttttctctcttctcctctgcagctaatatatttgttatttgtgatctctgtgtattgttcttccatcaggttggtaatgaggaaaggattcatgtttattatgcccacggtgaggatacccctacatttgtgcgaaggtgttactggttattggataagtatgtgtcaacaaacgattattggtttatcctttgaggaaatagtttattagatgccttctttcctttgctttgtttctgaaggttatgaaaataaatcacctcttcttataatggcaggtctcaggagcacatagttcttgtccactatcgcgagacacatgaggtttgttatctacctgtccccagaatataatatgtatgttagaggtggttatggattaggatgatgtattttcgttgtcgcatagagtccagccttcttctggcagattttagttacgagataatatcattttgttgccctctgagaaattttggttaaacaggttcatgcagctccagcaacacctgggaactcgtactcaagttcgatcactgaccacttatctcctaaaattgtagctgaagataccagttctggtgtccataatacttgtaatacaggtgaggaggtgtctcttgatgatcttgagctgttacgatttaaagttttggtgtatattggcaattcttcctgactgttcacatatattcagtttttaattaattaattacacttttttaaggttttgaagtgcggagcaacagtctgggttctagaaatcatgagattaggcttcatgagatcaacacacttgattgggatgagcttctagtacctgcagatattagcaaccaatctcatccaaccgaaggtacttatattactttgagctttcctttaaaaagaagatctggttgaaaactcttcactttttcttatcttttgttctctgcttacagaagatatgctatacttcacagaacagctccaaactgcacccaggggatctgtaaagcaagtgagtgaaattgatttctttcaacctggaagtggctttacccatctttctgttcaccattttttcatcttgttcatcgtgcagggaaatcaccttgcaggctacaacggatcagtagatataccatcattcccgggtcttgaagatcctgtatatcaaaataataactcatgtggtgcaggagaattttctagtcagcattcgcactgtggagtagatccaaatctacagagaagggatttcagtgcaacagttactgatcaaccaggtgatgctttgcttaataacggttatggaagtcaggatagttttggaaggtgggtgaacaacttcattagtgactctcctggttccgtcgatgatccttcccttgaagctgtatatacacctgggcaggattcatctactcctcctactgtatttcattcccactctgacataccggagcaagtattcaacataactgatgtttcacctgcctggggcgtattcgacagagaaaacaaaggtttctccaattataccctttttttcatgttaacgttggttgatcctataactgaacaaaaccttgctttcctggacttgttgtttctgtcatgatgctgaaggggaagaaaagaattgcagtctttagactttagtttaaaagaagagagtattagatttatcgagacagtaactcaaagtctgctcattaataagaaaatatcaaatgactgtgtctcactttactggggggtatgtctgttgaggtcttatgcatctcttatggctaagtgtgagtactgagtagtatgtttgcagtatgaaattgttgatagggtgattcacaatatgagaatagagatgtaactttgatagttaaagcataatattgcgagagtcgtctctatttcatattgcgtctttagactacattacaagatctaataagttgctgtataaagctgacctttgcacgttaattttcagattcttgtaactgggttctttcacgacagcttccaacatttgggaagatcaaacctcatctgcatatgtggagagttgcgtgtccccgccgaatttctccagatgggggtttatcgttgcttccttcctcctcaatctcctggggtggtgaacctttatcttagtgtcgatggaaacaaaccgatcagccaattgttcagcttcgaacaccgctcagttcagtttatcgaaaaagccatccctcaagacgaccagctatacaagtgggaagaatttgagttccaagtcagacttgctcatcttctgttcacttcttcgaacaaaatcagcgttttaactagtaaaatatcacctgaaaaccttcttgaggctaagaaactcgccagcaggacttcgcatctcttaaatagttgggcttatttaatgaagtcaattcaggcaaatgaggtaccgtttgatcaagcgagggaccatctctttgagcttactctgaaaaataggctgaaagagtggcttttggagaaggtcatcgaaaaccgcaacactaaggaatatgactctaaagggcttggagtgatccacctctgtgccgtcctaggatacacttggtcaatccttctcttctcctgggcaaatatatcgttggatttccgtgataagcagggttggactgctcttcattgggcagcatactatggaaggtaaactaacttgcatatttcaagtactatgagatttgctaatcttgtatccgttttatttaatttacttttttaccaagttttatttttttttaaagggagaaaatggtggctgctcttctatctgcggggcaaggccaaacctggtgacagaccctactaaggaattcctcggcggctgcacggcagctgatctggcacaacagaaaggttatgacggtttagcagcttttcttgctgagaaatgtcttgtagcacagttcaaggacatgcaaacggctggaaacattagtggcaaccttgaaaccatcaaggcagagaagtcgtcaaatccagggaatgcaaatgaagaggagcaaagcctgaaggacactctagcggcatacagaactgctgcagaggcagcggcgcggattcagggagcgttcagggagcacgagctgaaagttaggtcaagcgcagttaggtttgctagcaaggaagaagaagccaaaaacataatagccgcgatgaagattcagcacgcgtttcgcaatttcgaggttcgtaggaagattgcagccgctgctcggattcagtataggttccaaacatggaaaatgaggcgggaatttctgaacatgcgaaagaaggcaattaggatccaggtacaagcgaaagctaatctttctaccgtctttaagaaaagaaacgagaaactatctgcaaccgtataaaactgttctatggttttgaatatgacaatgttttgcaggctgcgtttagaggtttccaagtaagaagacagtaccagaaaataacatggtcagtgggagttcttgagaaggcaattctgagatggagactgaagagaaaaggattcagaggccttcaggtaagtcaacctgacgagaaggaagggagtgaggcggtggaggatttctacaagacaagccagaaacaagcggaggaacggcttgagaggtcagtggttaaagtccaggccatgttccggtccaagaaggctcagcaagattacagaaggatgaaactggctcatgaagaagctcaggtaaaaatcttttgctgctttctgttttctttactcatttcaagtatattcgtaatagattaaacacaatttcacttgcaaaattatgataattggttatggtaaattataaaatgtaacacagctggagtatgatgggatgcaagaacttgatcaaatggctacggaggagagctgaatggaataatagaggaggagtgggtgtgttgtgttgtggaggaactgtaaatttgtgcaaatgacgaggggcaatttcgaccttttaagaagcggttttcagaaaagtttcaaagggtgttgtggtaaattgatcctggagctgggaaatttccatagagcgtcttgtcgttagtttttctttttgtttggtggatagtcttgtattgcgttatgtgacttgtgagatttgacgctaaaaagctaaaacgttttttagtttgtctaaaagttctcctgcttactgtctttcttctgttatatattttggatttctgacttataataaatatactttaattttgtgtctgtcacaatctgtttttttttttaatctaataaagatacagtttgtcaaaaccatgaaacaaatatacgtgatgaaactagagacgcaatcttcgtcctttgatgaatattggtgaagtacaaatgtcttttccacaaaacttttgttacaggctgctcttaaattcttcatgtttacacagtaactttcacactttgtgctgttactgaagctggactatcgacctgaaattgatatagacaggagttgcttgccttttaatcgagattcgatgtctattgattagagaatgcaaatgtagattcttgtattttaccttggctgctttaaacagttcgtctacaacttcagacagtgttggatgtgcatgaacagcaagttttatgtcctgcatttatcatcacacaaagacacacaaaaaaagctcacaatctaaagtcctatgatcaataccggagagaggttagtttgcagccagacctgaatacgtgttcctaaagcaatcgcgtttgatgcttcatggataagatcagcagcatgcaatccaaatatatgaactccaaggatttcaccattgtcaggtctgtatatcatctgttcacatgaagagagtgttcagatatcttatcttcgcaagtcactccagaactatatacaactatctttttttatttcaatttttggttcttctcttcaccttagcgagtccttctccttcattttcggctagggcctttgtgtttgccttgaaacttgtcttggcgatacttactttgaatccctctttctcagctttctctctcgcttgaggctgggaattgcattaaagattaccgaaatcataaattaggattgcaattttttaaaaaccaatccactaagagtgtctagaggttacctctgtcaatcccaccatacttatttcaggatgagtaaaacaagcagctgggatgctaagatgattaagcacatgatctctacctgtgacttgctccaccactagccaacacaagtagatgcatagagtttaataaaggtcaatctaacgtattcagtgtagaaaaggaaaaacaaaagaaagatgcatttggagtgaaatattgataaaaccatttaccagaaattccttgagcactagctgcatgagcaagcatcagtttaccattggcatcaccgatgcagtacaagtggggaacctatcaaccaagagtgactcagtagcttaaaaatatataacttttggtaagaaataagctatatgaaagaaaactccactaaccagctttccatttccatcaataacacgcattcgctcatcaactggtataaaacctctttgtgtggtaacattgatctgtgaggaaatcacagcttttattatttctttagtaaccaaataaggtcctcagggaacgaaaatgaaaacatattcataaggaatggggtttattgttaattcatacattttccaggccaagaccattggtgaatggagctcttccagtagcaattagagcagcgtcaaccttgaacaaggaacttatggtcaaactttcagtgcaggcaaaaaacacatgaaagtctcaaatgtgattgtaactccaagacattctattattattattattattttaatttttaggaaaagatctgattttataatacgaaaagccctggctaacctacaaaagtatgcatgtcattgatttatatactttgcatgtgaaaagaacatgtgtgagagtaactagacaactattttctcttgtaaattttcagatatctgcagaacattttgttacctccaaagtatccttgggttccttggttttggcatcaattagttcaatcagcactggtttcccatcctttgctggagtgatctgtaaagaagcgttaacaaaaaaaattcgtaaacccactgtgtaaggaagatatctaatttaaaatgcatgagacaaaaaggcttactttgcttgcaaatactccagtatggtagtcaatttttcttgtatttattagaaccctttgagccagcttactgatctcaggatcaaatccaggcattagttgatccagtgcctcaataaaagttacctgtaaaaaaaaaaaagagttcccctgagcttggtcacttcctggagttgcagagcatcacaaaccttaagcaaaatatagctatcgcccatttgctcgatcaggttaccaatacaacaacatcctaagagccttttgttactattgagagaaaacagaaaactaaagagaacgcaaaaaacaacacactatcacaccagtgcaaatcattagcacaaaatcaaaatgttacctcacttccaagggccgtgtaaacatcactgaactcaagaccgatataaccacttcctactatcgcaatccagtcaggaacggactccaatttcaatgcatgatcacttgtgataacagtctttcctgcagcacaaaatatgaggaatattagggtacttgctatactaaaagaaatgagaagctttggtttttgaggcaactcccctttcacatatcatttatacaaaaacacataccatcaacttcaattcctttcgggacgaacggtacagatccagttgcgatgattatatcttttccggtgataatattgtcaccatatttaaccttttgtgggccctgcaaagtgcacaaaagactaaagagtattaggatcaccacataacaacgacctatcatttggagtttatatagtcaaccaaagacaataacatactgaccagaacagcgccaaaccctgtcaatatgtcaacaccaagtgccttcatagaattggtgagattattcctaattttggtagccaggttacttgcgtggtcagccacaccttggcggtcataaccagcagctgaaacctgttttccaagggagtcaatggaaggaaacaagagtcaaggccaggaagatgatacttgcttcacaatgatttgagatcaaaattgagcgtctacaattgcattctacaggaatttttactacctgcaaaccaaaagccttcatgtgatgttcgttctggagttccctcatcctaccactaacagcaagtagagctttggaaggcacacagcctctgttaacgcaagtacctccaacaacatctccttcaatgatagcagttttgagtccctatacaacgttatcaaaacaacaatcactcgatgagatcatgaataccgtaaagaaatacagtaatagctagtacgattccaaaattggcatattgaagaagatgttgcaaagcattcctgaaccatctctatcaaacaaagcatatgattccactatcaatttgatccagagtattggcaaagcatagaatcataatcgaacttgaattcttcctaattaataagaggaagaaagaggaccttctcgacggcgtgcaatgcagctccatggccaccaactccagctccgataatgatcaaatcataatcgaatgatttcgatggagctccatttccagcggaagaagaagcagcggcggagacttcgattctcctactctgaatatggaaacggcacgaggtcaattgcttcgacggagagaagcaaaacgcttctcgccggagtccacagaaccggagatttctcggcgtagaaggagctgcgttggatgaacaaagcgtacgattcgctaaaggaagcgatgcttgtgagaaggaaagagaaagaaccgattgcattgtgtacgagagagtgaatgagagatctgtgtagagaaaaagggagtgacggagatgacaagtctgtactagtctcactcgacgagcggaggcggagatatcaaagcggagatgacacgtgtcacgtttctcgtctttaaaccggagatttcaaaattcccggctataatatccaactctgagcccattgggccttttatttctcggtctgcctgacgttatcttgtgagagccacgtggggaaggagaacggcgaacagttcaaacggcagactccgacacgtgtggaaaagcagaacacgtgtcaaaagaacgctgttctgtttcacaatcttctccttacttgttgttgaagagagaagtattaacagagaaagagagaagcaacaagtgaagaaagaaagaaaaaaatggagaagagtggaggaagaattgtaatggatgagataagaagctttgagaaggcacacttgttcgatcttggtcatcctcttcttaaccgtatcgcagattccttcgttaaagccgccggagtaagttttcatccatatctcttcgtttccctgtcgtatatgcatgtaacatatatgtagtaacatagcttaatatggattaactatgaaggtgggagctttacaagccgtgtcaagggaagcttactttaccgtggttgacggtaagaaactccggcgggtttcttcttacttatgatttatatgtataagaaatgagtatgtaatgtaagagtgaaaatgaataaatagagaacgtactttagtttgattatacattttaggggcaggttttgactcgaacaacgtgggtccaccgtcggagattacagggaacaagaaacataggttccctaatctcagaggtccgtaacataattgtatcatatttggttgatgatcttatgtaatcagcattatgtttatcttaatgatgttttatcgttgttttcttaatcaggggaaagcagcaaatctcttgatgcattggtgagtttattacaatcgctaattattagccttttattattcgtcaaatattcgtgtgctagtgtgctagtgtgttcatatctaagtgttgcaaaataatacataaagaatggtcgtaactcataaggtttcttgttagttaactgaaaatgtttaaatttgttggcctataggtgaagaacacaggaaaagaatctctccaatggggtgagtttatatatgaatttgattaagttaacgcttcacgattaacgttggaaagagatttaatgatttgggaatggtagggctagcggcagggttatactcaggtatcacttacggtatgacagaggttcgtggaggagctcatgattgggttagtctaattaatttgacttgtgtcattttgttttcatcaacgaacaaatgatgaacatgatctttaattagtatgtaatttgatatgtgtcacagcggaacagcgcggtagctggagcattgacaggagcggcaatggctatgacgacgtctgagaggacaagccatgagcaagtggttcagtctgctctcactggagcagctatttccaccgctgctaatctcctttctagcgttttctagatgatttgtattagaagctttaatgcataagggttgtttcatgtatcagttatgtttctttttgtgaaaacgaattcgctaaaggtctactaagatcttttcctgaaactctcgaagctggagagagatcgttttgttatctgtttggaaaatatttgcactatatatatcttgagtagtacctattacgtaaccttatctatttggataaaaatgcgggtcttgtgggctcgctgcacagacaataacccgtgaggcagcgtaacaacaaaaacgacattcgtgttggaaatcaaaatggtgacgctcatgtgaaggtgaataatatttgtcattgaatagagaaacgactttcaatgtaccaacaaaaaagttataatggtgaaattgaagtttgtcacagctaaattcaaatttagactttaacaaaaaaagtacattcaaagttgagactttaacaacaaataatgaggaaatacgacttacgaacctgcaaacatatccttacaagagataaatggtaccaaaaacaatgagatttctagttaaaaaaccatatgaatattaaaatactgcatgtcttcttacatgtgttgttccacacattttttggtggttagatcttctgagaatttgttgtacgtaagatcaggaaaatcaaaaaagtttaagaaacatgtttatttggcagatgtttggaactcaaaggaggaaactcacattatatctctatctttctcttttgacatccagcttggaattgatccgtttagcatatttccactgagatacctgcaagaacaaattatttccagtaagatagtttcatgaacaattacttcaacaacacaacatctctaacaaaccaaagatagataatatgatgatagtcttacatattttccacatctctaagctcctcatacgagctaggtattgctcctgttagtttgtttcactcttgcatcctttggggttcctttggtttgtatcatttcctctatcagaaaataagttagtatataacttacaagagtgttaagttggtggtatttgttccaaggtatgatgggagctctcctttcagatttatatttctcaaaaccctgcaaaaagacaaacatcaatgaacattaaatctcagcaccagtaaagttgttttgtaattcagtcaaatttaaagactcacaattgcctcatctgtgtcatgctctgtagtggtggaaagaaaaattcaggtccagtcatatcgcttatcattctgaaaattatattgagcctaagtcaataaacactctagataaatatatatgataaaacactactacatagactacttacaaatctttcagctttgtgagatgagcgattgacaaaggtataggtccagataacccacttgcatagagaaccctgaggcagacatacatcagacccatcattagcaagcagttaaaagacttaaaacatacaccaaagagtaatctgtaaaaaaaggatcttatatacagactctcaagttctgtccacttgtcaatgacctctaaactgattgtcacttatacggctgtttacaaagccaaataaaacattagaatctcaaagtatgcaaatatttatataacttgtttaaacaacaaggatactaacaaaatcctcatgttggtcagttttgagaatgacacggaatttgtttgagctcagaaagctgacaaaaaagcaatcaagggtttttagtgtgaacagaacaaaacaagcagcaatccgaaacacacaaatgcggaactcattgcttacagtcgtttaaggttcgagagtctcccaagctctgggggcagtgttccagaaagctggttattttccaagacactacaaataggttcaaagactgaattatttactagcaaagggtatcatgatcaaaacttgaaacaatgtaaggaatgaactaactaccaaaccaaaatgaataacagaaagttttaaatgaattgtgacaccttttcttgtattcagatagttacttaaacacattcctaactttcatatgcaaaaggagtttggctgaagggagaaagacttttgcatgatatgtatcagccaaatctagatgcatagcccaaagtagagagtattttgtttcaagaatacataagaggcagggcaatcagttattaacaaaaatcaagagtagattaattaatgtccttactatgtaattaaaagaatcaggtcatagtaaagtcttagaaatagcaatgtcaatgaagagcataaatactgcaggacactcaatatttgaccacaaatgaacactcatattttcataatgaactctgaatttatgtagacacaagaacaatagcttcagattaactaaaccaactttaactcaaccaaacaacatcgaaaagtttgtactcacagtctttcgagcgtgataatgtttccaatctccttggggataggaccagttaaccggtttccaagaagcgtgctgcatttcgccaacaacatccaagataatgtatataaatgagtacacacataatcagagacatcatatacattttcatatatataagtacacgttaatatgtccttacatgtttacaagtggcaggagtccccattctgaaggaatagaaccactcaagtggcgagatttctgtaaaagactcaacgaaaatagtcaattcaagacctaagatgcacaatctggcagtggatcaagaataactatacgacaatacgtttttacttacatctcttgcagaaatggaagccctacaagctctttgggaagagacccttggagatatgtcaaaagatacccttggagatatgttcaataaatttattaacatgtatgtgacgtctcaaatactgcagacaaacgatacacatgtagatgccaaaaacaataataaaaacacatcgaaaacgtatacaaatgggcacaaacaattgagacccacatattttactgggccgaacaccaagtcaaagaaatacgacccaaaatgtgcagaatcgttgactcttgtttatttattattttctgtaaactatagccgcaaattaaacatgaaatgtcaaagagaaatagaaatattacatgctcgtgatatggcatatgtttccggtgcaattgcaggtgataatgtcttcggatcctgcaggagcggttagatttctccatccccctccagtatttgagacgtcacatggattaacattgtaattccatttagtgttccatcaatttctccccaataattcttaaaacctccactgcaaaaattagaaaataaagcataaatcaaaatgacctaaaactaaaacaaaactttgatttccattgatagatataccaagccaaactatcagcaagtaacaacaaacaagccgaagagaaaatgtgaaattagacctaacatatttataagcaaccataaccgtaaacaataaataaataaaacatacattcttcgtcgggcaagtttggtggttccattgcaaaaccataaaaaaggaacaaaatcaacaacgaaagtattattgactccatcgccaaagactgcaagaagaagaaaaaaaattatctgcttacggaacaagagagaaaaaaagactgggagagagagagatagagagtgtatgcgaaagattatcttctcacagagagagaattcaatattcttggttataatttaatgttttcacttaagctctatctgctgctcaagattagctgacttcgaggatgttacgtgaatttactaggatgctttattatttacttcttaaaatctgaaaagaaaaacattttcatatccccttttcatccatgttagggatcagattgctctgtttaatatattaaatttcagatttttatgtattgatttttatacatttagctttgttacttttcatcattgtaacatattttcaatagaatgtaagttttttccatttgcaagaccacatccaaaaaaagtttccacttttgaaagctatgttagtaagtcattatgttctaatatgattaattttaaacattaagttgttaataactttaaaatcatcctactgattttgtggtttatatttggattataagataaagacaattaactagacaagtgcttaaagtgtgcataacaaaagcacaaaaatgtccgcaaaatcgcgcacatatttgatatagtcaaaaatcataaactaaatatgataaatgtatcaattaacatgttcccagtaagataacaatgagaacaaaatcttttaacaaaacatcattaaaaaaatagaagacgttgtgttaacaaacatagataagatacttaaacacaacatcatcattaaactatatgtatgatactctaacacaatatcatcacaaactaactataagatataagagagatgtcttaaatactctcaacatctttaagctcttcatatgtgtgagagattgctccacttaatttcttacacaattaggtttgttacttttcatcattttaaaatcttttcaattgaaagtaagtttttgtatacatttgatcaaatattttcaaactgattataaacctaaatttgataatttgtaaattaatcaaatacttttgtcatcttaaaaatatagaaattggttcaaattatttaggttttagggaaactttatagttgggatttggaaactttgattggagaaaaagtacccatttatatctcggaacaaggccttatgacgtgtgaataaacgagcatggttactacaaaatctgtagaggacctcataatatgtgtggtatggatacaatggtatctactattgttgttgttcatacctcacctaagtagaattattaggatactacatgtctgtccttgtgtatatgtatatatagttgcataaagatactacaaacttttatcgttagtattgtgtgtctatgtttcagcttttaatgtaaaatagccgagctcctttcttacttttactccatgtccttattacttcgctattaattttgttgctctcattattattactaacttaaaatctcataatattttaattatgctaatttataatctaaggtaagagtttataaactattaatattatgggtggaataacatattaatatttcatcattttcatttaatttattagtcagttagtcttaaatcccaccacaaacttttataaattggtcaaatatttgtaacataaaatattatggaaaataaattactttcagaagaaattttatcatattatatataatgcaatatcatttgagttattattcataagcaacacaccataattttatcatattatatatatatatatatatatatatatattgcaatctcatttgtgttatcaattacaagcgaaaacacgacaatgtttccgcaattgacactaattttccttctctctctcactgtaatctacccctttcatgtctcggccaagacatggtgtgtagcaaacccatcagccgcaagtacacaattacaagctaatattgattggctatgtagtcaaggaaatcctggttgtgtattaatcggtcctggtggatcttgctttgaaccaaataatgttattaaccatgcatcatttgtgatgaatgattactaccagttgcagggaagcactgaagaggcgtgtaattttagtggttctggtcgaatcattgatactaatccaagttatgctcgttgtgtgtattcgtagagaatacatggtttgatgatttattttgggattgtaaaattttcatatgaataataatgttatgtgggatcaattgtatttttaaatgttatgtaaggtcaataaaataactaaaaaatatctttcattcagtttagtcatacagtattaagtattttttttacaccgatgataaaccaaaatttgataatgtgttaattaatcaaataattttgtcatcttaacaacatagaaattggttcaaattctttaggttttagggcaactttatagttgggatttggaaacttgattggaaaaaagtacccatttatatctcggaacaaggccttatgacgtgtgaataaagagatggaattcgacctaatggaaaaaggaaggatcaagtcgaatattcgctcgggattacgcaatatttaggaagagaggaaaaagaagatcttggatcgagaatatggaagaaaacgtaggagaaaaggagaataaagaggaaagagcggccaaggagaaatggatccacaattcgacgactctcaagaaccctaggcatagaacttgcaaggaaaaactctagcttgctactaacgcaagaaagatctctttgtacgtgtatgctcttgttcttgaaatcaataaagaaaaacatttcggcgatctcatttctttgtatttagttcttcggttatctagtgctaaattcgacccgcacaatcacttatatatgttgaatcagtgtgaattaggtaagtcaataaaataagcaaaattatcagacgaaaaaattagttcataaaagtaactcttcaacaagaaattgttacacttacaaaaatctattagaccgtaaataccaaggtgtaggctagcgagaaggaggagaagagaagaaaatgacaaggaaataaacgagaaaaccagccacaagtattcctccgtacaccaacgtttggtaagactttactccaactgtgtatttgtactctatcttacagcatctcatgttctccctttctgtttccagtacatgttctacgtacctgcacccattttttcattttgtaatgttacaatttgtttattgtatagaagaagaggaacgaaaacaaaatgttttaaaacttactgttgtgtaaacatggtggtttgaagaatctctgagctgttgaggtgagcatcgtatagcttgtggtcgtatagcaaagaagatagatccaccagttgttcttctacagtctgttcttataataattaagtaataacagacaaaaacagattgtgtaagaaaaaaatccatatggtagataactgaaatcgtagagagtttgtttatcacttacgtctagatatttctctaatctttcgactagctcgtgtgggaaaggctcaggcaatgttgttgtctttttgtagaacttctcgacccatagctccgttttggttttgttctttttatctttcactggctcgccaagtggagtcttaaggtattcggatgcaaagttttgtactgcctgcacataaatagcaacaaccagaattgattaatacgctgcggaggaaactaaaaattttactagttgcagctggcttacctctgatgtttcacggattttgcgtagagcagaatcaacccgagcataaatagtattcctctgcaaatataaaatatcatatctcacaagattcagaaggattttaatgctagtttctattcagaaatcattatgattggactcaccagtgcaacatcttgaagcatttgactgatcagggagacgtttgagaatggtccaaacgggtgacaaccggctgcccaaagccaattggtgataggtctttcatgcgcgtgtgaggtcttttcatatggtgcacttacaccgcctaaagcagaagctatacctgcaagtacatgtcgctgtacctgtgatgggacagcatgctgtctctctgtttcagaaacataactgcaaatacaagagattaaaatcgatatgatgacaggatagcaggtttctcattgttttttacttctattgttgttgtgttttgctcacctcaaaggtattttctcatttagatgctgaagcacaatgacaacatcactgctcgcccacacgaggctctcatcttccatcatgagcattggatctacatcggctagtgagagtataaacctatatattatcaaagatttgtatcagttgctgtttaggttcaaagtgtaattcacacttacatctttggatacaacttggccagtgtaatgaataatccgatcagctggtttatattaatcaactcacactggaataactcttgttccataagtgcggtagagatcgccttttttcttaacggccttctttttctttcccttctgaagtttggagctataagatgaccagagaggtctgtgctttactatggaatcacttgaaccttcagattcatcatcccagctctgagtacaaaaattatggaatattagccatgaaagaaaaaaaacttgtgaaacaaatttgcataaaactttctgagatttacctggcggagaaaatatttattagaaagcccagggtcagacacgtcgagcaaaccagcagctagaacatcagtcgacctttccatctcctgcaatggccaataaaaagtcacacgagacttcactggttggaacagtaacagcaagtaaagaactatttttcctagctttaacctaattcgtaaaccacagttgccagcaattgaaactcacttctttgaggatagcaccatctaggtatgttttggtatgcacatgaaatcttccgtccttcttcgtttcctgaagggaatgcccacgcatagcttttgagacggctatagctaacttctcatgacgatgtaatggatgagcccctccaacgatcactacttcttggccatgatgaatcattttctttacctgcaaagaccccgggcagttagtatgtgtaaaccaatagagtcaaatccttgagtgtactttggaaaatattatgggtgctaactttctgatagcagtaaacttggaaaacatgtcttttttactaatcatattaactcataaggatgaaaacaccattcagaaaacaaaacaaaagataacaagttctagtatttcttgaacatcaatcatctaacgcaagaagtttttacctcagattctatctcttcaatatttatgctgtagttttgtcctctttccatgatattatatcgattgtggttttggagcacaatgataggtaccagcaccctagttgctagatcaaccgtctcaaacctagaagttagcacaatgcactcagaattaatcatttaagcataattttcattgctagaaggacgtaaagtctcacatatcatattacctgacatcaggagctatgacatgctcaattgtagtagctaccaacgctgctaactgaccagaaaagatatcatgggtagactgatgaccaacagggctaacatttcctggaagcacaatgtttcgtatccttggcactgttctgggactaacactgccctcttcagtttcaatcttcccatatgtacaaggccccgcagacaaatctatgacaacatatctatcaagaaggggagataaatcagaaatacaatcatgttgagagcttagaggaaaagttataccagataagaacagaaatagttacgccaacaatatcttgaatattagttttcgaacaaaagagctgattactacaataagatatgattaccaaagtgaaatgaagtaataaaaagtgtctatctccttcttttttcttttttttatggactatatataatcaacaaaagggacaatgatatctcacttccactttaatggcatatattaatgatacctagatagatgtaatactttcataataaggtggttaaatttttttgtttgatcacatctatggcacaatcatatcactcataggggataacaaagagataccaagggaaaaccctttgagtaatttgtccatagtttcccgcagcaagaatagaaaaacaaagatgagtttacctgcctgatgcaagccaaacttgggatgctcctccaccattgtatctatatcgataaatataatctgcctcttgtttctccttgtctgcatcactaagctctggtagctttgcaaacatcaagctgtctagatcaatctctgtatttttaggatccattcttacctgaataatgagtaaagaaaagaagggggcaattaaagaatccagcaggatagaatcaattactgaacaaatgcaaatatgacaagaaaaaaatcaacttcaagaacagagaaatatgacggttataaagccaagaaggcataaaaaatctttcaatcaaaacaaagcaaaaaaaatacaagaacagataaagcatttggacaatctgcataccatatgcaagattcaagaagtaagaagagcactggaagccataccttatcaaaattcactacaaatatggcacttggtataggtttatctgccgttgcggctgatccagaacccacatcaatatcaaatatatacgagtaaagctggttaaatgcggactccacttttattgcctctacgtcataggcaggtaagtgtcttccaaaatcagcctaaatccaaaaatatttttgaagattagtatcataaacattaagatgtagtttttacagctatgaaatccacattttcatcgacatatttttatatgtaattaggttcgttatgagaaacagttaaatttgagatgataaaattacagcaacctctagtgcagttccagcaggcaccatggcttctttcactgccttctccagagctattaattcaggttgcccactctagagaaagaaaaacaaagatgaacatttaggtcaatgggggaaacaatgaaattattggcatcagaagtcagtaaaacttaatattgagtgcaaaaaacttcatgtacaataataatcagctcgagacgcaaatgcaaatcagctaaatcaaatacaagaatccagaacttgaatagaaatcttatcctacatatataatatcggatgttgaagcaggtaaatcataaacaacacaaaattcgtgaagactggttaaaggtttataaaattactcacaggaaagatattataaacaactcgatgctcaatatcaagtggctcgcccgtctcttggcatgaaggcctatgtgttgaaaaactggctcttaggaactcttctagtttttgaggatccactgaatacctgtaacctccatctccattcaaacccacaagcactatattcacttccaaaggaacctgaaatggtacctaaacaaaacaagcttcatagtgtgaaattcaattctcgatgtgtcactcaaactcagccaatctaacaaccatatgcacgaaaaaagctatgatcatagtcgtgaagcaacaagaacgcttttaatttcacttcggtgattctacagaaccaaattactcaacgatttcttctccttcttcttctagctaaattcagactaactgatgatgatgatgatgattcacataatttaagctggagattgtacctcggcacgggagtgaagcatacggcggacatcggatcgaacactctctcgtacgtcaaggaaagcactgtgatgccagtgaggatgacctggctcgcgacggaaaggttgctgagccgagtcggtacgagaaacgagtccgcatagaaacaagagaaacgcgacgaataggagagaagaaaacgaactcgatcgtgaatccgatctcaactccatgactgaaaaaaaacaaccggagatttcgctcacctcccgattttggactggactggcgagagtcgctacaagtcgcttacggcgagggagcagaaatgggaaaattaaggctaattactaatttaccctcaagttttattattaaggtgacctgacctgctctgtctatatgtgatattgtgacctgctttgcctatatggctatatgtgatacctataatcacaaggatatttcaggtggagaatcagagaaagaaattgaagctgaataagacactatatgggagagattgaaaggaagctgttgggccattttggtgtagcgggtcgcaagtcgagcgtgagacttattgctgtgccattgcaggaatgcaaacagaggaaagatttcacaaatgggaaacggatacatgctcagatggttgttttgttgtaggaaatgcctttcaatgagtatgttaaacgctagctgtcctgtttaatggaccggtgtatgtcatcttgtcttgcactgtgtgagcacaacaacttgcaatgtttccattgatgctgtagcagtctctcacattaagctctggtttggatggctatgaacaagttgattggtagataagttaaaatgttgtgatttgaatctggaatgaatagaaagatgtgattggtactgatgtaaattcaatgctttagagaatgtatacaggcaataatataccaatcattatgtttattgctgactaagagccactcctctttgctgttgcaattcggcaatcgttctagatatggtttccatttcaaatcatgatatgcattgactttttccatgtggcgttcggaaatctttcatctatactacgtctacgttgcaagttttgcaaaatgtttaaattagtagaatctcacgtatataaaaactttagtcgccaaattgaaaatggagaatgaatggtaaactactagtttaccctcatattttagctgaaaaatatcgtcacagctgacgaagaaattagaaacaacaagcaacgtgtcacttctcatgtcgtcgttttccccaagaaatatccaaactaacacccaattacctaatgccacgtgtttactcacactcctttaaacaagctcgtaactgtttcatcttcttgtccccaaagtctcctcttccttatctcttggaaaccaagaagcatggatcgtgtggtcttcttcttcctcatcgcagctacgttactagcaggttctctcggatctaccgtcatctccggcgaggttaccgacggtttcgttaacccgatcaggcaagtcgtcccggaggagaacgatgaacaactcctcaacgcagaacatcacttcactctattcaaatccaagtacgagaagacttacgcgactcaggtagagcacgatcatcggttccgtgtcttcaaagctaacctaagacgagctaggcgtaaccagcttctagatccgtctgccgtccacggcgtcacgcagttctcagatcttactccgaaagaattccgccgcaagtttttaggactgaaacgccgagggtttcgtcttcctactgatactcagacggcgcctattcttccgactagcgatcttccgacggagttcgattggcgtgaacaaggagccgtcacacctgttaaaaaccaggtttatagagatttcaaattcgtatggattagctttgtaatcgttcatggagcttatagagagtgaagtgattgtgtgttttgattgtgaatagggtatgtgtggttcatgctggtcatttagtgcgataggagctcttgaaggagcacattttctagccactaaagagcttgttagcctcagtgagcagcagctcgtagattgtgaccatgaggtaggtttgtttctcatttgatatgtgtttttggtgaagaactggttgtgactaatttatatatgtttcttgcagtgtgatccagcacaagccaattcatgtgattctggttgcagtggaggactaatgaacaacgcttttgagtacgctcttaaagctggtggtctaatgaaggaagaggactatccttatacaggacgtgaccataccgcttgtaagttcgacaagagcaagattgttgcgagtgtgtctaacttcagcgttgtctcttcggatgaagaccaaatcgctgctaatctagtccagcatggacctctagctagtaagtttggaaaatctgtttaccttgttactaatttaagaattagatattaacacaacatggtctcttttacagttgctatcaatgcgatgtggatgcaaacatacataggaggagtctcgtgcccgtatgtatgttcaaagagccaagaccatggagtgctcttggttggatttggttcatcgggttatgcaccaatccgtcttaaggagaagccttattggattatcaagaactcgtggggagcgatgtggggagagcatggttactacaaaatctgcagagggcctcataatatgtgtggtatggatacaatggtatctactgttgctgctgttcatacctcacccaagtagaattattaggacactacctgtctatctttgtgtatatgtatgtatggttgcataaagatactacgaacttttatcgttagtattgtgtctctgtttcagcttttaatgtaaaatagcttgggggtattatctttgtagcattgaatgcttaagatgataatatgatatgattatcaaattattataagttggaacttggaataatagaaattttatatgttttatattattgtttcaaacaatgaaactccatgagtcgtaaaagacagaacatcagcatattgttgtcaatacaaagatttattccaaggataacaaagatcaaactgcttcgtttcatcgttaaacctacaaggtccgtttcttcttatcttccacacacacctgtcgctctcgcacttgttatcaccgccgctatctcgatggtctttatatatatcgaacgaatgcgattcatttggccaactaaaactacaaaaatacaacgtccttccaaagaattgacgcccgaaactaaaagaccacgactcacctggttgcagagtccggttacctaaatcatcgtcttttgatttacaatgatacagtaacgttagctgattaccgagatcattattgatttccacggttcttttcgaggtaggaaacacagaatttgttgatgatggatcgttgggaactggaatgtcgtttttatggtcggcttgtgataattttgtagttatgaagataatcaatatgaatagtgatagatattgctttggaatatccatttttttgaataggagagggagtttaagctagcacaatgttgtttgtaaatgtcgaatgagttatatactgtgtgttgtttgttacaagtcaagtagtcaatgatcctttccacttatttccattatattgtatccgaatctaccttttccttaaaattgatgtattgccagtatgtgccatgtggtcaaggcacgtgaattgctgtcaaacaaatgtagattgaattaggtatgtcaattttgagtatcttggtttcgaaaacattggcaattttaaatggaaaaaatgtcataataatctttaatttattaaaaacattgatgtaaatccttatgtctgtcgaaacgaaataagatatcaaatttatgttgacttttcaaataaatatcaaacttacgttgacttttcaaataaataccaaacttttattgacttgaccatttagttacgatgttaaatgggttagcaaatcccgttaatagagttaattttctattaacatacatgtcaactgaaaacgacattgtttcctataacaataatacgatgtcattttgttgtaacgattaaactaaatccccaaaattcaatcttaggtcccaaatcgagcaaaatctctaattccaaggggatgtattcaactggagatttgaaatcatttaaattttaatgagtttttaaatgattttggtgacttttggtaaattaggagatttgttattaaaattctcccaaattctacttgaaaccatgagatttggatgtttgaattcttaactaagaaattttctgcaatcccacccaaaatcactcaagtcattttaaatccactacttaaaatgtttccaataacagtgggtttggttgtacattttaaaatcactaatctaataacacttgattttaaaaaagtttttacaattcatgtttgaaataacatgggatttgtcattttaatacaaatcatttcaaatccttaattgaatacacccccctaaatctttatatgatttgaaactcagaaatttaatgagtagttatgataaaacaatatcgttttacattgttagagaagaatgctatcgttttcaattaacgggtttgttaacagaaaattgtctccattaacatagttttttaactcacttaacatcatgcctaccctcttttgttgaatattcatcttcacttcccccccctccccccctccccccccttctttcataaattcttccagattttttttgtaagaatctgacaagacctattaatttttgaggtacccaaacttttttaaaacaattgaggtgcccaactttacttgatttgttttacgcttatcaagcaaacaaagatatgattgaagacactaataaaaatgtcaactaagataattttattatataaagtatcgttaagtttgatttgttttacgcttatcaagcaaacaaaaatatgattgaaaacactaataaaaatgtcaactaagataattttattatataaagtatcgttttcaaattaataatttataagattgtgccatgtaccatataacaacttttttgattttatattttaacacatttaagaaaaaaagtttcattttattaattttaaactgtaaaaagataaatataaaaaattaaaaattttgaaagtaaaacaacaattatatggaaataagataattataagaacactatctgtctttattaaataaaaatagaaattaaaaaattattgattaattctaatttgaagctactaattgtaaaacaaaaaaaaaatacaataattatggaaattttacaattaattattagttacagaaggaaaaagttttttgtcgtggttaggggattgtcggttctgttgatttgagatagtgtggcgattttgttttctttaaaaaaccaaaatttaggtcaaattcgattctttcgtttctctcgatataatctgattttgatttgaatgtttcttgttgttgaagaatgtccacctcgacgttgcaatcggagcaaagtatggaaatcattaccccacctgcagatatcggaactagaactctggttgacaaagctgcccaattcgtctccaaaaaagggttagaatttgagactaagatcattgactcttatcctactgatgcaaaattcaacttcttgaggagcacggcagatccttgtcacacatattacaagcacaagcttgctgaatactcttctcagaatcaagacggagctactgatgaatcagacatcaaaatctttcacgcacctccaaatgtcacaactacagctattgttgagacaacatcatgtttggtttctcaattcgggtcggagtttgagatgatggttaaggactctaatacagatgatgcaagatttaacttcctgaaaagctctgaagatccttataacgtattgtacaagcaaaagcttgatgagtactcattagatcctcgcgacgcatattaccagcacaagcttgctgaatccatttctaagtatcaccgtgaagctacaccaaagttgagccctatcctcctcctcagtctcaattcagtcttcagtctcaaagattggtcctgcctaatcttttacagtttagacttgttaaagagatgacattcgaggaacttgacaccgttaaggtcacagcgcagtttgtggcatggtatggggatgattttagagggtttctgatggaaagagtgatgacggaacctcagtttgagtttatgaaggcaactgattacaggttctctttttacaacgagtttgttgttgcgtattcgcaagtattaaatccacccaaatatttgaaagataagctgaggggtcgtgctgcttatacagtaataggtcacttgctcattacaatgtcagaggaggagatatcctaatactgcacgtcgtggtctgagacagagagatggacaatgcttgtgcaggctagaacaagcatgcattttattcacttaatattgtttgtttctaaagctttggacttataatcctgatacagttatcaattccataaattttaccaacatatgtctaaagctgagagatacgtatcttagactacatacttgatttgaaacaaacaaagatattcttattgtaagacactaatcaaaatgtaaattaagaaatggtacaaagtagtaagtattattttaagatccatagagaaactgtctacaacttagaagaaggtttcttggatccacgtccggctataaactcctgcatctttctaaactgttccttcgtcatcccactgtaatacgcgtgagctcgctcctacgatttcaacaacagttttagactttctcacaatcacaaattgatcaacaagttaaaaatggcagaatgtttaaccttttctagtgtgagagcatgcccaagatcaagcttaagtccatcattgataacggatttaatcctcagaaccatgccttgttcattcttgattatagcctctgcgatttctctagctttctttaacgcttctccttcttcaaccacatggtttacaaaccctaacttcccagccacgtctgctgtcagtggcatcgatgttaaagaaacttctcgagctttgtttgctccgatgatcctcgacagcttctgagacaaaccccatgaaggaaatatcccaaaccttcaaacacaaaacagaggattcacattcatatcatcaaaaacattcatctcaaggcaacaaaattttgagagcataaacaaatgagattgaattttaagatgttgaattgagtagagcttgaaacaacatgattttctatgatccaaagctaaaatctgcaactatatttgacctaattgctagataccagtgctattgataactatgcaaacgacgtcgtaagagaagaaatcaacctggcgtgagtatccatgaacttagctcctctagaagcgaccaaaatatcacaggccaaggcgagttcaaacccggcggtgatggcaaaaccgttaatagctccgatgatcggtttacgtaaccgctccatctgcacaaccgggtcggtttccggatccttcacgtctcctttgaaaacagactccgccgcagtcaaatcaacgccagagcagaaagatcgacctgatccggtgaaaatcacgacctggaccgattcgtcggagtccatatccttgaatgccttggcgagatcaaccatcatcgctctcgtgagtgaattgagagatttcggacggttgattgtgatgacggcgatcccgcctgattctttcttcacctgaatgagattttccgatactgtttgatccatttttcgacgattccgattacaattgaacggatttcgaattttccgatcgggtttttaaatagagtcaatcaggaagagatgacgaagaacttgggtaagtgtgccattgttttgtcgttgttagtaaacaacgtcccgttttttgcttctattttagacgctgcgtattttgtttctcaaacatgaaaacggcaagtggagaaagtacaaacacaaaccatgagtaaaccggatcgaaccggtctgatttctgttcatctgttaataaatggttttgttaaaaaacttttatgcaccatttgcataatagactcgttaatttttttttatttttttttttgtgtgcacagactcgttaatgtgttttaaaaaacaatcttctgttaaagtataaggttcaccacaaaacgtttgagctctatacaattactaaaaatagttagagtaagttaaaaacgtcaatgatctgatctcaactagtgaaagacacatccacttggtacaaaaccttgatctgaaactccttgaaacattgccccatgaaaaggagagaagatgcttcattcatcatgcaattatttttatagaagtaattcgtttcaccattaatatgttcacaattgcaaatatttatttgtttaatcttttaaaagaaggtcggaccaagatcagtaatttactttgccgatgtcaactttttaacccgtttgttctattatcagaaaagttgagacctttcatagcaaaagttcaaactaaagacattgggttcaacctcctttggaggataccagctaacaccactatccgttaatttatcaagcattagttttaatcaccattatacgttaggtcaaagataacgaattacaatcgtctaccacgtcaacggtttgtattacttctacaagtaaccgatagtgcatgtttcatgggagcttctattatttaataacacgttttattgactattaattactattatcatcatgaaacaattaatgtgtatagtcttatcttgataacaagttgttttgttaatttaaaatccacctcttgcttcttttgttgtttactactctatttaatactactatctattaacatgttacaaacaaacatatagtattgtattttttttctttttttttttttttttttttgctcaacatcaactttcatttatcaaatgattacatccaattgaaggtacataacattctcctctatcaaattggacccaaatgcaatggtttgatctagtatcacgctgaaacactatcggatccagcgctacctgatcgaggaaccattgcatttttaaaccacaatgagatagataatactccacaaatcagaatattatcatctctttgaccacctacacagactctaagcgacacgagaacaactactaaaacggaagagaccaaaacctagtctgaagtacaaagtaaatccatactattagtccctattgatcagaatgtaatccatgtcccaatagcattaccacccggagacgcatcatcagaaagactcaatatccccggctttcgttgttccggtcctaaaccaaaagcggaccatatatccgactgacccgaccaatgatacaaggcaaaccagcaaggctagagcttttcccgagctaaccaatcaaccgtaagctactaatcgattaaggataacacattggagcccggattagtaagacctcacctaaacggtgcattgccggaacgatctcgccgcacatgccttgttgcctcgctccatcgccggactggaccagacattgagacggttcactagatctccggattatctcggccaccggcgaccacagctccatccccacgcctggaagactctgactctgcctctgttcatccgtcggcttggttctcctgggggatacagggatcgaaacagctgctcggagcagctccgaaccccaccagtctcctggataaggatcgagccgagagctctctcctctacctactgcctccgcatcgtcacaccgtcgtcgttgagcttcaccttagcctccggagaaaggagcaaagagtcgaccttatttctaaactaatagacaagacaacgaaaaagaaaaggggggaagccctctcacaccgccggcaaaagtcacaggcggcggagaggcggcgacggctcagatctaagttttttctcagaaaaaagctttcgtaggatatccaactttagtattgtattttctagagtctagacacaacatttaatttttcacaagcttgtatattgatcatcttttattttttcctttgctatttttattatgtggcttgactttgagtttggtgggaagttgcattccagtcttgcgagtaaaacattaagttctctactatcgcaagaacaaaaaaaatccccacgtttctttcactattaacaacatgggttttgtgtatatacacgtaaggttagtgaactctttttttttttttttgattgggtaaagttttaaattttactacaaagacatcaattaatagatttgttaatctgttagctagtaaagtttattatatattataaccatcgtgaagtttccttaaaaaaatctttgtaattaaaacactcgaaaaattttggttagaaaaaaagaataaagatgttccgccaaatgtttgaaagatcatgcgaatgcaccaaaactggaaaatcatgcaaatgcatcaaaactaaaagaatcctcgcaaatccatattttgttacactaccatttggaagataacatttatttttgcatacatcccgttccaccaaatgttttatttcatttcgttcactaaaagtctaacatccattggctaataatacgttacattatattttgaaaatatttatatatttcaatcacgaatatcaagcataacactactaatatatttaagataaaatccaagagacacgaaaagcaatcgttctaccattacctctacatttgaactttagagttccattggcgcagctttggttattcaacgacacgttctctcgactctctttgtgtacaattaatagtctttttttttttttttaacaattaatagtcttatctcaacaaagaagttgattacataattcaaaaacaacaacttgtttctattcgttttactctatttcatactattaacattttttatacaacatattgtatatattgcccagataaaatattcattttcagaagctttattcatttttcctcttctattatatgactaagttggtggaagttgcaccgcagtttcagagtgcaatattaacttctctagaatctctactgctggctgctccaaaaccaaaatattcccacgttcatttcatcactatggttttgtgtatatataaagtaacatgtaaggttgatagagagattaatgagagtttacaaaaatagcaagatttattgggtagttagtagttatcattaatctcgtcaaattattgattaagaaacacctcgtggagtcatacaagtctcatgacccaaaaaataccgttctattatgaatgtatgattaaccaaaattgagtgattcattttacgttatgttgcatttaatggacattaaatttgacattatgtcaaacacaaatcaactaatacttcaccgtgacatgatgaagaataggcatacaaagcggataaggttgggttggttagaagaatttcggactaaacttgaattcaaatgtctccccgttcgtttgagtccaaccaaattgtatcggagacttttgacaaatgcaaaaaaattcatagattaatcttgtttcggataataacattattcagcaaaattattttattatttttcatattacatacgctcatgcatggagctttgtaggtatagagctagccatcaatatttaatactaccgcagccaacttttgcagactctgaaggcctaaccttttcttatataaaacagtgtggatctatataaacatgactctacaattcgttattggtcatttccaaagtaatttaattttaaaagttctgagtgaaactaagagtggttctgtgccattctcaatgaaggactctatttgtgacaaacccctaatataaacctttccttcgttaactttcatatatcttttcttcccacacgcatctcttcttcaatgttctcttcttagaaaatcattattattcgtctttagttcttcacaaaagagtcccgtttttctagttgatattttgtccgggaaaatcagtttaaaactgaaaacatcagtaatgtcgtcgcttgtttctcgttgccaagttatagcattattggtcttgttctttttcggggtgtgtcttgccggtaaagacattccggcgaattttgtgttcggagattcattggtggaagtcggaaacaacaactacttagccacattggcaaaggctaataattttcctaatgggatcgattttggatcacctactggtcgattcaccaacggaaggacaatcgtcgatatcatatgtaagtacagtagttacacaaaagttaataattctacgagtaatagattaaatttaatacacacaagtttccttgcaatgtttcaagccgtaataataaagattgtatttaatgtgaaaatattattatacactgatcgttgacttccaatatgaaacaacgttttcaaattgtagcatttttttcgagaggttcgttttaaaacaaaattttggtttacttcatatacggctcgataaccggaaattttgaaaatcgcagatcaagcattaggttccgacgaattaactccaccgtacttagcaccaacgacacgcggacccctaactcccaacggcgccaattatgcccccggtggcagtggacccctcaattcccccgggtaattatatgtatgcatatatatatatatatatatatagaaaaatatatatatatttgtaaaaatattatagataagtgacgactctgttggaataaagaactcgtaccgactccctattgcaacggttgttgatggtggtgatgataaacctgtaatctttagttcctaaggtattttatttaatttgggccattttagtcttgtaatgtttagacccttttactcgttaaacactatgaggattgtaattttgttggagtttagacaaaacaataagaaaagaacacgaatggatcctctcgaagggtgtaattttgttggagttttgacaaaacaaagcttttatcttcgcgattgcttttgtcatttgttagtttagtttccttagttaacagggcccgcgcaattaatttaatttccttacacttgtaccaacttcttgattctggttaggacatgataggtattatttctgaaattttagactcgagtgtgtgttgaattcgaacttcagttccacaagtttctctacaatagactcatttcagactggttctatgtcttatttgatcggtttacagcaaatactaatggagtcaagatggtacgttttttttttttttttcggttcgatatagatcaacgaatttagattcgtggagccctgagcagcttaaggcaatgatgtttggtgtaaattaccttgctccggtgttcttcaagaaaatggatggacagacgatcgcaatatcgagtctaagtacactttcaagagctgctaatctgtataggcagattcttgctaaagaagttgctaaagccattgcacaagatactaccactgatctaccaaaagcatctcatggggtttcttcttcttctgtcaaggaagagttacgtcccaaagaaacttatttctgtgacttttatggtcgacccatagtttaccccatacttaccagtgctcgaagagttacatgggctcgaaaaatcaattatgatataaacaacatgtaaagttgtctcaaatcgaatttgtaactctgctttagatctcgaaacatgttaactcttcgaacttttgtaaccgaagtttggttgacgaccagagaatcacctccaacagaacagtctctatttaataatcgactagtataaaacatcaattttaatagacttaagagttctattggagcagctttttattattttaaggacatgttctctcgcctctctctatggttacaattaatagtcttatctcaacaacaagttgggtacttgtttcaaaaacgaccactattaaatttttcagaagcttttattcatcttcttcttgttttttccatttgctgtttctattatagctagcacttgagtttggtggaagttgcattgcactttgacaggtacaaaatttaactcctctactgctgcaagtacgaatcgttcccactttctattcattattaacagtatgggttatgtgtatattaaggttgatgagagattgaaattgattgggttgctatcatgacttgtgaattacgtaataatccctgtccaaatttataaattaataactagtggaggattcatgacgaaaagaagaaaaccgtgtagtatgaatgtataatgattaacaacctcatgcattgattgattcgttttatgttatgttgcatttcatgacaatatatttgaatattttcactgtcacaggatatttttttttatcatagcaaacacaagtgaattatggtgacatgatgaagaatagggcatttaaaccggatacggacatacggttggcttggttagaagaaattcaagtgaccgaatttgaactcaaatttctctctattcattctgagtctaaattttcttgataaaaaaattgcatcggacacttttgagttttgacaaatgacaattacaaaagtttttatagattaatctggttttgggtaataatattattcaattaaattaatttaatatttcgatgtttttacgctcatgcatgtagctttgtgtagaggccattaatactaaaccggccaactttttcagtctctgaccttttcttaaaaacagtggctatatacaaacactatacaattcgttattggtcatttccaatatctttttttttttattattctgaatcaaactaagagtggttctgaaacaccaaaacaaaaacccttatataaaccgttccttctttaaccttcctctatcttttattctcatacaaatctctctatttttcattgttcctttcttagaacataataatattcatgtttggttcttcacaaaaagattcccgtttttctatagttgatatttgtctaaaaaatcaatttcaaactgaaaaataccagtaatgtcgttgcttgtatttctttgccaaattatagtattatcggtcttgttcttctccgaggtgtgccttgccggtaaaaaaattccagcaaattttgtgttcggagattcattggtggatgccggaaacaacaactacttagccacattgtcaaaggctaattatgttcctaatgggatcgattttggatcacctactggtcgattcactaacggaagaacaatcgtcgatatcgtatgtaagtaataattttataactatatatcttatgcactgatacacacaagtttccatgcaatgttgaagccgtaataataaagattgtatttaatgtgaaaacattattatactaatcgttgactttcaatatgaaacaaaatataaacatttttgcattttgcaccggttcgttttaaaaccaaaatttggtttatttcatatacggctcgataaccggaaaattttgaaaaccgcagatcaagcattaggttccgacgagttaactccaccatacttagcaccaacaacaagcggatctctcattctcaatggcgttaattatgcttcgggcggaagtggaattctcaattccaccggaaaattatttgtaagcatattttcattatatttcttattcttcacacatttttgttgttcattgttacaaaattttaaaatagggcgaacgtataaatgtggatgcacaactagacaactttgcaacgacaagacaagacatcatttcttggatcggtgaatccgaagccgctaaattattccggtcagcaattttctcggttacgacaggttctaatgatctaatcaacaattatttcactccggtcatatcaacccttcaacggaaagtagtagctccagaagtctttgttgatacaatgatctcaaaatttcgattacaactcaccgtaataattctcttctctaacttcaactaaaaagaatccaaaccaaaccggtttgatcaaactaatttatatggttttggcagagattgtaccaattgggtgcgaggaaaatcgtggtgattaatattggtcccatcggttgtataccattcgagagagagtctgatccagccgctggaaataactgtttggccgaacctaatgaggttggcacaaatgtataatctgaagctgaaaacactcgtagaagagttaaacaagaatctacaaggttcaagattcgtctacggtgacgtttttcgcattgttgatgatattatacaaaattattcatcttacggtacgtaaactcaaccatttgacttcttaataatgttatgatacttctttcagatttaaacgtatgaattttgtgatttgatattgtaggttttgagagtgagaagattccttgttgttcgttagttgggaaagtaggtgggctgattccatgtggtccaccttcaaaagtatgtatggaccgttccaaatatgtattttgggatccttaccatcctaccgaagctgctaacatcatcattgctcggcgtctactctccggcgacacctccgatatttatccgatcaatattcggcaactcgctaacctcaagataaatgcatgaaccgtatagggaaaaactcccatctatatagggttgagcggggtggctattgacgtttacatttcgatctaattaaatatgttttttatttttttaattgatacattgatatgcttttgatatttgtgtaatctcttgaaaggtttattagtgtggctggctttcatctttcgaattctggaacattagacttcttactagttgatatggttagactttatatacctacaccaaggagaaaataagatatattcaattgtctaatcttctttgttgcccaacaaaaaagaaaaaatcttcttttaagaagcattttatgtttttgaattttgactatagtgtttcgaggttaaattaatctgactcaaagggtaaagtgcggtataacaactttatgagagagaaaaaacaaactaaactttgtgattttccattaaccagaaaataaatgtcccaagattgtttatatacacatgagtatagtagtaaagacgtaagctaaaggagactttagtctaataatctaaatatctcagtaatctaatacagtagtatctagttttgatatgtcatttttatttcatcacttttgaatgtaagtatgtcactagtatttgttttactaaaatattatagatagtgacgactctgttggaataaagaactcgtaccgactccctattgcaacggttgttgatggtggtgatgataaatcttgtaatctttagttcctaaggtattttatttaatttgggccattttagtcttgtaatgtttagacccttttactcgttaaacactatgaggattgtaattttgttggagtttagacaaaacaataagaaaagaacacgaatggatcctctcgaagggtgtaattttgttggagttttgacaaaacaaagcttttatcttcgcgattgcttttgtcatttgttagtatattttccttagttaacagggcccgcgcaattaatttaatttccttacacttgtaccatcttcttgattctggttaggacatgataggtattatttctgaaattttacactcgagtgtgtgttgaattcgaacttcatttccacaagtttctctacaatagactcatttcagaccccatcggttgtataccgttcgagagagagtctgacccaatggctggatatgaatgttctgtcgaacctaatgaagtggctcaaatgtataatctcaagctgaaaatactcgtcgaggagttaaacaataatctacaaggttcaagattcgtctacggtgacgtttttcgcattgtttatgatattatacaaaattattcatcttacggtacgtaacctcaaccatttgactttctgataatgttttgaaacttctttcagatttaaacgtatgaattttgtgatttgatattgtaggttttgagagtgagaagattccttgttgttcgttagttgggaaagtaggtgggctgattccatgcggcccgccttcaaaagtatgtatggaccgttccaaatatgtattttgggatccttaccatcctaccgaagctgctaacatcatcattgctaggcgtctactctccggcgacacctccgatatttatccgatcaatctccggcaactcgctaacctcaagatatatgcatgaagcgtagaaaccccccccccccatctatatagggttgagcgggtggctattggtgtttacatttcgatctaattaaatatgttttgttttcttaattgatacattgatatgcttttaatatttttgtaatctcttgaaaggttaagtgtagctggctttagattttttatttattttttatctatatatacatttttgcagctattttgtgaaataaatcttggagttgggacttatttttacaatggctgtcattggcttttaattattggttttcttttggcaataaattgattaacaaacaaaaaatattccaaatatattctaatcccatatatcacgcagatttctccaaaatttgaactagatttcgaaaactatttaaaacagaaaatatttgacaaaccaaaatacaattgcaatcccttaaaatgagcaaaacgcacctaaatacattttctatcagttcattaaatcttatttctccaatatttgaactagatttcgacaactctttaaaacaaaaatttgtttgacaaactaaaatataattacaatcccgtaaaatatttatttcaattagtggtgtaccacagatttttttaacgggacggttttggcggaacgggtttggaaggatgttacttaataacaattgtaaactactagaatttaacccccggtacaccgcggggctattatgttttaaaaaatataaatttattttttaagagattaactgaagatatatcatattaatttgtattttaaaatatagatatctatccctgtattatttagtatatgattactattatttatgtttcaaattttgaagtatagatatgaatacatattttttttttaagtaacaatgtatggtagattttaaaattttgaatattttgtctgcagtataccgcgggtcaattttttatagctaaaatttttaaattttaagttatatttgttttgttaatattgtatgtttttgtgtttaaggttgtatgattatattttgattgttaattttatgatttcatccgtgatatacctttctttattaatattgatcaaaacccatcatcccatataaatccgtctatattatctcgttagctaaattattagtgttataaaatccaaaaaaataaattattattgttctaattccaataatttaggatctcacccggggtataccgttccttgaatgatttaaaatttatattactaatatagattttaaatttatcatataaagtatatgatttcaagttttgtgcttttaatttaaataaaagaacggtttaaatgatgataaatatagtttttttcctgtatgtgtatatgattttttatgtgaatattttaattattataaattagtatttttaattctatgcaaaatgttgatataaatatttggtataaatcggatttatgcatattttgtgaagtaaaattcacgatttttttttaaaaagatatatgaaaagattgtgtagagatttttagaaacaaattaggcaagatatagtttgattaatatcttttttaattttttttaactaaataataaatgtcagtggcaggcattgtaaataagtcccaactccaggatttatttcacaaaattgctgcaaaaatgtatatgtaaataatagataaatataatttgcagacttttatatatattaattataaaaaaaaattgtctccacgatgtaccgcgggttataatctagttaggcttatataatctaaaccaaggagaaatatgaaatatatcccactggcttatcttctttgaaagcaccttaactatcattaaaatgagaacaagttggttaacttaatttgcaccgtaagatttatatgactagactttctatacctgcaccaaggagaaacgaaaagtatattcacttgtcttatcttcttttaaaaagcattttaactatagtgtttcgaggttaacttaatttgcttcaaaggataagtgagtacgtagttgcatctagttttgatacgttatttttatttcatcacttttgaatgtaaccagtgatggctctgttgaatttttctttacttcttttttattagagtcatatatccgtgctttggtatgaggagaacaaacttaaaaaaaaaaagaaaaaatctcaactaatggacatataaaaaaaatcctacaagctaaagccgtaataaacagccaaattttttggacgtaagctttcattcatgatcatcgtttgtagaagatcctctagtttaaaattggtttggcttatctattcatctttttcttctaatataagctaagtatgagaacacaatagattcattacacaacaaaaaggatttcaaacatataacataaatcacatgcaaatttcaatgaaggaaactacaaagcgattggtttcaaatcgttgtcttaaacatcatttcaatagttttaacacatgttctcaacgagtccaagtctccaagacattctcaagcttatgaacgtgaccagtaacatggatacaaaatttcatgccagctgcattcgccagtagataaaagaatttcatgtcaaatatgaattcgcctggatcgcactaaacatttcatgggaggtgttcctaaagtcatctatagcccttaaatttagaagaaaacaaagttctaagagagtacatgggagaaaatcatactacattatcaaagacaaacaaaaatttagttaattgtttaaataataactacgagacaattcactgaactgtaaggtgatatcttaaactactaactaaattgtaaggcattatgctaaaggaaaaatgtcttagcctttgttgttttgtctcactatgccaccatttatggttttctttgttttgggctggagatgccatatgagttttagggttttcttcttgtatggatgccatatgctttgtacaacattatattttcttcgttgactaaatatgtttaatatacatagagttaaattgtactaaagttaccaatttgttgaagattctgtggtgtagtggttatcacgtttgccttacacgcaaaaggtctccagttcgatcctgggcagaatcagttttttcatataatgctaactccttttacaaccagaaaatgagttatgtttccgtttaaaacaaaaagtcttcaaattcctgaataaaaaactagcaatgtccaaaaccaaagacaaaactggagaaagtgtcaaatatagtcaatgcaagcttaaaccattgcaaaatgaaaacaatgcatgtcacaaataaaacttaaatgggtccgaaaacaatggaaatcataatacgaacggatcagaataagttctcaggtgaacttcttaattacgacttatcttcattcccccattgatcttgatgatgacttccaaataattgtaaatcgaaaagtcaaaacaattatctcaagaaacaaaaacaagacgctattaacaatgttcatgttattttaagagtagttaatggcaatatttaacacttttcacaaagtttttaattagaaattgtaatgtgataaatatgtgttaaagtttaatattttcttagcattttccccaaaaaatcttcgccggcaattttttacaattcatatgtggtcttcctcactgaaatgaagtcatgaacatataatagctaatacttcttaaatatcatttattccattcataataaaattctccagcaaatatcttcctttttaatctggcttgagacacaagcaagttaccctataaagctatatttaaaaacgagcaccatggcctcctcctcctcctgcaccgccgccaaaacctccaccagctccaccaccatggcctcctccacctcctgcaccaccggagatttctaataaatatctttatatcatataattacactaaatatatccagtttcattaattagttatatttctttctacaatctgttatagtaaaaaaaaaactgtatatctatatatacatttttgcagccattttaacaaataaatcctggatttggacttatttacaactcaatgccattagcattaaatctttctccaaaataattaattttactttaaattgttaacgacattatcaatcaaatttaatccaaacaaacttcaaatcaattccttaaaattagcataaacatatttgttaacaatattttaaaacaaaattttttgttaaaacaaatattattcttcctaaacgttttttgtttaaataaataaatcatgtatttgaacttatttacaatgtcatgacactgacattaattacttaggaataaaaatattaaatcttctaaatccttgcttttagaattattatgtcattacttaaaagactcaaaatataaaaaaaattaaatattattatttatatatctagactttataaaacattattaatatttaaacttataaaaagtttaatatatagagtttaaaaaagtcttaattctttccgtcatattttgtgactcgaaattttaaaaataaacatatattaaccaattggcaaaaaatgtgtgagttatacgtcccacatggactaaaatatttagacaatgattcataaacatatcataaataagattaacattaataaaataatggtttttttacaggacgggtttggcgggacgggtttagcaggacgttacttaataacaaatataaagtataaaataaaaatattttataaatagatacaatttgcaaaattttatatatactaactttaaaatataaattgtccccgcggtgtaccggttaaaatctagtactattaatacaatacattataaatagtacaagaaatatatcaaaatagatataggtatatatatatatatatattaaaattttcaaaactcagatttttatgtaatcaatttcagattaatctgttaactaaaattatactaatttagtattattataactaatattaattaaaaacagtattaatatataattccaactcatacataatggaacttgttagataaattatgatttagttaaacttttaagctattatggattttatttagttataataataaaatctgaaccattcctgaagagacaagtaggccacataagaggttttaataaaagattctcaaaatctctcaaattaaaaccaattctcactcactttttttttaattatttttagttgcgaaaaacccaatgagagtctcctactacacatgatcttagatcgaccctggtaaactcaaaaagatttcacctatcttaccatgaaggaaatttttgatttaaagacataagatatacactaatttgaacataatacataataagtatcaattatgttgtactcgtataaagataaataattatttgaagtaccatcaaatctcataaaatactattttaaccagaaaaagttatttgatctaaaagtgtaaaatgtggaggtatttattatttagactattaacagtcgtgaaagcttcattagacgtaaatggtgatacaaagcaaacttaaataataagagagataaccaactaatacacaagatagataatcgaagaaaaccgaactacattcaacattaaaccggagatataatcactaatagacatgcagtgccaaataatcgttacaaactaaggtttttagaacaacaaagataatgaaatataaatcaaagacagtattcatgcagtttttaattaacttttatttttctacaatgtataaagttgtaagaaacaaattaaaagcacatctcattgttaagaaagaaagaagaaaaaaaacaaaatgacgagaaaattcaacatagtttaaaaatagtagggtaaggcaggtggtaaaactaattaagattcctctcttttttcccatcgtctcaactacttcaccattgagtttatactaatcatgcagtttttgtaagaaaaacaaaaaaaaatactaatcatgcagtttatattcatccacaagtcattatcactatgatcagccgacgaatttaatagatagtttgactattgagtcactgactaaaaaggtttgtatatcaatcttatatcatttggaattcattgatcacaacctacaatttgaatgaatcgaagtatctcacataaaggtgccgaatgactttaggataagaatataagtctaagtctaagtacatccgtatgaatgaaaaatacaaagaagctgagattttatatatagactaatatcatagctaacggtcaaaagactacaataaggaaataaagactcgaataggaaagaatcccaagtgatggccattggcgcctttgatgatatcttgaaatttgagaagaaatataagtttgaaaacagtttgcttcaaagaccttcaaaataggagtaaattcccagagaaccctagggctaataagtttcctcaacttgaacagacttaagagagattggaaaattaaggagaaatcttgaagatgtgacaattctgaaactatgactgatgaccattagtgtaatcgcggtttagttttatttgttggtttttacaggttaagttggtataccacatgtgtatatatataacaacatcacagttgtacagattacaattcatcaaacatatgaaagtttatttttaacagttgctttaactactaatagatctgcatgcataaatttgattcattgatatcagttttgtttttttattttagtatctctaacgctccaatgttttccacataatcgaaatcagacttccacattttatcttcgtcatgatcttgtgttttagaagcctcacgaaccagctatacgcagaggaaagatattacattatcacaaacaactactctcacattctatgactgagagtctgagactataataatatacacagcgtaagggaatcaaccaaaaaagttcccaactataactactactcttacatgtaccccgtagcaaaagtacttccttctaaacctacccggaccaaaatcaaaacattcaatgccactcatgaagagggcatcatcatcattagaggaaccgggagttcgataacgattaggaaataagagcgttcgaattctcttatgtactgaacccctccgttcatcagcttcaaaatctttctgcaaacgcttagtcctaatccttctggacttgtccatcggctactatggaacatgtcttgcactttctctggcggcacaccttcccctgcacacgccattctaacaaacattgacaaaatgagtcagaaagtttgctctgtttttagttatcattcataagtttcgcaatgcagatagcaaacaaaaaataaaatttatccgcagcagtcagatttctgaaaatgaattatagcgatgtatttgctgcctaagtcaactagctaaatagagaattggaaagacagaactagaatgatggaatgtacctgaactccaaacgtacagcggagaatccgtcagccatttggttcagagtcgggcatagatggagctctaccgagccttccatgggtgcataacggacaatacttagcagaaattctgcgagaacctgttggagccttatctggtcaccgtagacagccatggatttgacctccgtgggaatgttacggatcagctggagatttctctctctcaccaccaacatgacttggcttaccactgcatttgtgacattgccaatgaagaactctgttctctctagcagaaatgaactgatgagccaaaaaaaaaatagagggtgtttgtttagcagtgagaatgaggctttatagaacaatttaagtgtgtataaagaagaatcaaaactctcacccgtcatctatgcttttgacgtccatgtctcctacaatctttgagatctgcttctcacatgaaacactcgtttcaagaagctgcttctgatcctcgtttaaatccatgtcttccagcaatgaatttgtgaaacgcaatccactcaatggattctttataacttggaaaatgtaagccaactctttcctccttgagaaatattcactctcctgcctcctctgaacttctagagcttgctgcagctcgggactcggtatctgcaaaaaacagaaagccccaatgattttgccatcgatgctgacccgtttgttcaaagtcaggagagcctgaatgaattcccctttgcgatcaaagaacgggaatgggaatttatcagtatcttggccaccgatcgcgttatgcaagacgatcatgaacttagttaacgcatcaggaccctttagtctgcaatagctcccaaatacttccctaacaagtaattttccaatcacttcgctgcgaggccagcctgtgagcttttccattgcagtgttccactcaaggcagcacgtattctcatccgctgcaaagattggagggatcagagggttcgggctatggatgatggccttgtaatcaccttgtatgttgatgaacttgtccataacaattttatgaccagttacatcttgtccaacaaagcagactccaacgatgttgtttaagtagtccttgcttgaacatgcgttgacaaccacaaacattgcttttccttgtagctcggaaccaaaagttttcagcttgacctccacattcttgccttcatcccctgcataattgaaaacgaaacacattatcagaatttgtattttagagtgatgcacagattgaaaatctaaataattgcataaacctttgagagcacaagaaagaagcctatcaactgtttctttgtactctttgtatatcaattcgcgaaccagcgactttcccatagcgtcttcaacagaaagaccggtcagctctgcgatcttggcgttccacccattgatgcaaccgtctatgtccacagcaaatataggaaccgtcgcagtctcaatgagcctaaccatctctcttgcaactgcacctatctcctgcatcccttgctgtaccatatcatctccatgtggctgaaccgccccagctgcagcagctttagagtccatcgcttcagactctttgaaagagtctcttagaataagctggagcgagtgaatggcgtccatttcagcagtttcccatggctgacatcggctcttaacaacttcgagaaaagtctggaacgaagaacgcggattcatccgctgaccatcatctttgtcctcaggatggtgcttagcccctccccatttgatttctttctcagtatgagaccgaaaccagaaaaggaagtccctttttgtgatacacgcgactgccataccgcacacagcatctcccaaagcagctgcccgaggataacccgcatcgcctaaactatctgtgcttaacccggtagaatcagaatggttagcaaccaaccactccacaatgtcattaatctgagaatcagttggagtcacacccaacggataatacttcccttggtaaagaaatgccgcaccattacattttactaaatccatgatactaggcctctgcgtgacaatccccgctggtgagtcacgtagaagcatatcacataatagtgtctgcattctcagaacgcgtttttcagacacctgcaaggctaactgcaactccatgtttagctgtaagccaaaggcctgcataagaaactcacaagcgtacctcaaaggaaaaggtatgcaacgagctgatgtgtgatggcaaacaactaaaccccaaagcctcatcgagtttcttcctccagtattaaccccattaccatcttcttcgtttccatttattataactgccatagctaacgacgcaatagagcccatgttagtcatgtattgagcatgacagccatgaggagctcgcaaagtcgaacccaccaagcatataaactgcgtgagcctatcgtcttgaaccacacgaaccggtgacgcatagcaatctactatcatcctaacacggttttgcttgaacaagaaccgagatgcctgaggaatatcagtagcgggataatgcagaccaatgtaaggctctaaatcgttccgtttactctcggctacgacttcaccatgttcatcttcatgaaacttgtacaccataacgcggtcgtagccagtaagatctctaacgctttccacaacagtgtcacatagaagcttaatgtcgccgctaggcaacgattgtaaatgagaaatcgcacgtaccgcaagtttctgcgattggactgctccggcgattgaaagtgccggatcttcggttcgagccggctctaaatcgatcaaaattccaacatcaaccctgtggagaatcgcgtagaaaggtttaccagtgttgttagagtgaatccaaataggattcagaagcgtgatctctcgagccacgaacgcgcgctcgaggagaaggtagctcgatgacttgaagagagatcgcaaatccgtaccaatcgttaaaacctctgatttgtcctcgatgcttggtacagattgagacatgagccctagcatttcccgcgcattttcactgtaaccgatgattgtgaaagtggattcttcgacggcgatcaagcagccaaaaggctgggtatagccaccgcgttggatccgggagagataagctgtgatctgctgctctggtacggaggaatcgtacggcgccgttttaagagactgtgagtaatcaaacgacttacctgactctccggattgttcgaagacggcgtggagtctcgcgtcgacagtgtactgttgaatagctttgtttgtggactctgttccgccaccgtggttttgtggctgctgattctgtgaccttagggctttgtttgctgacgactgagcttgttctgcagcgctggtgtgacgacttcggcgatggcctgaggaagctgcctctccaccgctggttttgctaccacctccggagaccatttttctcagttaatggttttggaatttcaaagaattagtgcgagagacgaagaaaatcttcttcaatcattggattcgaaaccacactttcacaaatcttcactgtaagagctcaaaaatgatactcataaggatttttgggaagcttgaattatcaccgtcgctagcttaacggcgaagtttgtaaaatgataaaacagaaaccaatttgaatttttcttaaggctctcaaaaaccaattaaaatgaagcagaagaggtggtgaactcaaggattaaagaagacgatgaccttgttctctttatgatttgactccctcgtctattaaaatttcgttaaaagttccaaaaacttgtgtaggtatcaatttaacccacatttttaaactttcgttgccttgtatgttttatgaaggaccgagatcacgtgggttgtggattattccgactagtgggcatacgagggacgatatatgtgggcatgtgggcgtctgtgtcctcaaaggtctggtctggtctggtgtatatcaaataaaaatattgcatgactttaccaagtctaacgtggaccaaaacaaagccgagtatttaatttaacttggactaacaggttttatttgaaatttgtctttatttggaaccttttatgggataatctcccaattattcacataaatctcagcatataaaatcatcactcaaccgccgtaccgtctctcgcggcagagaatgtgatcggaaattttggttgtttattaggaaaaaacaaaccaaaattcttctcgatctcaggactcttttgattctcatcaaacatagcgaacaaatacgtttccactcctcttccaggtctcttcggtgttcctctgttctctctcacacgcgacgcaagattcgtgtaaaaagcttcgcgcgttatcgaaactcgcggcgtttccaccgttagaaggccatccgctctcggaaacaaccactgggagagatccaccgcctgagcgttcaacggcagagtaaacaacgtcaagtaaagcgtcaaagaggttttggtagccacgagagccgtcccatacgacgacggaaggagaagtgaagagagcgtaagagagagatatgtcacgtggattgtcaacgtagctgaagtaaggatagatgttggctagtaacgctgagttcgtactcgtaagaaacctaattagccacataggaagaaattaaataatcattccacaagtaaccagaaatgaaaaatattgggaaataactaaatctaatgaattttggttatttggtttggttggaaaattacccgatgacgggatcgatataccatctaacgtcaccacgaaactctccggaggaaggagggaaagagtttccaatcaaagtcatatcaatggcggtagaaactttaatacgatcttgaagatttgcacctcttagagcatcgtaaacgttacgcatggcagggagcacaacatcaccgccgttcgacggagatacttcgttacctacggcgatgtacttgaagctaacggcggggtaatagttgaggacgttgttttggagccatgatctagcggaagaagggttagtgagtgaacgaagatcggtgtttggaacgccgatgatgacttcgatacccgtgtttctaagagcgtttaaagcggcttggtttggatcgtagagtctaacacgtcggatgttgttttgtctaaagagagcgattgtgtctgattgagaaggaaggttgttccccatcattccatagcatacacctactgattctccacctagtttatcatataacataattaaggttaattatgattaagtttatatatctataaaaattgaaaatgagaataaatcatgtgagattaaagagagagagagagagacttgttgggttgaggatggttgtgatgaatagagcaataaggaggaataacgtggtcatatttgagatcttacgtgttttagcaattgctagttgcctaattgggtttgttcttagctccttatatacaaattaacattgatatgtatgtacttacaatttttttagtagatatatatagatgcgtatagattgtatataatgtagaatggagtggctaatatctttgtttattaatcaaagtcaataagtcattagtcgggtcaagtaatcaagtacataacgttagcttgagtgcaaatatgcgttcaatttatcaaatcttatatgcaaaagagaatatcttttcaaaaaatgggtagagaaatgtcactttccaacttgagaaattaggacattgcttatttttgccagcattgacaaatcaaccttgctattttttttgttttttttttatcatacgaaatttgatttatttgactgcgtctatgtaaatatttgttaatgttttagaatgacgagaaacatgtctaatttggcatatttgtgttttacgtgtaacaaaacttgtgcaatttagataagctcctaaacagtgtcattgaatcaagtataattccactcatgaattggttactgattttttgactttatgaactatgatggaccaagttggctattagctaacgtagttttatcatatttgcttacaaaagaaaaaactttatttgaagatattgtcatcacttaacaagagcagccgtataattcgatacgatgacgaagtaaacacagcattattaaaacaatttggtttagaagattagatttatcaactttttataatatcacacgttatagcaaagttatagcagccggcggctagactccacgtatacaaattttcaacactatcatggtttatggacgaattttcagatcggccccgcataaaacgacaaatttataattagacccacataaaaaccaaaatgatcataaaagaccctgaaacaattcaagaaacccgagaacagtctcatagtattcatatttttacacagaaaactccaaattgaattgtataaaactcataaagcggaacacaaatacacgttacatttgaaaaatgtagtcttctatcaatctattctctccaacggtgactacagttcgggttgcagcaaacgaaaaacagagtcattccttcttcgcctctagccgtggcctgaaaattcgatgacacacacgagctatatcaaaccgaaatagccataagcacattaaaaagcaagagaaagaaatctcttttgatctttaagttagatcagagaaaaacgaaagaatgtttctttactccttgattgatgacgaattaaagattaagatataagataatgattcacctggaagaagacagcttcaccgtgttgacacttggcgcatcgcacagccttggtacgtggaagagttgggtcggaagcaacgtcagataggatctgagtttgttcacttacagagtgatgaacctcgtttctgtaaacacaattgttatctgctgcttcctgcaaagccaaataaaagaatataaatttcaagaccttctatcaacaggacgataaatagctaacagtaactcagtaagtttataactaattcggttagcaagtccgggcattaagctaaagatcccatacagagattcatctagaatggttttcagtagctaacaaaggcataatgctttgtaataacaaaacataacacaaacagtagaaacaaaaaaaaactcagattcggtaacaccaatggatattgttgaaactcaaatggttttagaagttaagttgcagaaaccctctaaacggtttttaaaaggtcttgcgtttgttcagaagttctcaaagaactctttatactgataagcactactatcttaaccaatcagattcatgatatgagagacaaggaaaatgatctaaactcattaaattatcattccttggtttacttcaagttcagacattcgacctttaaccgtataagcgattacaaagagtaaaacatcagagcttaaataaatatcaacacaaatcatatacaagtgaacaactaaagtctattggtttcagccctagctttgtttcaacaccacattgttccattaacactaaggaaacctaattttataaaagaaagcatagtaaacaaagtttacctggtgatcacaattacggcacgcatagaggaggattgattgctccttgtcttccttgggatatagaatgttattactgaacatttcaaaaaaaaacaaaatcaaaggttcataagctgcaaaagtggagaaaagttggagctttaatccaatagaaaacataagcaaaccatccaaaactaaaattccgacaattagagacttaagagaactgggtacaatatataattcaatatgagctaagaaatgaaaacccaaatttcaatttcagaagactagtataaaagagcagagaacagattcgttttgacccccaaaataaaaaaaacgaagagattcgtatttaccattcgcgacaaaatttcatagtactcatcttcgcagaatctttagataacgagcttttgaatgcttctttgatttcacaatcagtctcttcgtatctttggcgggatttgttcactcggacatgagagagaagaggtcaagctctagtaaagactaaagactgcgtagtggcaatcggatgtaatttcatgaactttctcgggcatttagacaataaatgcgtaaagcccatgggccggcccatatcagaatttaacttgtggggtagaaaaaaatacaaataaagaaatacgaagaggacaatacgaaataaatttgaccctttcttcattgaagactagtgtactttttcttacattaacaaccacatgcatatccccatgcacctttatatcattgtgaaaattattcgatattcattatataagttctgttctattaaaaatatgaaagaaattaagcacattatatactactaacttctgtcagattccaactgctgaattggtctgtcttttaactactcctgactctatagtgtataccgacacatctctctagcacttgcactagcactagcaatagtaacaacatggtttatttgtgtgtttcctcttcattcattacaatatcattactactcttttgttcctttttattacaacttactaataatagccattagccagccaccttatgcaatcttatcccttatcacgtatatagtttagtccaaaacgttttgttttgctcaaataataattcatgcataaaaaacaacaaaaaacacacaattatacatgctgatcataaattgtattatgagaatttgttaatcatttggtatactaacattgcaattttacttgaatatttgccaatctacttcttttatatatacatacatttattgacgtacgtatgattaatttgacgagtacataatatgtaattgggttgttgaagtgcacatgcagtcatgcagtcacacatacatatatacgtgttatgtatgtgtatatagttgaattgtttctataaatatggacacacatacactagctttctaatatagtaccaactccattgaatgttaaaactcagaagaaagtggagtgatcatataacgacaatgaagaatctctttaacttgttccttatgtttttctttgcaatgccaattctttcactctccgagaatccaaccaatttcagcgagagttgcgaagacgggagtggagaaaccggttcaagctttggcatagggttcgatttggttcttgattttggtttataccggaatagctgccccgaagcagagtctatcgtctactcgtgggtggaaaccacggtgttagaggatccaagaatggctgcttctcttctccgtcttcatttccacgactgttttgtcaatgcaagtcacatctcatcttaagtttgttttaatagttttggtctatcatctaatccccgtcttttatataccattgaaccgggaaggattatattatgttagttaaaccgtgacaaatctaaattgtaccggttaagtagggaatgagtactacgaaccagaatgtgtttttgtttttgacttgcattatgcattgcagggatgtgatgcttcggtgttgttagatgacacagaaggactggttggtgaaaaaacggcgcctcctaatctaaattctctacgagggttcgaagtgattgattcgataaagtctgatattgaatctgtatgtccagagaccgtctcatgcgcagacattcttgccatggctgctagagattcagtcgttgtggtagttatcatcatattataaagttgatgaactcaattcaaatcgtctatgtttaacatttttaaatcgggtttttgaagtcgggtggaccaaggtgggaggtggaagtaggaagaaaagacagtagaacagcaagcaaacaggcagcaacaaatggcttaccctcaccaaactcaaccgtatcaactctcatctctactttccagaatcttggcctttcacaaaccgacatggtcgctctttccggtatacattctcttgtactcttctttatctttctctagaccaacccaagttattgatacttacacatatggaaaccaggtggacatacattgggaaaggcacggtgcacttcgtttacagctcggttgcagccactgcaaactggacaaccagctaaccacggagacaaccttgagttcctcgagtcactgcaacagttatgctcgactgttgggcccagtgtaggtatcactcagcttgacttggtgactccatcaacatttgacaaccagtactatgtaaacctcctctcgggtgagggattgcttccatcagaccaggctttagcggttcaagacccagggacaagggcgattgttgagacctacgcaacagatcagtcggttttctttgaggattttaagaacgctatggttaaaatgggagggatacccggtggtagtaatagcgagattaggaagaattgtagaatgattaactaaaaataaaagcccgacttattgaatgatatctaattatctatataaaaattaaagaagtccacctacgtaggactctgattttacgtaatcattagaagagcgaacacatatatgaagatcaggaaactacaaattgatagatctctgaaaatgacaattagagttggattttgctaagatctagtctcattataagtgatgagctatctatgaatgtacatattctatttatataattatatatgactcctaatctggatcaaagtttggtttacccagctaagttactactagtaacacaacatgagacataacttgcgctagctatgttacaacaggccattgtttggcagctcttaaaatgaaaaaggaggagatatctgattagagaaaagatagaatgcagatggtctacgatcgcctatctattataactgaaggggttaactaaaaaaatcagagactaaggacactaccattgctgcttttcctctccttgactaattagttccagaaatttctatctagctactgagatagtttagctcctcgtctcatgtacctgaagtagagtatcgatcaacacagaggtaacttcaactaaagaaaccacatacattggaatgtgtttcggtatggagaaaatacaagagagaggagagaaagggtagatatgaacctcaagctttattcttccacatgagttcttggggagattgacggctctgggaaaaagagatatgattgtaaagagaattaaggaaaaaaacggtttcaacgaaaaagaacatctgaataccaaaggacgaattatgaacagagagaagttctgaatcactgataaaaaccataactacctgttgagttcttgatatatcattcattgaagcagctcccacgggtatatgtgtccgagcataatcctagacaatccaaacagaatagaaaataagctctgcctaaaccatttttaaccaaggaaggaagtcatatcactgatgtttctttttaaaatgacattaaatccaagaactcattatgttctgtgattaaattcaaaggtacagaaggtatgggaaattgttaatacaaaatgagatatatacctgagcattctgaccaattcctgacataggaaactgcattttccagaaaagaaaaaaagattttcaaccagagaatatacgaatcagatgaagtttttgttattctgatatgttacaaaaactacgcatcagaggaagtcaatgttgtaactgagaatcaatcagttcaatgaaaaataagtccacagattcagatatgtacctggctattttgacctactggcaatgatggatactgcattttagaaaggaaaataggcattcacgttagagatttgttatctgtatttcaaaatgctggcaaaaccatggctactgaattttactttaaggtggtcaatctccttctaccacaagattagcatatcaagaatcaaatcttgaaatgaaaaataagtaaacagattaaacagatatacacctgagtattatggctggcccctggagttggatactgcaactccaaatgaacaagagtaaatatgcaaattagaaaccatgtgacaaaaatatttgaatgtaaccagcatgaaaacgaaaccaaccagtgaagaataaaacggctgctgtaattgctggccctgatattgctgctgaacttgttgtggttgttgctgcaacggctgtaattgggtctgggactgctgtatagttggcttctcttgatgttgttgctgtttctgttgctctcgttcgaacactatcatttcctcaggtttttcccactgcaaaagtgaattatatacataatatggcacgtactgaaggacttcaaatataaaatatacatgtgtaaggattatcaatagcacaataaaccaggaggaatactcctgaaactcacaaggaaatatattaaagaggaaccacgtttctcaccttgctttcacccgttagaccattgtaataatatttaaatccatcaggcgaggtatgctcggtccaggtacatttgacagaacctacgctctgacttactgcaggtgcagctgtttgcacatagctcactggtgtcgaaccagtggtgctagccactcttggaattgcagatccagcccactgataaagaagcagccgagaggaacattagaaaaggggagaatactaaaacacatgaaggataaaaaacgggatgtctatcaggaaataattttaagttaaaacaacacaatagcagctgaagaacccgtctgggcagatgcaactgagagactatattcatacctgttgtttaccagctcggccattctgtgagagtggtaaattttggtttggttgctgcatagactgcacctgctgctgcagctgagaaattgcttgctgagacgattggaatgttgcttgtagactctgagtttgctgcgacaagagctgagctagctcagaaggaggatgttgcatcttttgtagcggttgctgctgggaacgagggggaaattgaacagttgcagaagacacagttgttggccgtagattaatgttcaaaggagtttgaggagcagttgcacgactgatgttttgctgtggtggcagctgagaggtaggcaactggctgctataagcataaggattctgcaagggtgcctgggccccagggaaattagtttgcggacggagggggagagggagaccctgtggactgtgaagaggtttttttaatggtgttatatgctggccagctgcccgattttgctatggaatagaaacaattgaaaatccaagttaatcatcacaacattttcagatttgcttaattggaaaaatatagctaaagtacctgttgcaatgtggcagaagatgaaactccagggactgggagagggttaaggggaggaacaccataaccacctaacgggccaccctaacaatatagaatgttacatttaaaaaagctcacatcagggctagaaattattcaaaaaaaaaattgcctcagtaactgacaaactgcaaattaaggccatatcatttgagcaacacacatcgtgtttgttgcattatatgaaaagttgaaaggtcagaacttcatgcttcttttcacctgtcataagcccatgtgtgcagtatatgaagtactttctttttatttgtctcgcacaatacatgcaaactctatgcgcttacttatatgaatgtgcagatttaagatgatatacatgatcatcaacctgttctcacctgatttgaaggcaatgttgcttgacctggtttagggggaaagtcactaccggcaccacggatcccagtgttactaggtgggcctacgtttcgtgaagtagctggacgccaaggatttgtgtggcttacatccccactagagtcaccaaagttagaggtaggcctaacaaatagagatgaggagaccggggtaagtcaacatatataattacctaatgagcataatcatgatctcctttcacaccagttaccttggtcctgaagcttgaaaacgaggccctgaaccaagtccaacaggaggtgccatttccctggaaacagaaactacttaaggatatctagaaagcaatgcttcacattccagtaataactggagaaggaacagggttcccaactctccaccatgtccaaaagattctccacaaatataactcagacagaacaaagaatgaaggtatatacaatttacttgataagagtattaggattaatcaaaatatagtacccaaggcattaccttgactcgccaggtttaggcctctttggctcagcaaaccgaacaatcaatggctgattgcaaccctggggaaaggatagaggccagtaaacaaaacaggtccaaagggtgataatgagagaaactgagatacttatgtgattcacagcttactctcatggtataagttccgttgagaccatcgatagctgccattgccgtctctttgcttgaatatttaacaaacccacatcctacaaagtgaaaaacacagtttcaccatctcaacatcatcacacaacaaataatttatagaatctagtacaaattacaaaacataccacgactctgtctatattcatcccgcatgagatagacatcttccacatgaccaaattgtaaaaagatctgttaaagcaataacaataaaacagtttgttaaaagattacatgagaaattgaaacacataagttgaactgggaaggtagccgttcacatttattaattttatctattatgacagtcaaacagttggatcaattggaagaagagattacacagtaagtagaatgtccaagcgcttgcattattgacacagattttctagacactcaccctttggtaagactaacaaaatttatcaaagagtcatttaaaattatcaactcaggtaacaggggacacaataatatccaagtttagaactcttccctgttccgttaatctgacataagtaacaacttcaaaaagtaagatacgaaacatacctcctcaacttctttttcagtggcttgcttgtttagtgaaccaacaaaaagcttaaactctagggtgccttcagaagaagagaactatatcacttgatagtaaggcaaagaaaacagggaaagaaaaggatcaacatccataaagttcatatcatttcccacattttcttaatttttgtaatctgaacttatgcagcgtatggtcttggctatgaacactagacaatgacagccacattagatactctgtgtggaagttgattacctatgcgttctctctccccgtcagcatatcgaacttgaacaggaccagttccctgggaatcaacaaaattataaaaggtgaaacaacctatagtttcctgttcttgataagagaaagcctcagggtaattaccccaggaagagtgatctgattgtgcagtgctctgatggctctatccgcatctttcgaagttgcatattttacaaaacaacagcctgcattaaagactgatacttaagctatctgtttcagggttcaacttttccttctaccatcaaattgtactagtaacaagatgtactactcaaagcacataagttcagtaggaaaatcataagacatgtctgacagcctccacttaaatattgatgtaaagttgttggagagaataaattaatgtcttcaaatggagaatatggcaaaaacaaatattaaaaaattgaacacagtcagtatctgcagataacatatctacaagagggcctttcagacaaagggtggctgcatttgtccaagcaggatccatttgaaagaaaatctagaaacatgtacaagttaattagcaacataaaacataactataggtccaaagtaacggattcagtatgtaagaatctcaataattgatgagtagcggataatcaaaaccaaaacatatacacattttcgtcaccatacatcaagcatttgaagacttcaaataaagaactacagttatgggcaagataactcattggaaaaaaatctaattcagaaaagaatacgattgcttcatgtaatacataattaggcccctgcctgatgctgattgatcaagggcaagagagtgaagtcaacatgctgtattaacatcagaaactattctaagaaactaaaacaatcaggttccttccatatgtttgcaccacctaacataataatatttcacaaggctgaagaaagagttgtatggaatctagtacattcaaccgcgatcaaaagtgtttatgtcaccacaatcagatgcatttgttctgccatccacaaaggtgtagcagttatagaaataataacttcttggaaagtcaagaatttataaataactatgcacgtacaaacacaccattcatcgtctagtatttcttcacactgacaaaatagagacagaactaaatggagtagtagaacaggaaattcaataataaaataacagttgcaccttgcaagcacaaaggcttgattagcgaaaagggagcatacaaaaaaaatctatcatcaaacatttcttccacataaatatcgatcagcactgcaagggccaccatacagacataagagctactcaacaaaatattcattcatctatgacgagagatggtatatcacatcacaagccatccaaggaatagagacgtgggaacatacaaaatacatacataagaactactaaacaaatcattcattcacctatgacgagagatggtatatcacatcacaagccatccaagaaattgagagggacgaccatacagaaagcacacatttcaggccattcaaagagagtggaaagaaatatagccatcatagttcctcaggccatcaacaaaagaaaaggagaaacgcattcattccagcatcactcatccaaaaaggtaaaaggaatgccatcattaaccaatagacagcacacccataaattgatatgaaagaaaatgaagacgccaaacctccaacatgataaaattagaaagacggccaaatctttgaccagcaggagtggcaaatcaagaaaccatcttttgaacctcatgtccttatcaaactaccaacttaaaaaaatacattcatcctgtcaagaccatacacaacatcttcaatccatctagaggaagagtaaagaaaatgaatttcaataggagaggaaaatagcgatgttcttataaccaattcccactataaaggcaacagcaaaattcagttctctgtacattaactccaactctaaaacaccctcaataaattctacacttttcaaacacatctaaagttctagaatacacacaagtagcgaaatctatttgcccaacataagtacataaaccctttcttagcacaggtagccttcttctgtgacagaatcgaacacagataagacgctggcaagcataagcaataagcccgaaaattgttgcaaacaattggaggccaatgatgagactggggttgcttcccatcagccttttcagggagacctgaaattttaaaaagtataattcacgactatttcctaataaaatggagattgacataccttgctgctgtccagttctcttgtccttgatcagagcaacctccagaacatttccatgctgttcgaaatagggacggatctacaatatgaaaaccaacagaaaaaatttagaaaaggttctcagtaatgagtatatagataacaatgatttccaagattaactcacttcttcttctgtagctgtccttggtacagatccaacaaaaagcttgactgtactgctacgatcagagacatctgcaaatcaaattaaccagataaggatacacatgaagatggcatatagttttgattatcacatacatgggaaaatcgaaaggatcctctagagtcgatcccatgaaaaaccttcaacaatacagtaacataacaaccatactacctttcaatactctaatcattgattcccacaaaaataagagacactcaggaaccttaacagactacaagaataaatatacatagaagaaagaagagtgaactcatgcttaccagttccagtaaagctgccatggtctgagataggataccctcttttctgaccggaaagaggctgctggaccggcggtgtagtcggtcttacagaataatcagactccattgctttaccgataaatctcctcctgtctggactctctgaaggaggatacttcgcgggatagttataccgagctccaacaattgaccgtgtcccttctcctcccacaccaccgttaggacccattggacgaaaaccatcatcgtaggcaaaccccataggccgaaaacttccaccatggtgaggacccataggcttaaaatctactctatctgggggaccattcatctgccggaaacctccatctccgggaccatcaaaatccttaggagtgtcatcttcccagcgtcgaccaccattacctcctcctccgcccccaattccaattcgataattgctagggctgcttccacgacgacgacggtggcggcgaaaatcatcatcatcctcttcgaagcgtgaatctgagggacgagatggacctctgggatgggctcggtggttatggtaggaatcctcgtagccgccactctcatggcgatcccttcggtgtctgtccagcttgacgtagtggggaattgcgattccagtcgaagaaatcaaaggactaggagccctagaaatttgggatctgtatgaaaccaaagagagaagaaacgagtatcgaagatgatgaatttgattgaagatgagatcaatttagttgctcgaaattttgatttttttgtccgaatgtaaaaaagaaaaagcggtctagttacggtaatagtggttggaccggtgattcagttgaaatttggaccggtagactttattgagtcttggctgataacggaaaatacagctacttgggccatcaatatatttatatactgccaaaagggggatacaattgttccaatgagttttcgttaacaaagggaaaaaaattgacatttcaggtaactctcacattcttaagtccaatccaaaattctcatgtcaactatatgcttcagaaacattttgatatagtacatgcatttcatggcgtttattaaatcatgtgttgggtgatcaataatataaagttctaagtaatgcaaaatacttgcatcactatatgaatttagaggatatatgactaggtctgaactaccttttacctaaaataatcaaatgaatatttactgttcgtctccttcatcatgagtcactagattcatgagtcaataatcaatggctttgtcttgagtcaagttaatcgtttaacaggtttttaatggtttgaaagcaaaaagaaatcttaccactatatataagtgtaaaatgtaatctctatatatcacaaacacaatattgttatttaatctatgatcttattatctcaggaaattaatctaataattaaatgacctataaataaagaactaaaacaaaaaatctatcattgatgaaaaatacacaaaataagagagaaagttaaaacaaatgttttttattatttcaattttttttttgccaaaaacaacaagatacatgtactaaaaaattacccaaaagcaaaaatatggcttcaccatccaacttcccattttcttgacaatacatcttcaccgctcgctgaattccaaagataaaggccatcagtttttgcagtccaaatgcaattcttccaaccgcatctatggaacaagataacatcatcccaaaacacgtttacattcatatgaccattatctttgttcatatagcaccaaaaaaaagttgagtgaagcatattttctccgaagttccaagaaaatctatttctaaacttcagattaatttcacctagatcatcttctttagatttacaatggatgaaaagagtttcaccagttgtcaaaccgttaacaaccgtgacttgccactcagaaatcttcgggactataatgtctctcgtggtggtgccgccgactaagacatggtcttgacatgttagggccagagaaaagcaaattgccaagagaaattgtttgatgcaattcatacttttttcaggcaagcaaaatctttagggagaacttttttgttacttctttttataatggaagagtgaaacggtaattgacgtttaattaaattttgatgttattacattgcattaatgaagagtcatgctgcaaatcatttaagtgattgcatgttaattagaaatgaagctgaaaggttagtacatataataatccaagtacgtagatgattgtggcataatatattaagattaaaaaatactaatttatattgtggtgtaagctattagttttgaatttattatgtgaatcaattttaaaagttattagtttttagatttagattatgacccaagaattcgaagtatataatcgaaaaatttaatgtataaaaataataattcaacatggtcgatcgggtatttatttctagtaaaatagtatttcataaacctaattttagttaactatataaattataacactagtaaagtattctgccttttacgttactttattgggattaataaaaatatattggattcgttgaaatccaataacaaattgtaattttgatctttgattcatagaaacaaaaagttacgaaattaaagaaatttttaaacaaaagagtactcgaccagaaaaatatgtttttttttctattttctcactcatatttttcagatagagaaagcaattttcagtacaccgaaattaaaatccgacgactaaaaatagtttcttctctctctcaaatccttctgagaggagaggtttcttgtcgatggagtttgatttcggttttgtctggaattttatatatttccgtgtatatacaaacaaaataactgccgaccttttatcggatttccgttattagctttgttcgatttatcaaaattttatatacttttgtgtatatacgctctagcgaaattgatctctcttccatctgtgtccgttgatgtctccgtttttcttctaaatcttatacgatctctccaattttttcgaggagtaacatctttgtcacttccttttgctaagttcatactacatcaagttaggtgtatatagtggtggagtttcctcggagtttggtgttgttcgaagaatttcgaacaatctctttcaatagatctagagattaattgacggttggtttggaactgagatcgttagaaaggaggaagtttctcaaaatgacttcattaagcaaatgctttttctttgcattcttgtgtttcattgctctcttgactccatgaatggcaaaattaaattacctaggtgattatttacgctatcctacagatattttcgattttttttgttttgttttgttttattaaatattatgttttgataaatttagtttctaatttactaagcactcactcatccattcaacaaattcaacaagtattcttatttcttagtgtcaaagtacttttcttatcaaccttatcaacaatgtatcacactcacactcttcagaaataaatttctatcctaaaccaagtttaaagatgataatgttgagattatataaaccagtaagtatatggttaaagtgaaaatagtgctatatattatttccttcaacataataccgtagtttctaatttgattttctaagtaaatctaaattgaataaaaaatttacttttatcactaattttaattttaactttttataaactagatatcttttttggtaatatatttttaattgtaaatcattgactcatattttcatttacctaaatactaaaccaaaacaatcttttcaactatatattttccccatgtacttaactaaaatatcataaacaaataccatacgcagcgttttgaagcatacgtcgcatttctctttaatcgttaatttcctgatttaggcttcaccaattttttttttttccctgataaaaattttagcttcaccaccaccattgttcgtttgggtgttttgaacattgatgaatcgttgcttctgagatctcgacgaagataaaaagctcttcggctacttcaggtaaatttcaatttcgatttctgtatcaccaatctccttgcgaatgaggttttgtaaaccctaaatccagttttgaacctctttctctcttccctagtagctctctttctctatccactaattctagcattttgcatcagtattcctctctgcgttcatttctgttttgatgtatgtgattgccctaatcgtcttggccgttactcatttcgttttccttttactctggttctaggtttcgagctcactctgctagaaaccctaaaaatttgattttgtgaacttcccgtggtaaatttgaaagggagatatctcagaacccctaccaaggacgaatcttgatcagagcagacttgatttttgaggtgagaagcttagggaaagttttgttaattgtgcgttcgaatttgagagttttgatagacagtgtttacattggaggttttagattgggtgtaaggaataagtagataggtatggatggtaaggagaagaaatctggttccaagagaggatctaaggtttttcagtttgacgatgatgctgatgatgatgaacctattggatctctcttagagattatgaagcataaaagtcccaagaaggataaggttgagacagaaagtactggtaaacagaggcagaaacaggttgtggaaaagaagctgagtgctttgggcaaggcttctgaagatatggatgacacattagccagttttaggaagaggttgaagggtaacaagaaaggtgttgaatcaggaacctcaagagttaggaaccacgagggtgttgatactgtaacaaattctaatttgaaaccaattgaggaagccaacaaaaacgaggtgcagagtgtattacttagggaaaacggtgcttctaattctattcaaaaatgtgcttcagaaactggaaccctcttgcataagttttctggtaaagataaggcagcctctcccagtcatgaaaaagtagaaacagtatccagtgagaaggaagcagatgtctttcatcaaattacaaaggaggaatccgagataccaatgtcagagaaggctgtggagctatccagggtgtctgtccccatgccagatgtccatggcgaagttaattgtactattgctcctgataaggacatacacttgggagagccaacttcagagtccggttattaccgagagaagaatttagttatgtgtgattgtggtacccaatttaattttgaggatcgttcctttgagtctaatactcaggttactctctgtcaaaagtgcaagtattcttcacaccataatgcttctaatggaggtggtattcaagttaatactctagaagatggaactgctcaagcttcgccggtttctataattccctgcgaagatgaaaatttccgaggggatgcaatttcactacctaattctgggaagccatcgaccttgcaacgcccagagcgtattgctaaaaagcgtaagcttggaaacatggtgtatgaaggagacgtgaaatgggagaatgagcaaggctttcttgattgtcaaagtgacaagtcctttaagggaagcgacaagtgtggttttgttccatctatttccaaggaaattgaaattggtagagcagctgcggtaacagctggacttaaagcccagtcagtaagtccaattgagaagattatacttaaagaggtgttgaagcgcaaaggtagcaatcaggagtacctagtttgcaggttagtttcctttttgtagctgttatgtattcaaatacttggtttcagtgtttcttattttgtatagaatgtatttttattacgatcttataagaagggtgtactttaagatgtcaatcccatttttggcttcctccatttgttggaaaccttgaacacttactgtactgtatgtttgcaatgaaactaaagaatttttaagctggtttttgtccattttgtgttcaccagttttacttggaacgattttgttattctcaatattattgtttttgtgtttcattcgtcctcctgaagatcttaattccccctgttttgatgtaccagaactgatagctgtattgatacaggaactctatcttaggcctgtggagtaaaaatgtcagccgaatcttacctgtcactgaatgtggtgttaccggaggcccttctgagagtgaattgccttcagcttcccttatcagagaagtctataagtttcttgatcagagagtaagtctttgctgttatatttgtgtggttcgatcctgtctcctattaatctttgtgtttgaatttttttttcttaagtttgcttttaatttatatgcattattgaaaagagaatgagtgctggtttcttatagaccgcatgtgaaattgcgtttttttacagggttatataaatgctggaatttcatctgtgaatggaaaggcggcatcttcgactaatcaagactatgatctcctccaggggagacagcttgaagaaagttctatggcttctgttgcagattctgaagagggagttgcttttatccttggtcaggtcaaagccgttgaatcaactagtgagggtaagaaatgtgctctccaaaacgatgaaagggacttggtaggatgtgcgacctcggaaatgttggaatctatcagcaaaaaatgcgaagcaagcattattgatgataacaaacgttctgtgagcatgaatgctttacaggatagtactgcatctaatgttgaaaagcatcctgaaacattttcagtagcgaagcctgctttgtctagcacactctcctctgcacatagtaatcaaatgagaggaagggactgtgttccatgtgaggttatagatgagaagaaagttatagtaattggagctggtcctgctggattaacagcagcacgtcatttacagcgccagggtttttctgtaaccgttcttgaggcaaggagtagagtaggtggtcgtgtatttacagaccggtcgtctctttcagttcctgtggatcttggggctagcataattacaggcattgaggctgatgtgccatctgaaagaatgccagatccatcggtattggtctgtaaccaattaggtctggagttgagcgtgttacatggattctgtcctctttatgatactgtaacagggaaaaaggttcctgcagaattagatgatgctctacaagcagagttcaacagtctaattgacgatgtagatttgcttgttgaggaaataggcaaggaaagagcaaataaaatgtctcttgaggatggtctagaatatggccttcaacggctgagaatgccacatgacaaggtgaacattgacaaatttgggcttctcaattcaagctcaaaaacgggcatcagaggtccctttatgcaggatgaaagctggaaagatgattttttgaatcctttggagcgaagagttatgaattggcattttgctcacacagaatatggttgtgctgctgtcctcaaggaagtttcgcttcctcactggaatcaagatgagttttatggcgggtttggagggcctcatgctatgattaagggtggttatagccgagttgttgagtcgcttgcagaaggactggacattcacttaaacaaaatagtttcagatgtatcttatgtctctgatgtatctgccatggataacagcaagcataaagtcagagttagtacatcaaatggctgtgagtatcttggagatgctgttctggtaactgttccacttggatgcttgaaagcagaaactattaagttttcaccacccttgccggactggaaatatgcgtcaatcaaacaacttggttttggagttctaaataaagttgttttggagttcccaacggtattttgggatgatagtgttgattactttggggcaactgctgaggaaacagatctaagaggtgagtgctttatgttttggaatgtcaaaaaaactgttggtgctcctgtcctgatagctttggtggttgggaaggctgcttttgaatatacaaacaagagtaagtctgagcacgtgaaccatgcaatgatggttcttcggaagctttttggtggggatctggttcctgatcctgtcgcctcggtagttactgactggggcactgaaccttacagttatggtgcctactcgtatgttgctattggtgcttctggtgaagattatgatgtattgggaaggcctgttcagaattgtttgttttttgctggtgaggcaacatgcaaagagcatcctgacactgttggtggtgcaatgatgactggagtccgggaagctgtgcgtataattgatatacttagaagtggaaatgattacacagccgaaatagaaacactagaaaaagcgcagaggaaatctgtacctgtaagggatgaagtcagagacctaataaagaggctggaagttgttgagctgtctaatgtgctagccaggcaatcattgctacgaaacatgttcttctctgccaaaacaactgtcgggcgtttgcatttagccaaggagttgcttaacctacctggtgaaaccttgaaatcctttgcaggtacaaaagaagggcttgcagtgctgaactcttggatcctggtaagctcagtgagatagttttttttaccaaagcactaaattcaacttactttcgcttatatgttttgttccacgaatttctattggctattttacatattcttgcttatataaaattttctgttaggattcgatgggtaagaatggaacccagcttttacgtcactgtgtacatattcttgttcgagttacgagtgacctctttgccttgaggctatcaggtattggtttttcttccaagtacactttttgtcccaacctaatatatcacatgcaatcagttctgtcttaagactcgacatcatgtgctatctgttttgggatttcagccctgtttgattttctctaagttggttactttccacttgctgatgcaggtattgggaagactgtgaaagaaaaggtttgtgcacacacgagccgtgatattcgtgccattgcaagtcagcttgttaatgtgtggctggatctataccggaaagaaaaagctaatagtggaaagaaatcgttgagacaagcgaatactacaaacaccccctagaataagaagaaaactgaatagtccggacacagacagtaagggaaagctgagcaatggcaacgatgtgaaaacagatgaagagtttgaggacaaccagctacctatgtcagaggaagagaaggctgtgtttgctgaagctgaggcggctcgtgcagcagcagaagcagctgcaaaggcaagttttttttaatctctaaattagtgaaaggcatttatggatgcttactgaatgtttttgttttctctgaggccgttaactctttatttatctgtttgttaacgaataaattatatgtttctgtcttgcaggcattttctgaggcctatcataatacttcattgcagcttcctaagatcccctcatttcataagtttgccaggcgagagcagtatgcaaagatggacgaatctgatttcaggaaaaagtttcctggaaatgtcttaggaagacaagattgtatgtcagagattgactcgaggaactgcaaagttagggactggtatgattttcctgcctcgtgccttgaccttgacagtgcaaggattccagttgataactattcacagcctagccattcgaatgagcttgtatctcattcgaagttcagagaatgttctggagaaagtgtggctgcggataccagtttcttaactggggcatgggttgatactggtggtagtagcgatggtttcaaggattctcaggctatagatagatggcaatctcaagctgctgctgctgatcctgaatttttcaaccgtactttgcatataaaggatgaagaagattcgattgcttgttcgactggccctcctagttggaagcatgaccaacgagcgaatgaatgttccgtgtcacaggttacagtgaataaagagccacattaaaatcatatccggagtgcagatcgtttgaaacagggagttgtagattttgttgcatcgttgcttatggccccgtatagagcaaagaaaattgatagagatgtatacaagtcaattatgaagaagacagcaacaaaggtttgtgactttgtggttttctacactactatattgcgtttcttgtttctacttgaattaagaaaatgagtcttctgaaactcttgggcatttatcaggttatgcaacatacaacagatgtggagaaagctatggctgttacacagttcctcgactcaaagcggaaaaataaggtttgtaaatagcttcaaaagtttcagagttttcttttgccacagttattgtctcctaagtttctagtttatccctctctctggtgtcgacaaaaatgtcaatttagataatcttggtcacaggttctcatagtaaatatcactatatatttgttatctattttagaacagtttctgattgattgtccctgcatttgattaatataatatgcagattcgtgactttgtggacaaacaagttgacaagtacatggtgatacctcaagttccaaaaccttgatggtcactggatctttagtaatggccaatggtagttaagttggtatccgctgggatggcaaagcccatttgtagagaccacatatcaggaagcttatgaagcagatggtctgatgtaaaagagactttcccatgatttgacataccaaaagattggcagagacgagtttttggcattaccagatatgatgaagggtcttgctatattgctaggtatgggtgaagcatctgctctcctcttcctgggggaaatgtttagaggactttctgatcaagcttttatgtcaagtggatatgtctttcatgagttatcccctcggatgatgcatgttctcaacttacactgattgttttttagtaattgtatagagctcaagatttagtgttaacccccattagaaacaattctattttcaggtatctgaattcatttcttgagattcatgtcatttctggaacccaagagaaaagctttttactttgtaatgtcaatgattatatagcttgagtcaaataatgcgaatatggatcttatgttctgatttgcctatactaacagcagccatttggtaagttcgtccctatctttctgaagggaaaatcttggataccacagctgcaggtgtatcactttcactcttgcaggtaaagatggattgtcaaaaaatggaaagtaacgattggttcagctcccaagcatttaagtattgtgatgttcttctgatgatttaagacttacaagcagcttgtggaagatgcattgctacgacgcaggttatttgctttgtatgtgtttcttctgcctatttttactgatggctttgttggcaatgtggctgaaagtttgatgcttgcttttacaggtgaggaaaacttggctgaattcactttcacccatgttggtgagagctggaatctttttaatcaaagctgcttagatagataaataccttggctcaagaatctctctccttgttgatgggaggtacatttatgcttgcattgttttataaattgtcatttgcatttacatttgtcaaggatcgtaattaattaattatgatggcttcatatcaccaattcaattgctactgagtttaaccgctgggtctggtatttgcactgtagtctctgaatgtttcatggtttaaatcgtgagaatcatatgccattgttcattctataatgttgccatctcaaatagatgagcatacggcttgcaaggacccttcccttctccttcatactgagtgtcttctgagccatccttcctttacgactgttaatctcaaatctttattttttgacaagtcaatttttactcattgtaacatctctatcattatgatttttgtattaagcaaatgaaagcattattgaaacgttcaagcattcagcttctgaaaacatagcgactaggattcattcagtttattattatttatcgtttgtgtcttttgagtttttacagccactattgtgaaaccacttttcagccgtggcaattggcgtccacatactcattagcataaacttagtagagaagagcatcgaggtttcgtttaccctcaggacctttagagtaccaggaagaaacatattgaccatacacaacttccttgtaagacggtggggagagttgagaaactggtgctatccttgcagtcttggagggatcatgaaaggtagcgactgataaccgcgcccgattcgcattagtcacagctctatgttgagcacttttgtatcttccattggtaatgatctgcacaagaattttaaaagagcatgtcagaatcttctctctagcttgcattctctatcaaagagagaatagaaacctcggtttgatcggcaataagaatgagaatagcatcagagataggaggaacagtgagccattgagcatccttgtaaagctgaagaccttcaacatcatcttgaatcaagagagtaatggcaccaaaatcggaatgagactgaagaccaagagtgaggtcaggctgaggacaaggagggtaattggttacagtaatgttctgatagatttcacctactgcttcttctatagatgaacaaggaagacccaaactctctgagattagccctaatagcatctgagctagtttcttcatctcatcaccatattctccaacaacttgtctaccaatcaaatcaaatcaaatcaatcaatcgagagatgttacattttgtcagaactaagaggtgaatcaaaaggagcatgaacctgtagtcagaaggatgaatcggccaatgagaagggttacgacgagaggaaggaaacgtgtgatgatcaaagtaatctctccaatccaaaacgacgtcatctttagcaccaagcaacatacggctaccgtaaccttcagatgcggcggaggtagagtcgcaggcgtaacgtagcttctcttccatgggagagtcttggaagaaagagagacctaaagacctcatccgatcaaggagatggattggaacaccatggttgattacgtggaaggctccccagtcgcgacaaggtcaccgatggcttctctcgcggaatcggagctcgagagatcgacggttgggatcgaagcttcatcgccgtggtaatgggagattaggtcgagcttccggttggctggattgtactgagaaggaactccggtaagttgcctttaacaatcagttccactctcgacgctgtttccatggatgaactgattctgatctgaaattgagcggaggagacttatcattataaaaaaaccccgctgacgtggcactctaattaatatatgctccgtttacttctgagatctctttcttcaatcgagtatcttgagctatctatacgtggtgatacaatggttgcatggtgtaacgccgtttactctctacttaaagagtgtagcatacatcgattttacccggacttgtgtgaatcacttgtggttttcctctctaattctcctaaactagaggttttaatggtcgactccacatttctgattgaacggtcagagaatcatgctccagttttatggaaccaaccgagttctgttcccgaatgcttgtcgtctcatcccacgatctttgaatggaaaggatatggaggaagagaagatgaaaaagaactcataagatacattctggagaactttaagtgtttaaaaagggcggaaatttcgatgaattcaacctgcagtcttgaaaagaaacagaggatgattgacgagttagaatctatgcatagtgtttcaacgtctcttatgtgtcacttctttgcttaaacgttcctattgagactttcgtataattaactttgcctatttttcacaagatgatgtttctaaatcctaacttctttacgtttatcaaacttatgttcgtgtaatttcacatgtgttggcaaaaaagattagaagtcagataatgcagatgcatcataactaagtacatacaatgagattagataacagaaagggcaataatccgattttatgaaacttcaaagttatataaaaacaatttgccaatgaacaaagcagagagaggttcattttctcttcaaggagtgagaaccatattattgcacttacaatgtctgaagacgtgacccatgagtgacttaaccgatctgctacccgaaactacagcgtgagtcatgaccaattcaatgtcacgagcatcagcaccggtctcaccaacctcctcttcatcttcttcagcttgtgcttctactgtgactgttgattacttgattgccttctgagatgtcgcaggcatcctaaatagttgagcggcttgtgtttgaagctgagagagctcatgtcctcgatcgaatataacataagcttctgaattagaagtcaaccaattgtcatttataatttttttctcacttgttgtcattaaactaagaattacagaaatgataaacatatagccaagccaaatggtggaagaaaaaagcacaaaactcgtaacaaaaactgacaaagatacactaaagttcggataagatagcagggatgtaatgggagagttctgcggtgagagactgaaatccattgacaagctgagtatggaattcctgatcttcttctccgattaatctaaagtgaaccctaatggctcgcttacaaaccgccatgaattcaagcagtgccgcgattagttgctgcagttcctgtgaacgcaatctcgttgcaggctctcctgataagaaagctgtgcacacgctcaacaccccactgttcacctgcatatttccatggaaaggcatatgatgagcatttctacgttttacaacacaatctataacacagatattatgggagaaaaacccacctgcactgcaacacttccttggagaatcctctgcagactttgaagccgtggtaggtgatccccatccgagctacgaggctcctctagctcatttctcagagcggttgtccgcgtttcaatcattccaatcgcattctccactggcgagaattcaagggattcagacttggtaaccaacagcctattcacaagggcagggaatgaaccctcagtctgcagcactgttcttctcttccattgatcttctaatccaccttgggttttaccatttttcgtaaatggtgtgtcaaattagaaacgatcaaacactcgtgctcgaacacttccagttgaaagagaaaatattctctctcttctgctcccaagatcctcatcttccatcactgcatcaacagcagtaatttgcagatagcacactcctgcctgcaagtcttctgccttcacttgcctcgaatctggtataatgtgcagaatatggttgctgtccattcttgactcatatatatggctcagtttttccattatatcccctagccgcacatctcgtggttctcggtatacatattctttcctgtccaacttcccaaacttttccccataaaatcccacccggtaatatgtagcatcaataaatgggattgggtttgattcttggtcaagaatggactcgtatatattagtaagtaaagtgtgacacttagccaactgcccataagccttcctgctcttgtaaactggaataacaagttctaaaatgcttgcacaaaaatggtagagctcagcttgagagaaaagcttattagcaagctgtaaatacttgacggcggagtcaactgttagctttgaagcaccataaccctcgacttcagctgcagatgcctctgttgtaaactcgccacttaccatcgggcaaatcttacgcaaggcagacacatgatccttgctccacacaccatcattcctagccaccaaggcctacaaggcgaaagccaaaacatgcacataagttctggaagtagtatttagtggacgggaagacttgattgaagacagcagagcttaaacgccaaccagactgcgagatgatccactgcgcatgtaaaacacataccagatctatatattattacctgcattatcacacctgcaaccgccacagcacactgtgcagcttctgcccaagactgcatttcctggtgggcatcacatagatgcaataaccacattatgtgaagatccggaacaggagcaaacgccattccaagtttgtagaagctctctgcagcagcatatcgatccatagccatcacagatccctgtaataacaaaattttgcattgggaaaatacagaatgacttccaaactggttgaatctaatggtatcacgatatgaactaaggagaaacgtgacaggaaatggtgcaaacatgacagtgatgccacaaaacaggattggaaaacttgtgtaagtttgacaagcccggctgtgatacttattttagatcagtgatgtcaagacagtcattcacagtaatatctgaactcacctattttggaactccctaagattcccaagtttaaagttcaggaaatattaggaaagagaagggagggacaggaattactctctataagcgtaaaattatcttcctattagtgatgagaccatacgatcatgacaggaaatgcagatgtactcggacacactttaagttccatcactgtcaatttccaacttccacaaacaggacattgaatcctttgttatcttagttacctatcagttcgataaaaaactaaaaataggtgtcgacgtggaggaattcgagtgtaaaagacatgacacttccaccacataacaattttaaggaccaatttagcagaagacattttttccgtcactgacaccagcaaaaaatatctttacgaaatgccaagatgattataaaccataccaaaagggcatgcccgaggctggcatcaagagcaagaacaaggctgtcagaaagatgtttgacttcagcccatgaccagcggttctctgtaaatttctcgggaataatcaacagtgtatcatcaggaagaccacactccctcaacaaattgacactcttagcttcatcagccatttcgcttaatgactgttgaagtcgccgtgcttctccactctcttctaatgtattatctgacttcatatgagtcacttggacatccgacatgagttctgacagtgtaatcgtcagcaaagccctcagcctagcagtctgcataaagtatagcgagctctgcaagaacaaagcaattgaattcatacctgatagtaagaaacagagaatctttacaggactctagatgtttcaccttaactagtatttgaagaccaataacagcccttttcctgacactgtcattgcggtaaacagcaagccggagaagatggaaggctatctgttttaagaagcgatcattttccctggccatcagtgtagccccatgaagatcaaagattctgttgaaaattggaaagaaggctttccagaaagctaatgactggtttcgggagaagaaactcgtcagtattgtagtaatgcagtccaatttgccatagtcggtcgcaatattgtgagaggctgccattgatgaaaaattttcagtgatctccaaaacctggaggctaacagtggcacttacattctcctcccaaagttcctggtgagagtgaatgcaattagtaaactagctcattgaagactatgccagcaaaaatgatgcgtaacattcaggacaggcatgaaggcaacataaaactataccagtttttgcctcaaaattgggtgcagcgattctcttagtgcctgggctgaagctccaatccgggaagattgtgcttgagctaaagcttctcttagagaataaggttggctaggggaggccaactgagaattaactctctgccacaggtacccattatcaggtgttccctctagctgcagtaaagattcagaaggcatttgagcgttccctaggtttaacatataataagcaaaaagtgtaggacattctagcttagttttgaggagcccaccaaaagaaagcagcaatgttacggactctagctgaacatgtaggtttttaccaaaaagtagaagagaggaacgagcatataggataaagttagcaactcaccctgacttcttggcgagaagcctctgacagataattgttgatagcaggagaaagtcgctcggagtactttggtgatccagctccttcactaacaggaccacgagaattgttgcccccgaggatgctgtcagcagccttcttgtgctgaaattgtttttagttcaacattatcaaatcaccataggagtggactacaaatacaaacatttttgggtgatactccacaaatctaagttctaattgagtgtaaacagtccccaaatcattctaccacatccagacaactagctaaaatcaaatttcctccaaaaaaagacaaaaaggagtatgatagataacttatatattagttatagataacagtttcctttggcttcctttaacagtgagttaaataaaatagtcaagccttttccaaaattttaagaaacggttgtggaaaggaacctcgaaaagtatgaggcattcttccatgagtttgaaatataatcgagtacgagcgatgctctgctgccatgctttgacaagtgatgtgtcatccagattacgaacaatttgcagcacaccaattaaaacctcacgcttttcagtagcatttaggttataaaaaacaggcatttcatctaaaatctgcaaaaaggaagaaaaacattaaatgtcaagaaaattatcagctgggccttcgctataattgaataaaattagcaatcaatcaaaaggttgttattgcaacaccatttaactcctttcaacatatttcttatttccgtgtaataatggatgcttactgacacaataattgagggaattacaactgagtataagcttctgggctgcttttaagcctcttggaaaataaccattaaccacacaaaatttcaaagcggaagtggattaaaggacttcctaaatgaaagaatttatgcattctgttttattaggccatcgtgacgtacctgcccgacaaaaggaaaatacagttgtgcaatatacagcttaccttcagctttctggtaccgcgcatcaaattcatgcttgcataaaaggatcactaaaattcttgctccctgaaaggataccaaaaaaggaaaacgattcacaaagtaagattcttacatgatatgtatcttctatgtacaaacactttgaatcacatataccttcgcccgcagaggcagctcatcatgatccagtgagagaaataactcctgtattaatatggatgataaatagttcctagaacatacaaataaagttagcttagtatataaagtcatccagatgcgcacacacaaaaaggaagttgaaagactgtagttcagtttaggcttctattttctgcatcttttcaagagctcatatgcttactgcaaaagtggcctctttatgttttatttctatgtgctcaagtgtgctaataaagtgcaaatgtttgacaatgctaaactgaataaacaggtaatgagtatctaggggagagcacctgtctgatgggtctctaccaggcatttctacaaaaagatcatggtcggagataatttgcaaaaacgtgagcttgcattcgtgtagaacagattgacaaacaccagaaaacttgtccatgtataacgatacctgttgagtgtgaggacaagtaaatttatcactatcaaaaatatttgaaagacagatctttcccatgttctaaacttaaaatttgtcccaaacatcagttgaaagatactgagctgcataacgtttttgaattaaaggattttttcgtgaacaatactagcatacaaatttaaacaactgaaaagcatacacatgcacatgattgattagctacccaaccagtttaaaatatatatatcatataaaatattaactcttttgagagaacaattcttgaaaccatgctcatacttgtacaccaaaaaacaaaatcctcaggagacttctcgagaaactcagatgcgctttagtaatgcaaatcgttaccgccatgtatgataatctgaaagatacagaacaaaaacataccagttcatagacctggcagggctcaatgatatataaaagatcataacagaagaaggccaaactgctgttcagacgtttcgccaagcttaagccctttttacaacgttcatgtacttcagttaaaagacaatcaaacaattgcatgatacatcggaaaacactttctttgagctgcatgggtggaacatcctcgcctatgatagagaataaaaaaatgagcacattacttggtaaccgtataatacctaaatcacactgaactagttaacgtacaaaggtagggccatagatatagaccgtgattaatctaaggccacaatgtattttgtaagtataaccactaaataacgacattgtggtatgataagtggttcttattggaacttgtatttgagttatgtcaagcaaatatcggctgctcataatatatatatatatttatttatttatttacttataatttgttgagactctcgtaggcattcaggcttagaaatcaaacagtaactttaacacttctttcttttatgtcgacatacatatgaatcattttagtgcaaatagttacttgagttctagacaacacccatattacaagtcatcaggttcttcgttaaatttaatcatgcagttctttcactgtaatgggaagaaaccaatttctataacagcattgcatgtccacttgataaagaaaatttttggaaaaatggaaactggataccccaataatacctgtaggtagattgtgatcataaagacgtgcttgctccaatgccattgatttaacaatcaactcgaggaaaaaccacgccattgataatacatcgtcatatacaggtccaacccggtaacctttgcctgcaaggccagtaatagtgttcatcaacaaaagagaaataattaaggaaattcaaagcagatagctgaacagtaacacggagattgctcaactttgtttataagtataatacaaatatatatcacattaggacaaagataagctagtagtttcatccagacaacgtgtgcaatttgtaccttgcttctagctaaacttccccacacagttgctaatccaggataaaccggtggttgattgcctccaaaatcatcaaaagaataatcaacataggtgaccagaaatcgatttcggtcagcatcatcaaacgacacctgctgcaccctataaaaccaaattgaaagatctagtaagaacaatggttcgtgtgcttgttatacatttactgtgtccagttaaacacattatttacaactctactgataataccccatccaaagttaaagaccaatgacatcgtgacataacaatctttggtcatttagctaaaccctaacccttacttgttatatgaatgttctaataaaagttttactgatcctttggtttactttttatttgaagcagattatatatcctacccttttacaaattcactagttgtactaaattaaaactagctaagctaaacaccataccgagttaaaatatccaccatggctctgaatgctgcaacctgaagcaagtaggaaaatacttgattggtaaatgatgtatgaaacagtcacatgggcagaaataagagacaagattgcttttaacaaaattttatgctaaggaactagaagatttcagttgaaaaacctgaagggtttctccaccattgccaataagatgaaggagcatgttaagaattgggtaaagaaactgaagcaaggcagtagaatcaacgtgcttcaaactgtttattgcctttagagagtaaaacgaaacatgataataatgccagtagagaaaaatatatcaaatgagacagagttcctgtggatacctgcaacagttctgaaaccccagggaggccttgtctggagggtatgtctatcatactctagacagaaatccctgacacgttcgttggtgggataaagagatgaacaaagtctcagtcgcaacttaaaaatatttttgccatcttccaaataatccaacctctcctgtaattgtcagagtatatttttataattattatgtttgaagtaatgttgctttgatcaatattaagaatgtgattacacattccaagcttgagtataaatagtaaaaagacacctaacgtagatttatctcactagtaataccaaagttaaaaaatagaactaattaataggtgcaccttccactattactagactatactaaattatacataattctccaggcactatgcacagactttactattcatttccctaatagatgccccagtgagctgatctacaaccatactagttttcttcattgatctcttgaaggatatgcacaatcgtatatgtcttgctatgggaaggtttggagttgtctaagttaaatccttattgtagtgtgcgaagtacagcctagattaatacaacgccaaaacctaagggtttgttatgcgtgcaggtgacgacccttcaattagtcatcagctacagaaccttcttaacagtctagcctattgtcctttatctttctttcatgtatgaaattttttcataaagtccctttcccaacttttgaatctcaaacattcatgcggatttgaaccatcattactagcttagcatgcaaacatatatataacactgatgcttgcatattatgataacataccttggtgctttcctgaagatagtggggaacaagttctctcattactggtagagaaatatcagaccgtgagctgcattagaaatcaacgaaattgtcagcactaagaaaaaatgataaaccaaggcatacacttctcccagcttgttaatactgaaagcgcaatctagttgttcagataactttgacatcaatgatatactgcatcttcaaaatttcattgttgtttgtgtactaccactttcgcccatacagatgaaaaacgcatctattaacaattagtgataaggacatctaaaagagaagccttctttcagcaatacataaaaagtccagagaccaaacgctagggtaatatcatatacatactggatatatgtagataatggaagtgatgcatatccaacaactacctgaaaagaaaagaaaattagtcactataggctagattcattagagataaacaagcacagaactctatgtaaatcttactggtcttggagcttcaagctttgtctggagatcaacatgaaaaaaagtgaataacagatgatgtgatggcgtccatgtggcaggaagagagaccttaatttcatcatggtagctagcggccctagcaccaacagcgacctgtgtatgaacccatttctggagtgaaacaccaggttctcttggatatattgcctagccaaatcattagtaagaaacaaataagactcaagaaaaaggtcggctcgtatccaagtctggttgatgatcaaaatatttacctcgagtggttgttttcggatatctgtgtcatcctttctcaattctacacggataaagggattcctcttccgacttaaagtaacagctacaggatacacataaaggcaatggaagagatgtagaaaaggctcgtttcttgtcgtagagcaaaaatcaaaagcctggaaccaaagacgataaacatatcaatttgcgagcaaattatatgaaggactagacacagtttccagcttctaactagaggtagaaaatacaatatctctgttgtacttttatcctctttaaacggaaatcttatatgaagtgagtccctaattcctggggttaagttaagaaacaagtagttaggaaaccccaccaggatgtaactagctccaaagtagaatgatggtcaaggatgactatcatgaagagaaaacaggctgatgaaaagagatgggagctaaagacgaagaaacactataagcagtagatcaaggaattggtagaaaggatgataaagctgatgtgcttacatgataacaatttaagtcaggagtcccacatgaacttgttagatttctcgaaacatcctttgcatcctctgaattccactttgaacagccattacggggtccaccagaactagaactgggacacttcataagagtcaggtcactgaggcggtcagttggatcaagggagtcatttatgatacttccattctcagatagatcttcaaagtctccatgtccattccgatgtttctcaatttccagtcttagaacccctttaacaggtttgtgaaccttccgtttggggtcctgtaaaaaccaaagaataaattattagacattagcacattaggagattccgtatgtccaactgatcaagacagtttaaagagattttagatatgtatttcctccagataaaagcagcaatatacagtaagatgttatatcaataaaaagcattccagttatttgtctgatgacgttaccaaacacgattcagatctgaatttttttgtgtgagtaaaagaagagagagctcggaaatcttgttttcttgtactgtatttagtaatatacttataactaactacacttcagaagggaaaacagaaatgaagaacttctattcctcaaaacttatgaattaaacaccatgacctaattgtcaaatgctaccaaaattgattcattcaaatagaaaacaaaaaaaaactgttatcaattaaatacagaagtattttgtcaatcgactgtgcatgcaactctacttgcttagatacatatccagttcaggaaaacccaaccaaagtgtacctagcaagtaggattttcaaattgaacaaaatctatgaaaaatgttccacaccatgtgaagttcaaagcactgtaaatacaatcataaagaacatggtaaaaactgtgggatttgataagaaacatcctacctgaatggactcttcagagtagctctctttaactttatttaaattagatatttcaactacgacagaacttccacctgaataaccttgctttccatctgatgtgatctttgcaattggttcataaacaccatcatgggaacttgacgcagtcatactaggagcaagaggactgctaggggaagcagattcaccagtgtttgtggtgagattattatcaaaaagcggaacaactgcccaagcaaaagactctcggtaaggcataatgcgagaccagacctgcaacttttgcttttccctctcagttaagtgcacctgattcacataaatagggtaattactaattgttatatcaagatccagctatcaccatgactactctaaaatatatatcaaaacaaagagtaaagacagatgatatatgccattataagtcacaggctatctccaagttactccaaataaatgttgaaagacacaatctctaagaccaaggcattcacatgagcaagagactctagagacagtaagggaaaattcaggattttggaaattacaggctctttacgggaatagacagatgatgtaacgcctccttcctcagttgctgtttttcctaattgaataagcaggcaaactgatgctgatggggcatctagataaaatactccacgattttcagatgaaagtttagcctgcaagaaaatgtacaaggggcggcaatttcgcaaaaatgacgtgagaaaaaactgaaatcaccttttatataatcatgagaagggaagaggcaaaaagaggacagttggctctaatcagttacttacatcctgcatttccgtcggctgaatctggaaataaaaatcctcagagagtttctccttcctctcttgattgtacaatgcaatcgagccaaaaaatggttctgcagggatgcaagagaaataaagaaggaacttaaagaagttgaaataactaaaattacagaaaatagacagcagttagtcagaatcctcaccaactaagccagactgaaaagctagagacaaaactctgacagagatcttcaatccactgtgaagataataaagaggaacagaagtacaaatcagacaaagataataagatcaggtaaagcatagtgacatgcaaaaaagaaaaaacctggaatagctagctgcaggagattcaggagttctctgaccaaaaatcatagctctttcattttcccagtcaaaagctggttcataagcaggtaaaggaggttgccccaaatgctgaaaaaaaaaaataaaagcaacaccttcaaagtaagaaccaaaggatgagaaatatataacagagcaatgaagtgagtaaaagaagacaccttagaggatccaggatcagaaaacggcctcccggaaatactggcaacatcctcctcaatagttgcactcctggcactagcaagacgaatctctgaagaagcagagagttaattgatgtacaataattgacaaaagcaaaaaaaataaaaataaacaatgcatcatagttaccagtctcagtatcagtatcaggtccttcaaaaatctgagtctggaaagaatcaggtcgaatattttcatagtgaccgtatttgttaacatctttaacccattcagtgccataacattgaaccaattgattcaaatgtggccattgttccagattctcatcaagctgaaacaaaagagaagaaacacattaacgaaaagagagagaaaacgcgaataaaggttgaggagagtttaattaccaaaggatcgagcttagggagagcaagaggctgacgaggtagcttacgaaatcgaagaccaagattgttgttctccattgagatagatctaatacaatgtgaggtactactacgccattagagagaattggggatttgtgaaaacctagaaatgggaaaaggacattgttggagtagtaagtagatctgagtgggggagctaaaggaggagaggaggatgaatctttgtctttacgcagagaggaagagatccgtgagaggaagcagttgggaggaaaagtgaagattactcaagaggaaagcaaaagtcgagctggagctgtaagtccaacaagagtccaactctactgtcccttttttctttttaaattacaaaagagtcaatcattgggacgaccaaagacgatgatacctcacctgaaccaacttaaagaattggagtaagtagtaaccattttcaccaaaagtcattccaattctcattataccaaacaaaatggaattagaaagtatacggctaaagaatttagttgtcacactttattgaaattaggattgttgatttgtttctacggattcatgttgagataaaccgtaaacgagttcatagttacctttggtatctatgaatcggtgaatcccaatctttagccattgtttcagagttgttgccattatagtctaccattgcggcctttttatatatcattcatgttagcattagggttataatttctaaaaattgatcacctctttaacttgtgcctagaatgttaggcagacccagccaaaaaattaagtgggtgaaaaaacgttacactggttaacataattattgggcttcgtggcttctctctcgttgacggagaacttaacggtgtgtgattccaagtcggattagaacctccgttatatatcaatgggagttttggccgcttgttgctgttgagttgtgttgtctttgattgaaacgacggcgtatacgtccattttgtccgtgacatattcgatatggttgacgtcactagctgatacaattttgagctcaagagttgggttctccacggctctttgcaactgtgatgaagatattttcgagagatctagtattgtttgttctaatcttgggaaaatgtccaagtatacaatgatctatgagattcaagttaaccagtttctcattcacatgaatctttcctttctcatgttaaaactatctcgccatttgggttccctgtaaaatatggttgtccggattttactccaactaacaaatttagatagaaagaaagaagaagcaacaaaataaaactaatgccgagtaaaagaatcaatttgcacactccaacagataagataaaccgaacaagtttgcggatacacaaacatgtgaggtaatgctgctttcagaacgtatttattaaaaataaagaggagggttgtaatagagtaatggagaagaagataagaatcaagtatgaatgatcttgtaaagggttttggtctttcttcacatccctga

SEQ ID NO: 586 - DNA, 213788 bp, Arabidopsis thaliana
ctgcaccctataaaaccaaattgaaagatctagtaagaacaatggttcgtgtgcttgttatacatttactgtgtccagttaaacacattatttacaactctactgataataccccatccaaagttaaagaccaatgacatcgtgacataacaatctttggtcatttagctaaaccctaacccttacttgttatatgaatgttctaataaaagttttactgatcctttggtttactttttatttgaagcagattatatatcctacccttttacaaattcactagttgtactaaattaaaactagctaagctaaacaccataccgagttaaaatatccaccatggctctgaatgctgcaacctgaagcaagtaggaaaatacttgattggtaaatgatgtatgaaacagtcacatgggcagaaataagagacaagattgcttttaacaaaattttatgctaaggaactagaagatttcagttgaaaaacctgaagggtttctccaccattgccaataagatgaaggagcatgttaagaattgggtaaagaaactgaagcaaggcagtagaatcaacgtgcttcaaactgtttattgcctttagagagtaaaacgaaacatgataataatgccagtagagaaaaatatatcaaatgagacagagttcctgtggatacctgcaacagttctgaaaccccagggaggccttgtctggagggtatgtctatcatactctagacagaaatccctgacacgttcgttggtgggataaagagatgaacaaagtctcagtcgcaacttaaaaatatttttgccatcttccaaataatccaacctctcctgtaattgtcagagtatatttttataattattatgtttgaagtaatgttgctttgatcaatattaagaatgtgattacacattccaagcttgagtataaatagtaaaaagacacctaacgtagatttatctcactagtaataccaaagttaaaaaatagaactaattaataggtgcaccttccactattactagactatactaaattatacataattctccaggcactatgcacagactttactattcatttccctaatagatgccccagtgagctgatctacaaccatactagttttcttcattgatctcttgaaggatatgcacaatcgtatatgtcttgctatgggaaggtttggagttgtctaagttaaatccttattgtagtgtgcgaagtacagcctagattaatacaacgccaaaacctaagggtttgttatgcgtgcaggtgacgacccttcaattagtcatcagctacagaaccttcttaacagtctagcctattgtcctttatctttctttcatgtatgaaattttttcataaagtccctttcccaacttttgaatctcaaacattcatgcggatttgaaccatcattactagcttagcatgcaaacatatatataacactgatgcttgcatattatgataacataccttggtgctttcctgaagatagtggggaacaagttctctcattactggtagagaaatatcagaccgtgagctgcattagaaatcaacgaaattgtcagcactaagaaaaaatgataaaccaaggcatacacttctcccagcttgttaatactgaaagcgcaatctagttgttcagataactttgacatcaatgatatactgcatcttcaaaatttcattgttgtttgtgtactaccactttcgcccatacagatgaaaaacgcatctattaacaattagtgataaggacatctaaaagagaagccttctttcagcaatacataaaaagtccagagaccaaacgctagggtaatatcatatacatactggatatatgtagataatggaagtgatgcatatccaacaactacctgaaaagaaaagaaaattagtcactataggctagattcattagagataaacaagcacagaactctatgtaaatcttactggtcttggagcttcaagctttgtctggagatcaacatgaaaaaaagtgaataacagatgatgtgatggcgtccatgtggcaggaagagagaccttaatttcatcatggtagctagcggccctagcaccaacagcgacctgtgtatgaacccatttctggagtgaaacaccaggttctcttggatatattgcctagccaaatcattagtaagaaacaaataagactcaagaaaaaggtcggctcgtatccaagtctggttgatgatcaaaatatttacctcgagtggttgttttcggatatctgtgtcatcctttctcaattctacacggataaagggattcctcttccgacttaaagtaacagctacaggatacacataaaggcaatggaagagatgtagaaaaggctcgtttcttgtcgtagagcaaaaatcaaaagcctggaaccaaagacgataaacatatcaatttgcgagcaaattatatgaaggactagacacagtttccagcttctaactagaggtagaaaatacaatatctctgttgtacttttatcctctttaaacggaaatcttatatgaagtgagtccctaattcctggggttaagttaagaaacaagtagttaggaaaccccaccaggatgtaactagctccaaagtagaatgatggtcaaggatgactatcatgaagagaaaacaggctgatgaaaagagatgggagctaaagacgaagaaacactataagcagtagatcaaggaattggtagaaaggatgataaagctgatgtgcttacatgataacaatttaagtcaggagtcccacatgaacttgttagatttctcgaaacatcctttgcatcctctgaattccactttgaacagccattacggggtccaccagaactagaactgggacacttcataagagtcaggtcactgaggcggtcagttggatcaagggagtcatttatgatacttccattctcagatagatcttcaaagtctccatgtccattccgatgtttctcaatttccagtcttagaacccctttaacaggtttgtgaaccttccgtttggggtcctgtaaaaaccaaagaataaattattagacattagcacattaggagattccgtatgtccaactgatcaagacagtttaaagagattttagatatgtatttcctccagataaaagcagcaatatacagtaagatgttatatcaataaaaagcattccagttatttgtctgatgacgttaccaaacacgattcagatctgaatttttttgtgtgagtaaaagaagagagagctcggaaatcttgttttcttgtactgtatttagtaatatacttataactaactacacttcagaagggaaaacagaaatgaagaacttctattcctcaaaacttatgaattaaacaccatgacctaattgtcaaatgctaccaaaattgattcattcaaatagaaaacaaaaaaaaactgttatcaattaaatacagaagtattttgtcaatcgactgtgcatgcaactctacttgcttagatacatatccagttcaggaaaacccaaccaaagtgtacctagcaagtaggattttcaaattgaacaaaatctatgaaaaatgttccacaccatgtgaagttcaaagcactgtaaatacaatcataaagaacatggtaaaaactgtgggatttgataagaaacatcctacctgaatggactcttcagagtagctctctttaactttatttaaattagatatttcaactacgacagaacttccacctgaataaccttgctttccatctgatgtgatctttgcaattggttcataaacaccatcatgggaacttgacgcagtcatactaggagcaagaggactgctaggggaagcagattcaccagtgtttgtggtgagattattatcaaaaagcggaacaactgcccaagcaaaagactctcggtaaggcataatgcgagaccagacctgcaacttttgcttttccctctcagttaagtgcacctgattcacataaatagggtaattactaattgttatatcaagatccagctatcaccatgactactctaaaatatatatcaaaacaaagagtaaagacagatgatatatgccattataagtcacaggctatctccaagttactccaaataaatgttgaaagacacaatctctaagaccaaggcattcacatgagcaagagactctagagacagtaagggaaaattcaggattttggaaattacaggctctttacgggaatagacagatgatgtaacgcctccttcctcagttgctgtttttcctaattgaataagcaggcaaactgatgctgatggggcatctagataaaatactccacgattttcagatgaaagtttagcctgcaagaaaatgtacaaggggcggcaatttcgcaaaaatgacgtgagaaaaaactgaaatcaccttttatataatcatgagaagggaagaggcaaaaagaggacagttggctctaatcagttacttacatcctgcatttccgtcggctgaatctggaaataaaaatcctcagagagtttctccttcctctcttgattgtacaatgcaatcgagccaaaaaatggttctgcagggatgcaagagaaataaagaaggaacttaaagaagttgaaataactaaaattacagaaaatagacagcagttagtcagaatcctcaccaactaagccagactgaaaagctagagacaaaactctgacagagatcttcaatccactgtgaagataataaagaggaacagaagtacaaatcagacaaagataataagatcaggtaaagcatagtgacatgcaaaaaagaaaaaacctggaatagctagctgcaggagattcaggagttctctgaccaaaaatcatagctctttcattttcccagtcaaaagctggttcataagcaggtaaaggaggttgccccaaatgctgaaaaaaaaaaataaaagcaacaccttcaaagtaagaaccaaaggatgagaaatatataacagagcaatgaagtgagtaaaagaagacaccttagaggatccaggatcagaaaacggcctcccggaaatactggcaacatcctcctcaatagttgcactcctggcactagcaagacgaatctctgaagaagcagagagttaattgatgtacaataattgacaaaagcaaaaaaaataaaaataaacaatgcatcatagttaccagtctcagtatcagtatcaggtccttcaaaaatctgagtctggaaagaatcaggtcgaatattttcatagtgaccgtatttgttaacatctttaacccattcagtgccataacattgaaccaattgattcaaatgtggccattgttccagattctcatcaagctgaaacaaaagagaagaaacacattaacgaaaagagagagaaaacgcgaataaaggttgaggagagtttaattaccaaaggatcgagcttagggagagcaagaggctgacgaggtagcttacgaaatcgaagaccaagattgttgttctccattgagatagatctaatacaatgtgaggtactactacgccattagagagaattggggatttgtgaaaacctagaaatgggaaaaggacattgttggagtagtaagtagatctgagtgggggagctaaaggaggagaggaggatgaatctttgtctttacgcagagaggaagagatccgtgagaggaagcagttgggaggaaaagtgaagattactcaagaggaaagcaaaagtcgagctggagctgtaagtccaacaagagtccaactctactgtcccttttttctttttaaattacaaaagagtcaatcattgggacgaccaaagacgatgatacctcacctgaaccaacttaaagaattggagtaagtagtaaccattttcaccaaaagtcattccaattctcattataccaaacaaaatggaattagaaagtatacggctaaagaatttagttgtcacactttattgaaattaggattgttgatttgtttctacggattcatgttgagataaaccgtaaacgagttcatagttacctttggtatctatgaatcggtgaatcccaatctttagccattgtttcagagttgttgccattatagtctaccattgcggcctttttatatatcattcatgttagcattagggttataatttctaaaaattgatcacctctttaacttgtgcctagaatgttaggcagacccagccaaaaaattaagtgggtgaaaaaacgttacactggttaacataattattgggcttcgtggcttctctctcgttgacggagaacttaacggtgtgtgattccaagtcggattagaacctccgttatatatcaatgggagttttggccgcttgttgctgttgagttgtgttgtctttgattgaaacgacggcgtatacgtccattttgtccgtgacatattcgatatggttgacgtcactagctgatacaattttgagctcaagagttgggttctccacggctctttgcaactgtgatgaagatattttcgagagatctagtattgtttgttctaatcttgggaaaatgtccaagtatacaatgatctatgagattcaagttaaccagtttctcattcacatgaatctttcctttctcatgttaaaactatctcgccatttgggttccctgtaaaatatggttgtccggattttactccaactaacaaatttagatagaaagaaagaagaagcaacaaaataaaactaatgccgagtaaaagaatcaatttgcacactccaacagataagataaaccgaacaagtttgcggatacacaaacatgtgaggtaatgctgctttcagaacgtatttattaaaaataaagaggagggttgtaatagagtaatggagaagaagataagaatcaagtatgaatgatcttgtaaagggttttggtctttcttcacatccctgatcatccatccagctcactaggagtgtctgtcactatagtgtgaaatacaaaatttggaaacgtctttgttacgtctctacacaaaacacaacatacaaaaacatgttagtcccgcacgaagaagataataaggcaaataacatggctagcttacttgagatgttgaaggctcatgttctgtaacagagaggggtggcgcaacacaagactcctccactcttccttatcaatcttcccgtccagtttagtatcagcttcttcaaatgtctacacacaccaatcagtttttacatctcttgtcaaagattaaatatgagaatcctagttagtgtcaatggaggagatcaaccaaacccaccttgtctatgatgctctcaatcacatgatcagaaaggttcatgccagattcagctagagtccgcacaaccatttgcttcacctcctgtctctttatataaccttgctgattcagatcatacagcttgaaagagactgcagagacaaaagatgagcttgatccaaggtttggatatgacaaaaaaaaagaaggtcaagtctctctcgaccacttacactcaatcttatcctcaaatttagcattagggtgaaagaccgaaagtgaacgagcaaaggcttcaaaatctagaatcccagtattcttggtatcaaacaagtcaaacacctgcaaagcttgaagtatgagtgtacagcaaggaaactcatataagtgagttacaagtctatctaatttaccctatcagcaaaaaggcttctcgttgtgttcattttgaatagtaccaattgaaattgttcctgcaatatatttgaaaggatcctagtgaatgtagaggaacagagagatatagtactcgtgtccgactatggattcttgcataccttgtcgataagcccgtttttgctaatgctcttgaacagttcgtaaagagcttcaatctcattcactgtaactgcatttggtacataaagccattgttggggttgtgacaaataaaaatagtaaaagtaaatgtaggggtagacacatacacacagtgcctctagccacatccttagggttctgacgaaccttgggaggatcagcatcacaacaagtcaacagaattaaggctaagtgctttaatccatctaaacattgcatcatcatctctcccaaaagtcactatgtccatgcctaccacaaacagaaaaaaggttaaatccattgaatgtcaacagaaaccctctaaacatatggcatcaagaaaaaaaatcaagaatcgaacataaatttgccgatccaatggagacatcaaatgaatctagtcttgacttttttgagagaagagaagaagatgaaccaaagcaatatacctattctttttttctcgttagcgtgtaaagaagcttcagatcacgacttgttccaagagtgtttatttttttgaccacgatctgatatttctctctctccataaaagtttttgttggctacagagacatgggaaaggatctacaagttcgttggcgtaaataagtcaactcttagttggtgaccactctaacaagttgacatttcgagagagagaggaaaagggagatactatgattcattcatcataactaacaagattcagaagaccaaaaaaagtctgttttagggaataacattcacaaaacaagcctgaaggtgaagttgatacgctttggcaaagaatgaatccagcccttctgaccaccaactatctatgtttttcaatgtcaaactttgttgatcttctctgtttcttctttttgacctcttcctcctcacaggtcctttgtaattatttaacagcaagctgttgagtcagcttccaagaagcgctttgtaaacctgacgagacaaaagataaatgttggttccaagaacacaagcgacttctcgcatataagaggttcaatttttctagttgatacggccaaaccaacaaaagtctctggattctgaagacgaaccaatcaaaagtgaatggtaaagatgttaaatttgcttcctctttttttatataccaaacaacataccattcaactttatgatgtaaattttattgtttgttttgttgggattagtttgaaataagtgttcccaagtcagcacaggcttatactgcaagaccatcacaatctcacttccactctgaatcacagatattaactaactaggctaggctctctctatatgtactcaaggattatttccttctctatctctatctcttatcttggttgttatatgtttccatcatctatgaggaatagttgagtggtggaaaacaaatatcaaccaaaacagaaaacttgatatagccataaactcaactggtgggaaaagaaagacattgaccacaaaaacataaatctggccacttcaaagtttacatcttttgaaacatagagcattaccaaacgagtgagttaatgaattgaatacaacatctatctaataattggtgagaatgatgaccattgatgtgcctaccactgattagactgagaccaaatgtggggtgttggggggtaaattcaaccaaatcaaactatagggtaataaatgcaataaagaaaaaacaaagagatgaaagtaaagagagagcagaaaatgtgagtgggggaagatggagagtggtatgggaacaacaacaattgatgctatgacaaacaacaacagcaagaaatttgtgtgagagtagagagtcttgcttcagttgaatcaaagattggtcctttttttttcgttttctctttcctgctttttttgtttgtagtttctgatctctcaggaaggctttttataaatttgccctcaatttctccgtccctactactctttttgatcaatttctacgggaaaaagcaccaatctttaaacccgggcatgtccttgtaatcgagtatgttgtgtaagtgatgaatttgtggtgagatctggtgagaagtttcctcttttttctcagattgcggtaaaaaaaaagagtttttaataaggaagagattgagattagattttatcgcttttgtttgtgtgatatgggtaacgtgaacgccaaaagaaaaccgaaatagtaacaacgcttctgctgttgaaagacgaagacgctgagatttgttcctcgtgaagctatgtctgctgcttctgatggtaaccatgtcgctcctcctgagcttatgggtcaatctcctcctcatagccctcgagctactcagtctcctctcatgtttgctcctcaggtttttgttttggtttcagattcgatgtcttaatctggaggatgtgatgaaagagagagatctgtagcttttaaagtttgtgtctttttttaggttccggtgcttccacttcaaagacctgatgaaattcatatccctaatccttcgtggatgcaatcgccatcttcgttgtatgaagaagcttctaacgaacaaggaatccctacgatgatcacttggtgtcatggaggcaaggagattgctgtggagggatcatgggataattggaagacaaggtttttagctgaatgtttgttttgatttaatggcttctttcatcatttcaaatctgagctcatctttgttgtttgttgttttggggggtttgatcagaagtcggctgcagagatctgggaaggacttcactatcatgaaagtgttaccttcaggagtctatgagtacaggttcattgtggatggacagtggaggcatgcccctgagctccccttagctagagatgatgctgggaacactttcaacattttggatcttcaggtaactccattctctttcgaattggttagttggttggtggagaaatgaaacggttaatgagagactactggaactgctaaatcagggttatagggaatgggaaagacatctatgttgattagcaagttaaaaaaccaggctttgtagttccttttccgattttcccgtgtgaaaacagcagagatactttgatgttatgcaggactatgttcctgaagacattcaaagcatatctgggtttgaccctccgcaatctccagagaatagttacagcaacttgcttctcggagctgaggactactctaaagaaccgcctgtggttcccccgcacctacaaatgacactgctgaacttgccggcagccaatcctgacattccatctccgctgccgagacctcagcatgtcattctcaatcatctttacatgcagaagggcaaaagtggtccttctgtggttgcgcttggttccactcaccgatttctagcaaagtatgtaactgtggtgctctacaaatccctgcagaggtgagtgaagatgatgcaattccaatgggtagttagcatgtggatcctcggcatgctcttatctattttggtgttaaaacgttaactcatggagtatgggtgaggctatatagaaaggagacacacgaagagagttatttccaggcaaagtattccctcgatacagcgaattttgttgtctttaaaagttgtcaataaggtttaccaacagaatgaagatgcagtattcagtcagtgtctgtgtaatcttttgatttgaagacttcatcatctgttttttttttagcatagaagaatgcaggaacgacttcacttgtaaaaccggcaaatcttttttatggttttgttttggggctttcaagttttcacaaaaagttgtcacctgccagtcttttaaattattgtttgctttcaaatttagcaaagtcatgtgtgattgtgacagatgatcatatgcttctccaacttgtgtaacaaagcatctgcagatcaactatatatcggtgaaaaagcaaaagatgacagatgtctcaatagctcattatcattctcaaatgaatctaaggtagagtttattgcattctgatggccactatctaacagtagaaggctgtacagaaagaagcaatagaaagggcaaaacatgtgaatttttatgtttgaatctaatcaattctgctgagcttagaaaacgggacagcctttggctttgattccaggagccgtgggacaggaggcaagagggcagtggtctacttcagtgccccaccatttgaggtcgtgtccagcattctgcagggcgaagaacaagagcacccccatgaacgcggtccctgcatcgagcgctgcagagagtacgtaattgtacttctgccaccatctcttgtggtaattgaacacaaagtagttgaagatggttcctgtgaccaaccagctggcaatgttggttggagtggctggaggcatccctgcaaagccgtaggagataactggaatgttgatgagagggatccacttcttgtttgggaagatcttgctcagcgcccacacggggaacaggcaggacagctccaatgaggaagaacccaacaaggttacggtacatgcctcctggtccaaagagccgtcttggtcctatcaacccccaaataactgaagcatcgaacgtcactctatacttggggcaagtccaggggctattagggtggtctccttcgatgtcgcatatgtcttgaatgctctccaacatccaccaggccactcccagattcaccacaccagctaccacagtgcccaccagctgagccgtgtacatgcagggcggtgggattttcatgtaatggccaagcttaaggtctgccaaaaatgagagagcatggactgtgctgattctcccgtaaatcttgaaaatcaggtttgcaatgggttttccaggcaggatataaccgataatgaactgccctattatatcatatcctggttgctgcattttaaaaaacaacacacaaaaagatatgagcatgtgttattggaagaggcattgtcttatatataaactagtatgtaacctgatttgtagttgcttgaatgacaccgatagggagtgtgacaatgaaggccaatgcaaaagcaaagagcattccccaccatggaagctgcactgactccttccacacaaaagacattaggagagacatggctacacttcctgccagcaatatataaaaccaccactcaggcacttttttgtagctttgcatcaattttccatggatgtccagcttcgtggtgttcactgcagaccaagtctgcttccatatgtccctgcacaaacacaccaagtgatgattctcttctcacagtgcccttgctactcaacaaaactgaatgacaaaactaactaacctgccgttgaacaatgccacatgagttagtgttgcagtgaatctcgcaaacccggatccgatagagagtgcgaaaagagggctgaggtaaagtttcccgtagttgttataagcaccaatatccagatcaaactgcggtgtcaagatcttggttgtgtcatacttctggccactagtagtgaatagctggttggaggaaatggggaactttctggcatcgaaagtgttgaacttccagtaacaaacagggacgatgatgtatataaacatgatgaaaccaacaccaacgttgaggatagaggaccatggagccaccaatggactaccatggtaagcagagatgccagcccagtcaagagtgaaggctccaaccccaaggccatggtaccctgaaccaacctgctgagccgtgatgctgtttggccaagcccaacaaacccatgaggagaaagtcaagattgggaatagatagcctggaagtgcatagtaaataaagctagcaccaagagctactagaaagaacttcatcctcgtcaagcctttagacttgttttccttctcgtgcaacgctctgaaacaaaacacaaaaacaaaacaattcaacttcaaaggaatcaacttttctcgcattgcagctaatttacgaatcaagattggattaagaacctgaagagagaaacttgagcgagatttgaaggccaccacatgtcaacaggatcaacaaggtacctccttagaatcccagcccaaccataacccaaaatctacaaaaatttatttccattctggtcaattaacagattttttgacaaaattgtaaattccaaaagggagaaagatagtaaacctgagtggtcaagacgatgaagagaccacagatgaagctaaggctctgtttatagtaagctttcataacagtgatagccccaatagagtaagcatcaccaccaccgtaagcaacgccacaattagcaaagatggtgataatgacatgctccttgatgttaaaaggaccaggattgaggctaaaactccacccaagaaggttgtgagaagtggtgggaagagtccgagccatgaacttgccgatgggcaaaccagcgatctgcatgagggatggctgagatggtgagtggctgcgtacggtatgtgaagaacgtgttgagaaagatgagcagaacacaagaggtcagacccaagaaccaagctctgaatgtcatcaccggtaggcttggatcatccgtctcaggcacaacaagagccacttcctccaccggacaacgctcatggtccgaggagagatggacattagtcttatcagtagccttctccgcgtccattttctttcttcttctgaagtaccagacaaagttgcgttgttcttgtttatataaccaaaggacaagacagtggaactactggcagaaagtgaatgctgttacaaaattacattattaccccttttctcctattcgttagtttatccacgtgtcgctctatcacgcaaacccatgttaaaatatctttttcatataattacaactaattatatactgatctttgaccaatgttattaagaggagtatggtaaaaaggaaaaagaaaaaggaagatgaaatctgcaagacacattgggaggttccaaatggatttgctttcctatattttccacgcgtgtgagacgcacgtgccgttgaaggtctgacacactcagaactctgtccagatcaaagcttgtctcatgtggtcccgtttttttgacactggactaggacgcaacgttccacgtttccaacgccgtgagtgttttgcttgagaactacgcgagtggaagagaacggccgttagtattctgacggaggtcgtgctgcctaggtgtggttagctcgtggtgtgcgcagaacataactatatccacgtgtccgtcatgctaacgtggaatttttacagagtggcagatcacacgtggacatgtccgaatggattttgaacttttgaatatgcttctttgcactttctattggttgtccgtaaaaagtccaaagaaaacagtgatttaaagaagaaacgacggcaactaatattattgtattaaaacaaactgttaactattcacttcgattcttaggacatggaataaagatgaataaaaaactaaattgttcttaaataaaataaaataaagtaaaagagaactaatatggattagagagtgatatatctatctgcacaaaaacaaaagagagtgatatgtctgaaagttcaatcgttttggttaaaaaacgtcctgactagtataagaaaacattgattgggtagatattgtaaggggggaaaaacacagtctatgttagctgagcaacaaagttcataaacaaacttctaccaaattcagtgacgtgtaaaacatattacattgaaaacttatatgaataaggattataacatgcatgaatctctcttgggttttaataagcgttaaaaaaacgattatcaaaattccacctttagctgattggtgagacttgagtgagagtctaacggagacccaatgatcaagatctttaacaaaaggaatattgatgattgttctctttttttctgtttcaaggaataattccatggcatggtaaagagagaacgttgtagagccaaacaccactacttgcaaatatgattcttgagtagttttgaagcaatgaatttggaattaggagaatgacacaatacacaatgcccacactctattcattattctccttccacacagaaaacgacacttccttattgttatttgtccctttattctcttaaaggcttaaaccctaaaaagcctctttttatatttccatcgtttctctccttcttttccttattagtacatgaaatttaaaaccaatactatatgtatacattgtttgttcacaaaccataaattgaatgattacgcattaccaaatttacaggttacagcaatcatttcgtttggaccattcataacttttttcgtcaaagcaaatagtgaacgagacattaccatgcgggccgggcttggttctgcatcgaccaaaacgaatttcttccattccattaaacattttcattgtctgaagtgcttgtcgttctcggaccaactttacattttcaatatatatatgtatatagttccatcaaacatgctcttgaggtgaaagatgctactttaagattaaaccttgtcggatcaaattggtgacatgaaacgttaatcttcttttggggataagcgatgatggtgcaattagaggcactaaacgatagggtaagagatatatggagtatgaataaaaattgtggtccgataaaataaactttttttttaatgtattaaaaaagtatagtttaatagttatgatacaatatattcacttccagttttatacacttttgaaaattaaaactaaaattaaaatacaattgtcgtattcttgccgtcacaaaatagtggcggtacaaaactagaggtacaaaattttgtttagtgagatatcaacaactccgtactatctctgtttaccacaactttgttacatacaaaaaagaataattatagttaccaatcaaatttgtaatgtgtgaatggatatagatagggtagaaagtatcgaagtagtacatgtctcggagccacacaaagtagaatgctatatcttggcaatcacatcaaaaggacagaatcttatcaaaagtcttcctaacttttgagttgcgattgggacccaatagatttccgatctcattattaattctctttgaattttcagcagagacgactccttattttgtatatttctgtgtgtctctttcagtattatatattcttgtcaatctgtttcgcctaaatcgtatacttcccactagatctactacattgcaaataattgatttatacaaagaaaacattacggtcgaaaacatataactaaacatttttttaaatgtacatgttaagcagctaaaaatagcattagatagcagatttaagtggaacttggaagtttacataagagagcaagtgatggggtattgtatagtagattattagcatgacctcacacaagatgtacttctcatcttctaagtctaaactaaacaatgatatcatcccattattgccaatgttacttatatggatgatatgtacccacttattaattaacttacttatgataaatagaaactgatgataatgtatgaagagaaactgaataaagcatgttacaaacggtcaattattcaaagattaagatttcttacataaatttccacaagaaatcatgttacaaacagtcaaacatttgcatacctatgtaattataaaaatagtcaaatacatatgttctcctccgtaagtgccattgggcctcctcatgacttagaagacgcgagcgtttcagctgaaaaccaaaaaattctcatcagattcaatcagacaataatgtcaaaagttatatattaagtacataatcagttttatttcagaacgttcttagctgtaaaatgtaggatatgatcctcttttggtttaaacctcatgacgtggattcaatttttttgctaaaaatgtaaatatttcatagaaaatgaaaacagtttaggtttacaatcgatatttctatcatgatcgtggattccttttcgacatttctgtcaacaacaactgagtactgatacaaaggccaacgaccagcagtatcagcaacttgagggggatatcctttggctttcaagtgaacctttcctagttattaatctttttggcctcatatcgcttccaaagtgagttatattcattgtaaaatttgtaagggttagtacatccaccaccgagacttaattttctctattcaaaaagaatgtgaaatggcctactggacctggagagtaggattggagattctgatctaaagaatgaagtccattaagaattatgtttttgtacttcgaaatacccattaggtttcatgacccatctattaaaattcatataccaatattcatcaaaaaaaaaaaaagatttctattggcttttgtaaaactcccaaatataaagtgttttattctaccaactaaactgcatgtgacgaatcttccagctatatttcttgttgttttctctccttctatcttcttcttacgtatgaagaattaatgatgatgatgattgctcaatttgttcgttagtgaaaatattataagatacgcatacaaattaacctgtttcttctatatatagatgattacaaagcatgtgatgtgggagttggactattggagtagttgattaatcgagctggagagaaacaattacaaagattctttacaatttttaattaagcaaattagtacagacaaaaaaaaaaagtgtagaaggagacaaagagttgcgttgaaggaagaatgattgagaaattgaattatgccgactcacgccccactccttccataaatagtttagttttattttttgcatgttaatgtattaacctagtaaagaaacattgaatttaggataagcagtaaatttcatttggtgacaaataaagaaagaaagattgggttaagtcaaataatggcaactatgaaagttagagatgtgaaaagggttctggtgattccattattgtacctggctgctaacatttttgtttttcttttaaaatcaagaaaaaagttttgattaatcaaaatcgacgccaactaaaaacacgtgtcaaaacgtggttggtgacagtgggatatgagactgtattataaaaagctacatttctcaccaccacccaatctctctctcccttgaagtagactctaagctaaagccaccgtcagattttcagatctcagatctcagctcttcattcgacgccatggccgagaagggcaaaggaaaggttttcttcttctcttctcttcttattcagttaatggtattctcttattattgttttttttttaatttgtgggtcttgaggatatattcaatctttatttattattaacctgaggaggtttttgtatatgtgggtttatgtttgtttgtttttgtgtggattaaaaaaaagagttggctactttgtagaaactatgagaagaaatcagattctctttaaaccccaaaaaaagtaagaaaagaaaagaagagatcagattcttcttctctttttctattttgtgtcagaggtcgaatctgttcttctgctcccttcccttttttgttgtttctttcagtaataagatcttataaacgtcaaatccattagtacatataattttttatcaaaaaagcaaactatggaagaagcagaggatttagtgatgttgatatctgaaaaacaggtaactatgatgaagttgaaggtggatcttgattgtcccaaatgttacaagaaagtgaagaaggttctttgcaagttcccctcgtgagttacttctctctttttcttaacttttttttggtgaatttgattttgattggttttgtttggaaatggactgagtggatttacttgtgtgattgggaacaagagaaataagagaccaattgttcgatgaaaagtccaacattgttatcatcaaggtggtttgctgtagtcctgagaggatcatggacaaactctgttccaaaggcggcggctcgataaagaccattgagatcgtcgagccacccaagcctcctcagccacaaccccaacaaccacctcagaaacctaaagatgctcagcctaaagctccttagaagcctaaggaacctgaaaagccaaaacagcttgaaaagcttaaagagccagagaagcccaaacagccagaaaagcccaaagaacccgaaaagacgaagcaacccgcacccgctccagctcccgcaccagcacccgcagccaaacccgcacccgctcccgctccagctcccgcacctgccccgaagcagccgggaccgccaccgcaagcgatcccgatgatgccgcaagggcagccagcaatgtgttgcgggccctactacgatggatacggagggccagcattcaatggatatggaatgccgccgcagccttacgagtgctatggacgaccagtctacgagagctggggtgggggctgcccaccaccaccacctgcttatagacaatgccacgtcactagatgtgattacttcagcgaagagaatccacagagctgttccatcatgtgaatttgacttctttatctctaaatcctttatttttcctttaatctttttttcttcttatacaaataataattaaaaaaatatagagatgtttacgtgtaatgttgtgattaagagaaccaataaggaaggaacgttgtattttgtaaatggtagccatttccaatatttggttgtccattcgaagctgtaactgtaaacactataaagaaatttgtttcatgttcttctttatatgaaccaataatagtatttcgctttattcgtaatctactttttgtgatgtacctctgatttaacttttcttcttttcattttccaaagtagtgtcggtggagttattgggatttgtgacattttcttcttaatttatttacaagtttgacgaaggattcgtgcacataaagctgtagtaccatattcttacgtacgaagctagtactatgattattatgatgccatttaaaaatattcgtaggagaaatgaggttataagttactgttattggaaagttaactctaaagattacaacaaaatatgattagtgagacaattccagtttctttgtatttgtggtaaaggtttaaagaaagtaagaaacattacacgtacgggtagatcaaaaagatggtccaaaaaacaatttgtcgttttcacattgtttttgtgtgaaagcagttaaaggtcaacttttagcagagctatagtagatttgtcagaagaatcgggatcttttaatcgaaaaaatcatttgtttacaaattcaactttttaagattgtatgtcggttctaagataggattaattataagcattttagacattcaaagacaagttatatcgcataagtgaatggttttcgtatgtgccacgtacgtgttcgagtgtactgtttttactttaaatatgcaataactaataaagaactttgttagcactaacctatcgatctttgaagagcttcttgctcaattaagactgaggaggtggccaattatatgagaaaaattcatcaaatataacatcacgagacatgatgtatctctgtgtctcaagatatttaatcgaaaagactatttgtttacagaaaagagatgttttaagattgtaggaatatgattataagcattttagacattcaaagacgagtcatatcgcataactgaaaggttttcgtatgtcccacgtacgtgttcgagtatgctattttgtactttaaatatgcaataactaactataaagaaactttattagcactaacctatcgatctttgaagaacttcttgctcaattaagactgaggtggcctagcccgttatatgagaagttctaccaaagatcacatcacgagacattatgtatttgcatgtctcaagataggaaaaatttaagcctttctaagaaagaaaaaaagatagcaatttgattttttgagcgtgaaacacgtgacgtgaacatagcaaaatgatctaaatatagatataagatattttactgttggtttctttgcacgattcctttcataacaagactgactgaatagtatctgaacactaatgacatatacaacagatctcaatatctcatcctttccaccaatattaagctaggcaaactttaaccatgaagataacttgcacttaatcttcttagatgtctaacaaatactttaatcttcttttcctgtactctatattgctaaaatgtatatttaagtcctctcataaataccatatcttaccaaaaatagaaaaagaaactctttttaacatgaactcttttacaggcctgtctattcgtaactctatttgggccggcatgataattttccatacccaaaacacgccatcgttcagtggaaacttagtaacactacgtggtgggtttcaacaataaaagcagcacgcagttacctacagaaacactaaaacaacacatttcgtctctatcattctttttcttctacaaagttgcagagactgttggataaggtctcgaggctgcaactgcgaacaaagtacccacaaaaaaatgtcatttcatcatctatgttcctctccctcgtctcttctacatgaccctcttcctctctgcaatcttctctcagtgtatcccaaatccacaccaagaagtttcctctcctcttacaatcccaattcttcctcatttccactccagaaaccttctccaagcaacccatgtttcagtacaagaagcgattccacagagtgaaaaatccaaacttgttgatgtagatcttcctataccagaacctactgcttccaaaagctacgtctgggttaatcccaaaagccccagagcttctcagctccgtagaaaatcttacgattcgaggtactcttctcttatcaaactagctgagtctcttgacgcgtgtaagccaaacgaagctgatgtttgcgatgtcattactgggtttggtggtaaattgtttgagcaagatgctgttgttactctcaataacatgactaacccagaaactgcgccacttgtgttgaataatctcttggagacgatgaaacctagcagggaagtgattctctacaatgttaccatgaaggtgtttaggaaaagcaaggatcttgaaaagtcagagaagctgttcgatgaaatgcttgagagagggattaaaccggataatgcaactttcactacgataattagttgtgctaggcagaatggtgtacctaagagagctgttgagtggtttgagaaaatgtcttcttttggatgtgagcctgataatgtcactatggctgctatgattgatgcttacgggcgtgctggtaacgttgacatggctttgagtttgtatgatcgagcaaggactgagaaatggcgtattgacgctgttactttttcgactttgattaggatttatggtgtttctggaaactatgatgggtgtctcaatatctatgaagaaatgaaggctcttggggtgaagcctaatctggttatttacaataggttgatagattctatgggtagagccaagaggccttggcaggctaaaattatctacaaggatcttattaccaatggctttactcccaattggagtacttatgctgctcttgttagagcctatggtagagcccgttatggcgatgatgcacttgctatctaccgagagatgaaggagaagggattgtctttaactgtgattctttacaatactctcttgtccatgtgtgctgataatcgacatgttgatgaggcttttgagatttttcaagatatgaagaattgtgagacttgtgatcccgacagctggaccttctcttcgttgatcactgtgtacgcttgtagtgggagggtttcaaaggccgaggcggctcttcttcaaattagagaagctggttttgagcctactctttttgttctgacgtcagttatccagtgttatgggaaagccaagcaggtagatgatgttgtgaggacattcgatcaagtgttggaactgggtataactccggacgacagattttgtgggtgtcttctgaatgtaatgacccagacaccgagtgaggaaatcggtaaactcattggctgtgtcgagaaggctaagccaaagcttggtcaagtggttaagatgttggtcgaggagcaaaactgcgaggaaggggtgttcaagaaggaagcatctgagttgattgattccattggatctgatgtaaagaaagcatatttgaattgcttgattgatctctgtgtcaatctcaataagttggaaagagcttgtgagatcctacaactaggacttgagtatgacatttatacgggtcttcaatcaaaatctgctacccaatggtccttacatctaaaaagtctctctttgggggcagctttgaccgctcttcatgtttggatgaatgacttatcagaagcggctcttgaatccggtgaagagttccctccgttgcttggaatcaacactggacatggaaaacacaaatactcagacaaaggtctagcagctgttttcgagtctcacttgaaggagctaaatgctcctttccatgaagccccagataaggttggctggtttttgactaccagtgttgcggcaaaggcatggttggagtctagacgctcagctggaggagtttctgcgtagcccttgtaattggtatgtagctttgatattgtctatgtggcttcgagctttctccactatttagctttctttctcctgataccggatactggatcaggaaagattttgtaatgctagcaaactcgggttatacacattttgaaacaatttagagaactgattaagtttcattctccttagtttcatttcatggtcttctctgcatatccttctattgactttaatactggggcggtggtgatttgactttgccttcccctggaaagcatgctcttttgctctatttattttacatatttaagacccaggttgacatttgcatgtgcaacaagatatgtttttcaactgctgcttacattagctgaccgtaataaagaaaagagttagtgggtacatgatggtctgcacgttggtccgagagctgaatataaatttgtttgattcatggcatcatcacatcactatcaatcatgggaaactgcattcacacgttgctctgcaagcatggaaacaaggttacagatgtctggtcggatgatgaggcatcaacagagaagatcaaggagtcacctcaggatgcagctgagcaggagaaaacagggacaaggcggtgcataaagatcactctgactaggaaacagctcgagcagctgctgcaacaaaatcctcaaggcgtttcatttcagcggaaatggaagccatctttgcagacaatagtagaggtagataacttttgatagtctgtttcgctgtataagtttgaatctcgctgtggcttgaagttgaggtcgcaagagggagaaaagttttgataacaactcagtctagtagttgtaaattttgtgttcagaagatcttgtggctgctgatatgtaaagttacagctcttgtaatgggtttgtttttggaaacctattactaaagaatgtcagagttattcttatggttaagagtttttaatttgaaatcttaatgttaatcaatcacttgtgtggtaatgaaaatgtggagttttataatgtgattaaagaagagaaagattatgcctttccattggatatgaagaaaaggaagaaactttgcaaagcgatgcgatcccttattccttctttattctcttacacgaagtctttgtctggtaatcatcacgaggaaaagagacaaaacccatttcccggacaaaagcatcatcttaaaatgacgattatgtccattcacattctcttaacttagggatattcaagtaaagtaatcatgattagtgggttaaactaatgtaaacaaaggaatcttcaccaagcacacagccacttgataaggacttgagaacttgcgttgatcaacaaagccaaaggtaccaacttccaaattaaaaccatctcagtctccttcctcttatattgcaatcttcagagtttttggattcaacatctctccatttctctcctctctctcttaccaagttcaatcacaaggaaatggagatccaggcaaagctcatggaatacagattccatttcatggtgacaatcatggtgagcgtgattgtggcgtctctcgtgtatgcagcaccaaggattctgaacattttagcctatttctggcctctgtttgcgtcaacagccgccttcttagcgatggcaatcacctttggtggctttcaacagctttcagaagaagccaccggcgagagactgatggattacgtcgccggacggcctgaggattctcacaagtacgactgacaaagatttgcacacaagtatatatccatctttaaaaagctttaacaatgtaaatgatttggtgtaacttatgtcaaataaaatgtcgaatgattgtgtaacaaaatttaaaatagataaaaaaaaacagagcataaaagcagagtattaatgaagaaaacaaaaacaaactatagttggtcaataactgtattgataagcgaattcgttgacaccaatcatggcagaaacaacttgagagacgatatagaagctaccacctaagatgagtagaatgagaatggcggagattgggttcttgaggagctcaaagatgggctcaaagacagcagagagagctccagtgctaaccgtgagagcgtaaagaccgtaccttctaacgttgtcccaaaactcttccattaaaggaccttctggtccaagcgccatagctttctctgcatccattcccaataccaaaaccatcatcaaccctacagagactccaccaaccacagcatatctccagtgccgttccaaacccagaggaggaggttgtgctctttcaagcttgctgtttctgctacttttcgtagtcaatcttcttctggctgagccacaccgaacaagacatgatgttctgttccttatgcttgagcttggaaaagctagagctgctgctattgatctgctactggtaaaatggaggtgtggttgcagacaagatagtctcattttggggagagacatcatcgtcatctcacttcttcctttccttgtaggagtcagattctttcttatatactaaaacatttggtttagattgtgtggctctgattcaccttatctcttttcacaatctgtggataacttaatcgtttttctattacaaactaattttgacaaggtgtaataaacaagggaatgtcaacaaataactcattagagctcacacatatatatatatgatacaacactacacaagccttaaagttgagcaatacccttcttcacaagcatatcataaactcgatccactttggttggatcaatcttgaaaaggctatatgcatccgacttcttcgttacattccctttgaatatctcatgtgacatcacttgttgcatctgtagataaaccggtggaaccaacttgacctcgctgcagagacgcttctcctgcaaaacaaagagctttcttctttcagttacaacgacagaaaactcatctcacactgttcagtatctcagttctcagacacttacggattcagacagcagttgcgactccgtgaacccaatcaagtccaaatcattcacatagcttgaagaagcttgcacaggtggtctagagcccatctcccctgcaatttgaccaaattgaccgctctctttccctctgttcatcccttcttcgttttctctcttcctcttccttcccagatacctctctgcttcagccgttgaacgacaccctgccacttgagcttcctgctccaccaatccaacacagtgagccacatccaatccaagaaaccaaacgcacagtttgagggtagcaatgtccttaccttgagatctttgagccgtttcaccatgcggtactcgcttacaacattacggagtagctcgtcgtgctcctcttttgaatgaaaacgcataaaaacgtccaaacgtcggcattgtactttctcctcctgagacaggtccttctcaaagggatttgggtacaacaggtttctttctattatgaattcttttctacgtttcctctcatcaagcctacaaacatcatactcacctgcgtcagaatggacagcaaaaagaagagactttgtcccccttttgatcttaaatgttgtacctttttgaatagatacgcaacacacgcagcttcagttcatgttcttcaggagtatcgttctctttgaactccatctccgccaagagttgctcagcatcattgtcatattcagggtcaaactcttctcttttctggttgtaattactcagctcaaccaaagagttgtttaccgaggtggaaacaggtttcttccctccaaaacttctgtctacaaaagactctaaccacaaagaatgtcaaaacatagaaaaagggagaaaatatctaccagtataaatacaatgacaaatattgggcctttttggattttaaaattatgctcagtcagcttcttactttacaagtagatgattccatttacgcgatggttaactagattataactactggtgtaagctagagcaagtaaataacaaaacgataagcacacctatatacgaaccagatatagcatacaaagcaagaactcacctttttgtgtgtcttcaactctgcaagaaaattgaacaaaagatgagaaaattatagggttatcactgtacagtacatgagaagaacgagaaacatacttgactttaggaggagagaacgggtactcttctttcatgttctgctctgctgccaaagaagaaaccacttcaaaatcagaattaaaatagcaacacgtacaacgcagaatcaaaaccatcaagcaaagaagcgcatacctttcttgtcatcaatgcgtcctttagccatggcttgaagttcttttctgttcttccctgctacatgtgacatatcctgggaaaataaacgtttctcctgaattagttaataccttgcaaaaggctggcactactgaggtagataggtatcttatcagatcgatgtagcataccggaagtgggaaaaatggtgagttcaaatagatgtttctgtagtgctcaagacactgttctttactcttcgttcccacgtgctccgcaacctctgcccagtttcccaagccataaatttcaagtccctgaataaagacattaaaagaaattacttttcactgaaagaatcagacattatagacttcatatcagtacgataaaagaagtagtggtacctccaggagaagcatttcatcatccgcactccagtcaggacaaataagcgggaaagttagatttccctaacaaagcaaatgaaacatatattaagctttggtagaattcaaccaaaagatattttcgctaagtataatgaatcaaactctttccaaactaaaaggtaagaaaagtaaatgaaaactaaccataactcggtatgggtgatcacatttgtgaggagtgatctctgctccaacagacatacattctatacagagatcaaaatctggacagacagcacactttatcctaatttttccagtaatgtctttctggcaataatcgcagttatacttccctcctccctcagcacctggtactgtctccacaaataaaaaatgttgagtaaaagaagaatcttgacaggagaaacaaaaaaaaaaaaccttgataagtatttttttacccaaagaagtagactcaaagttctccacattagccgcatttttctttttcctcgttctgcaacaaacgcataacacgattctttcatgtcagcttcaacagtgaaaaaacaattacacagatgaaaacagagaagagactacatagctactgaaagttttcaaaagcaacaaactttaagcgatgctcattgtcccaactgaaaaatcaatgattgttgcacaaagcagatgcaaagaaacttcaaaatcaatcaatttcagcagaaattggcacaattacatagatgaagatagaggagactatagctactgaaagttatcaaaagccacaaatttgaagccatgctcattgtcccaactagagatcaatgacaattgcacaacacagactcaaagaaacttgaaattcaaatcaatttcagcacaaattggcaattacaaaagagaaatccacaaaaaccccaaatcggaaattagagtagtgaattaggaacaaacctctgagtagggtcttcgaaattttggaagttccctcgagagcgacccattgatgcccaagtagaaaattggattattgggttatgcgaaaccacagagaagaagaaccctagcgtaatgccaacatgggagactcaccggagaagatggaatgggtacttgggggggtttcgtggaagaaagatctaatcggaattcaacaaaactcggtcgaaatttgtgaggttttggatctctactaatattattcagaagttccgaccgagaagattaaaattagggaagtcgaggtaaaggaaatttctaaggcactgtactttttagattttttgggattagacggtcatgcttattactaaagcatatgacttaaactaaattgactcttataacttcaacttaaaaaactattattttttatgttaattgttgaatggtggttgagggaaaaaaaaatgaagaaaaaaaagctaagatagaccatttttattggtaattttttattattaaaataataaaaataataaaaggaaaagaaagagagtgtagaatgtttctcgttaaactatgaaatactttatacaaaccatcataatatttttctcttttcaattggttcgctaaaataaaaatttaatcatatataaaattataataaaatactaatattctttttgtttgaaaaactgtttgggtttcttcttgatggagatgtctttaatatttggttgggttatggttattcgtttttaggtattttgttcatggacattttcagtaaatgaattagcaagtaaataaacttgtataggaataaatggttagtgttgtcacacactatcggaacaacattatgatgtattttaaaatcttattgatgctaatttgaaaaattgatttggaagaaggttaagcaaggaaacaaccatataagatagtttgatgctaatttaaagtttcttattttggtcgaaaatcgaattattagaaatgtttgaaccttttttattagacatctagtgataaattttataagactcatgtcaatcgaataaaaatatcgaattgttgttttgctgaacgaataagtttgtctatattagacgcgattagttcttctaaaccacattatccaaaaaaatcgtgattgactacatggtgtaatgatacctatcataccatctcaagaatatggcatgactcatccaattaacaattgtatttgcgcataattgtaagatgtgtaaattccttttccgcttattaacggtgatttgcgataagttaattcagaagacgagtttcgattctcccatcataataggttgtactacgaaataatttcccaacatgtacacataatctcgacaaaaatccagtgatatgggtttacttgtagttgaatagatattacaccacaatgacttgtggtttggtatgtaagaaaaggcaaaagtatagtttgcagttaaaaaactgaaggaaatgatgtccttggtattaaattacgattaaacccatattctctctctcgcatagtctcttcctcttttcttctttcttcgtcaatttcagaacaagtcactacagatctgaagtgaaccaagctcaggttttgtcttctctttgatcattcctttctcagcaatataaattagagttatatcctttataaaggattttgctttttcaccaacaaaccctaaattcggtgtctcagcaagaatcacgtgattctcgttcctcttcctcacgaaacccatcatcttctatctcatttgtaagcagcgatctcaatccaaatacctttaattttatttgattccataccctaatttttgtatattccatgtcaatgaacgtttcaggagaaatgggtcaaaagttttgggagaatcaagaagatcgagcgatggttgaatccaccataggctctgaagcttgcgactttttcatctcaacagcttcagcttccaacactgccttgtccaagcttgtctcaccaccaagtgattccaatctccaacaagggttacgtcacgttgttgaaggatctgattgggattatgctcttttctggctagcgtccaacgttaatagctctgatggttgtgtcttgatctggggagatggtcattgccgtgtcaaaaagggtgcttcaggtgaggattactctcagcaagatgagatcaaaagacgtgtgcttcgcaagcttcacttgtcgttcgttggttcagatgaagatcatcgtttggtgaaatcaggagctcttactgatctcgacatgttttatctggcttctttgtacttttcctttaggtgtgataccaataagtacggtcctgctggaacctatgtgtctgggaagcctctttgggctgcagatttgcctagctgcttgagttattatagggttaggtctttcttagctaggtcagctggttttcagactgtgttgtctgtaccagtgaattctggagttgtggagcttggttctttaagacatattccagaagataagagtgtgattgagatggtgaaatcagtgtttggtgggtctgactttgttcaggctaaagaagctcctaaaatctttggtcgacagctgagtcttggtggagcaaaacctcggtctatgagtattaatttctccccgaagaccgaggatgacacgggtttctcattggaatcgtatgaggtgcaagcgatcggaggctctaatcaagtgtatggttatgagcaagggaaagatgagacattgtatctaactgacgagcaaaagccgaggaagagagggagaaaaccagcaaatggaagagaagaggctctaaaccatgtggaagcggaacggcagaggagggagaagctgaaccagagattctacgctttgagagcggtggtgcctaacatctccaagatggacaaggcttcgctccttgcagacgcaatcacttacatcacggatatgcagaagaaaatcagggtgtatgaaacagagaagcagataatgaagaggagggagagtaatcagataactccagcagaggttgattatcaacagaggcatgatgatgcagttgtaaggctaagctgtccgttggaaactcatccagtttcaaaggtgatacaaacgttgagggagaatgaagttatgcctcatgattccaacgtggccatcacagaggagggtgtggttcacacattcactctccggcctcagggtggctgcaccgctgagcagttgaaggacaagctccttgcctctctatcacagtaactatcacagcagtaactgctatgtaataagtgtaaccgtgttggaggttgtatcaatgtactattgcaagccaaccaaaaaaaactccagcttagtaggatcgtgtaattttccttatatgtaatgttgagatttgtcttttacatataaagatttgagcagaaagcttcacacttatctcctatctaaatacacaatatagaaccgtttttgttgccttgtcagtcaaaaaatttgaacacttccagtttgtctacggtctaccagttgttgagctgcgacgtaacacttttcacgaccggatggtactgagtatgcaagtacttcttcgcctcgttggaaccaggctctttaagccactcctcgaataatctcttcgccgttggattctggtatggatctgtattcaaagtctggatccaaaagggcaggttatttattactagcttagttaaaagtgatttatgagactcaaggataacttacagtatcattcatataagtagcttccagtgagtggatcagttctttctgggactgtcctgtctttggcttgatctgcccaccaccatttaggcaacctgttgagagcgagcattttggggaacggttaataagtcaacatataagacacgtttttcaactagggtttgcagaagatgaacctgcagggcacgccataatctctacatactgataatcgcatttgcgcgttttcactctccgaacaatattctggaggttctggaaaccgtaacacagcgcaaattttaacactgttttaccttccaacttcaagaaaaagatgacgaacatgagacaaatccgagggggattaatgagagaaaatttcaaaactgttcatagtctggctaagaacttacttgaagagtcacttcacggaaatcagaatttctgagagttttaaactccagaggaccttcaatagtttgtccaaatagtgcttttgccgcatgtctgaatattgtttctgcataaccaccagaactcccagctacaccataaagatctccttcctcagtaacattcgtcagcctgttttttgcatgaaaatggaaatgtttacttcgtatgtattcatcacccactagcagagaagaggaaataataatgcttcttacactctgtcaagtggagattcctccaaatctttaaagtcaactcctttcaactgcacgacacatatagaaatccaaaatcaaattcacattttctgcggtatggaagcagaattacaatgaaaatagggtttaatctctatcacagtatcacctttattaaatccatgatttcacccgttgttagcacggaatcaacttctgtcagcttaaggtctccattatcttgtgttccatcatcaaagacaaaatcatctcttgctgcctcgagtttcttatcataacagggcatcacagtcacatggtacacctcatgcagcctagttccatgaaatgctcacgttgaatccaaaatttcagaaaggtaaccaaagattcaagtgtaccaccgtacctgagtcctaatgcttgacacagatggtgtttgatcgcagctccaatagcttgctgaggactcttaacagaagacacatacggcagaacatatgagccaagctgcttttcagcataacaaatccaaccttgattcaccaaaatttccgcacgttactctcacatagtgacacatagcattacgtcaaactagtaaagttgcttaccaggacaggcagaggaaagcacagggagaggggattgagaattttcaccatcatcagaattagcttgcttataacggctcacaaactcattacaagattcaataagtaccaaatctctactgcagctagtatcaaacacagctttaactcccagagacttcaaaaacgtagtaagcttcttgaaaacctgaagaggagagatgtcatagtgaaccgcaagggaagctctcgactgtggagaaacggacacaaccacgtcttgcctttgctaagagcagagagaaactcgtctaagctttgcttctcaagcataactgtctcagctgatgtgatgcatccactgtataatcgtatacataaaccattacactctaaactctaaaactgactcagacaaagtaaatgagaggacaaacctgcaagccaagcaatccttgagagaaattttaaccggttcaagctgctgttttggggcaatcacaaccttcaaattcaaattagcacagagaaggacacgtttagctagtgaagatatatataggattcataacaaaagactaggatatgctattccctaaaacacaaaaagagactaacttgaagaaagaatgaaattcaatggcaaagcatggaaatttcggacctggggtcgatcagacttcttgacgatgggttttgagtccttaagagatatgacacaagcttgagacggagcaatgaaatcgttgagatctccgagcctcaaagtcggtgaaaacttctctgacatatcgctttctattcaaaacttaaaaatctaatctttagagacgaagaaactagtataaccaaaacaaaggagcaaagattaaggattggtgtcggagaagctgagggtatcggaaaactagaacggcgtcgaaaggtgctttcttcctctattggttctaaaattgcaaactggggtctcaaattacctaaaaggggttgaaaaagtcaaaaatgtaaattgcatagcgggcctagtaataatcttattgtgtaagggcctaaatgcaaatagagaagcaatagaggtcggtgacacaatgagggtgatgctttgctcaacaataagtcaataaccttggtctcgttttttatcacagcatatggcacattgacacagaacatcaatagtctagttttacatattgtttgtcacatataacatcatcaagaagaagaagaagaagaaccaacaagagcctacacttttgttactatatgtttttttaacaacaacattttcaacactactaaagacaaagccgcattcacttcaccacggcgtggttctgcggtctttggtggcaccgtacaagcggaagagactaaaagcagaaatgcaggagacgaaaaccatagcaatggaggctaacaaggcgctagagactcctatagccatttggttgcagaactttccatacatagtacacactctcatccattgcaaatcttcctctccttccctagcaatcacaccagactctgctgttgctgcaatggctgccacattcaagtacgccatcgcctgctcattcaaaatcacaactacactcttaaatggccaacgaaacttcaattccaaatgcaagcaaacaagcaacattcctacctaagttaattcaattctgatatccaaccaaacccatttaatgcttagagacttttcaacatagtaccctacttttctctaatttgacctgagatctcaaaataacaaagccaaaccccaaaaatcccacatccaattcactaattttggcaaacaaaatgtatgtaaaaagagaaacacaaactaaaactcacctgatcaccagagaaaaaggcccaagcaagaggcttactaaacaaaacctttcctttcatcgtacccaccacgcaacgaactgattgcaacaaagaataaaccgcagctatcccattagccaccaccaagaacctgcatcaatcaatcccaacaataacaacaaaaaagttacaaactttgcaatctatctcaagtcaaagtactaaatccgaaatgggtttatgataagcttacacaaccgccttcatgtccgtgtacttggccgtcttcttgatagtgaagataagcttgacctcagtgtctgtcacaactagaataagcgcgaggagagcgaagacactgatggagcaccgtaagagcagctccgttaacctcattcttcgatctattaacttcatcttgcttctgtatcctccaggacagatttcggcccccaaaataaactcacttgtactcttaaaaatccgattttggacaagacaagaagacaggttccgtagagagactaaagagaaatagtgtccacactcggcttaaggctttaaatagagagttccatgcttttacttcacatcgcttgggtccttaggcttttattgaaaaatatcaccaaaattgaaactgtgttaacgaataagtttgctactagttttgtgtaaattaaggctggacaaattagtttctagattcaactagttactaaaagaccaacatatgaagtgaagtgttattagttattgttatcatttttactattattaccaccgtcttcatttttcactttttactatttgaaggaaaaaacaatagatgaattcactgaatagttcataatgaaaatactttttttttttcgtttcttaaaaacttatggtttttttcgtttttagtcttttagaggagaaaattggatatttgaaacttttctaggaattcaactttctcttaagtaaaagtgtaaaacggatcacataatttagatatcctacaaatacggatacttatttcttacatgaaatttatagtaaaccaattatatcttcacaatgatctcattttgtcgtgacttcttgttttagagtaaacttttaatatgctattgaattaggggtgatagagagacacagaaacatagtccctaaatctgccaagtggtagaaaagttcttgtagacgttactacgtatattattatgagatgcattgaattgaaatgtgcatgggttctgatcacaaacccaaaacacaacatttttctaacatcccccctcccttaaagacgaaagtgagatatcacaatgacctttaggattaattaaattacaatgctccatatttgtcttttaatgttctaggaaaatggagagaagaagaagaagaagaagagaagattgttatctatcccgaggagattattaaattattaagatgggactttggatgcccacatacacaactatttaatgaaccttcttcttatttattgcacttcccatctcccaattagcccctctaaccaaacccttttctttggttctgtcttattaactcttactaataggcttaaccaaatccaatcaagttctttgatttagaaagacaagtgtagatgatgtgacacgtgcacgttcctttcaaaccaaacaagatactatgatttaaattgttttccttaattaagtaatgtggtggttggaagtggatattataatgccctcgaattaattgctaaaaagattctcccattaaactttagtgccttcaccaagctacccacttttaataatagtaagtatttttatttctctcttccattttcggtgatataatgctacatcttaatgaaccacatgcattggcatcgtgttgaataagtacacgcgtctttagaatctgattttacaaagtcggtgttacaagataaaaattgacaacacgtagaggaatagagacaatgtgtttgttatggtgtatatatacacattgggtaaatattggggctgcttctacggtaacaacctgctcaactctcaaaaacgaactacttgttattggtaaaatccaacaaacaaccagagaaaaagagtcatataaatatacattgttaaggaagattaggaacaaaaagagaagcacaatttctgccacaagtgtctcctaaaaggctacaactttgaactcaaaaaccatccaatcttcactcttttcagggatgcgatttagaactccacgaacctacacacatatttgctcactctgtttgagagtatgagccacggtatgatcccgacctgcatttttacccaaccaacactctcaatcaagaacaagcccaaataaatggattgagaagaaggaacttaccattacatggcctgtcatgtgacctcctgttccccaagataacaaagtccctgtgaaacacaccacattcatttttttcctatgtgttatataccataagcgagctttaacctggtaaaagtaaactactcaccaaacggttgaacaagttgcttagcgataatggcaattggagtcctccagaagcacaataccaagattaggtatatcacaacctagaaacaaagttcttagcacatctcgattaaggagttttagacggaaaaaaagaagaagcttgagcacacaaactaagctaccttcgaagcaagcagacccttcccatacatatcgtatgaaagcttgatttctttgtgatgctgctccagatctaaaatttcaaaatgagaattaacaaatacacacacacaccaatactacaccatgatgatgcagtgctttagtaggaatatctgctaccagatagtattcatgtttaaagctaactaactgttgcatcatatttctgaatttcatgaactctacactcacaaagcaatcaatcatatttctgaatttcatgatctctacactcactaagcaatcaatcatatttctgaatttcatgaactctacgctcactaagcaatcaatgtagaactaataatgtatgcatactcacattgtgcaagttctttctctttagtagctgctgacctcctaagtttcgctgcttgcgcaaatgtggctggcctgcaagtaaacaatagataaatctctaatcaacaacactcatatatatatttttcaacaactgcaccttccttaactcaaatcactagaaccaaaacaaaatgtgacaacaaaatggcttactgagacaatgcactagcctctctcaaaagctgcttaatttcggttcgcagctctgattccctcgtgttcttcgaccctttctgaagaaattccataattcaaaacgatgattcatgtggatatgaaaaaaagccaaaaagtattatcttttttaccttcttcaattggtcaagccacttggatagcaattggaagacaacgacgacgacgaaggtcagaggagcagccaaaaagccgcgatcttctataagcttctctccttccattaacccttttgctgattactgattctaacgtaattcaccaatctgctcgaacaattcataactcagtaccattcagatcaacaaaataaaagccttaattgaatccatcatgttctggataaacatatcatctaatcaatggaggaggaaaagattctagtgcatatagaatgagatcgtcgtgagtatgatcggaacttacaatctccgtcgtggattcacagaaatttgaagccttcaagccgaggttaacgtctgaaattgaacgaacgatgggaatttagaattggcctgaatctgtaaaagaggagggttctgattttgataaaacaaaagtttctactcgtttcgtgaaataaataaaactcaagcccttatgtgtaaacaacaataactaaaccctttttcaacaggctctattgggcttcgttgaaataaagaaacggcccattaaattaaaactaaaccgcttgtttattttctttaaaatttcattaagcttgggtatacatgagtacatgtgaaaagaaacaacaactaggctacaagtttcagtcaacagtaaaagtatccaaatttagaatgaataggataaaaatagatataaatagtagagatgtagtaaaactacaaaatggagggtaagaaattagaaatgtgaaaatttaacaaacataatgtattctttttacgtggagtggttgtaatggttttaccagaaatggcacgcgttgtctctaatctttctcaactaatctaaagacactatatgttttgtctcatccgatcccacttaattatgttaatcatctatctaattggggttatcaccaaatcagagcattatcgataacatcgcagataccgaagctgaaaaaaggaagaaaaacaatgtaagtccaaatcctaaacgtcgtagcatcttcagctttcgtgtatgcatgccattatattccaattacttgacgacaaacttttgctcccaccacttttgatgtgcctttcaaactttgtatccccattgtccacttcctctttctttcaacccgctccgttttgtagctatactgtctcactttttttcgttgttagaggtgtaacaataaatttaccaatttaatctaatatatcatttcatttgtaatgatatcaacattcttatctaatatcaacaatcaagagtgatacattataaaggcatttgacatttgtatatattggtgaatatatgtgagataagttttgtaccttgtggaccaattaatgtggggagtttgcagaatccgactatgaagtgaaactcaaaatgcacacatgtggtttagaattgtatcagaaaattttacattatatgggtgttaagaattatatgtactgcaattattatatatatcaaacacaactaatatctattatataagattatcacgataggaaatatataagtttgcatcggctttgcattgaacacatatattaattgatacgtatatagtattctacttttttataaattaatcttttcgatccctaaattagtaaaaatatgataatgtacatgcatggatgttttcattatgggaagggagcgtagagtagcattttgatcgagagaaaacgaggagatcgagagagaatgtcttgtgtaaaaatgagtggtctttttcacaattatttatcaatcaaaacacatctcatacatatatgttgatatcattattccctagtctattgaactccatttgtctttttatcaatagataggcccactttttatatactttttcctccttgccaaatcataagaagttaaaacttaaaagtggatcaactaatttatagaaaccattaacaacttttgacactcttctttaatgtgtgtttcatttttaattgaatgccaataatataactttaaattccactgagaagatttgacgtagagacaaagaagtggctccaattcaccatctcccaagccaccaaaatctctcctaaacccttttgtcactcccttttctcatattcactttttttccaaggaatatttaaaacctcatgcaagttttcttgaatataacaacatacgaatatgatctttgattagattactcttttatatattatggttaggcatgtccttgcaagatttttgtatttaacatattgaaaatttatcattgaattacaactctgttatgcatacaatcaaatcaaacgtttaagaagaccatcccttatatatatttatatacaccctatattctcgggatgtaataaagtttccatttcaaataaaaagagcccttaaagggaggtaagtggggggcatgaaaaaagggtttatatatctcaataatcatccaaacaaaccaatccatgtgcttcccttcaaacattcttcttgtcattttcctcccaaccattttctactttggccaactttttttcttttgcttcttaaaaataaaaataaaaatatgcaaatttccactcacacattatacattctctttttacaatccttagattgtcacttttgccttcttcctcttgttctcttaccactttactcctgattctcttcctttcggaatttcatcgaactactcaacaaccctatatacttttattgtttttaaagtattctcatgcagattaaataataagaaataatatacacctttttcctccttatataaataggctcaacacacgtaacatggccccaaaccctagcaagactctctctaagactcatatcattacgtcatgagttcaatagcaagagaccgaaaggaacaaatggtgatccattcttcaatcgtcttgcttcaagaaagattcagacaacttcagagagcaagagagttaagagctgaacgagagctcctaaaccctaaacctaaccaccaagacaacatcttgcaatattacagcgaacccactagtttcggtttctttcagtttctacctataaactctcaaacatcttcgtcacagcagctcctatccctctccttatgctcacactccacctctgaatccattgaaaagccaagcttttgtcatcagtggccaaataaagatgacaagaagatgggtgggattgatcgatacgacgatgttgacacgtctctgcatctctaaaactaaaataattgttcctccatctttttgaagttctaattaaatatgtatgtatatagagtttgttttcgtcggtatgctcttctaaagagtcttctaggtggtggtgatatatgtatggttaaaatggcaatcatatatattaattatttcgaagttaatgattatgatatattttatatcacgatgataaagatcgatctactcattgatttattggttattcttttgttgatggttaattggttactatatcattcctcaagtctttgcttatacgtatccatgtaatgtttagctttttatatatacgtaactacttctacctcaacttcaccaacgaaggcatggtaaataactaaagatgtcggagtggttaagaagacagacttgaaatttgatttcagttgggctccgcttgcgcatgttgaaaactctgcttttgcagctttgcttcttattgtttttgacgatttttcttaaagatagtaaataattgatcatacaagtcgtgccaaaaaatcgtcaatcaaagttcaaaacctacttgcatcgtatttgattcagtactcttatatatgtgtcagtaataattgagatagagaaagatagaactaaaatgtcgacactcaatcatagatagatttttaagagaataaaactcgagtactattcaatactatatcgtgcatgttgttagatctgctattttcgatcgtttggagcttgattgacttaaatgggctcattcgggtctgttatgagaaagcccaaccaagaaagtttatgggtcaaagagaaaagcctctagacgaaagagaggatctcagcttctgttgaaatgaatataacctagaaattgattttgatcggaagaagaagaaagaagatagaatcagagatttgtagattttatcgatcgaagatgaatactgacataactgccttggagaaggcacaatacccagtggttgatcggaatcctgcttttactaaagtcgtcggcaatttcaggactctcgattacctccgtttctctactatcaccggcatctccgtcaccgtcggctatctctctggttcatccacacacctctctcttgaaatttctgattctgtaggttgagaatgtgctgatttggtgtttttggaaatggcgattttgtagggattaagcctgggattaagggaccgtcgatggttactggaggattgatcgggctcatgggaggtttcatgtatgcgtaccagaactctgccggtagactcatggggtttttccctaatgatggtgaagttgctagttaccagaagcgtggtggtttctccaaatgaatgactttagtgttttattttctggatctggcttcattttggaatttgaaaccctctctttttctctgtaatttgattgcatttctctgctgtttgaggataatatgtgcctctgtttgtctgttatgacttgatggtgatgatcaataagatttgagacaaggaattgtggtgatagatttttgtgattgtgagtgagtgatgttgcaataaggaatctttagtgctgcaattagaccagtctgataggtttctttgttgtatatgtattggtttgtagatagatgaacctaggagcagctgcattcgaatccctcagagacaccttgtcctataaaatgttattggtgctccttgtctatctagcttctggaatttccctgcgacattattctgttgcaaagctatgtcgaggttattgtggtttgggctgtaaatgattgcttctaggattgccattttatcctagaggtgattggtgcactcaaagcaatcagattttgtagcttctcctcttgtggttcgttgttgtgcagaggatgcatgtatcaacaggtaaaagttagagtccatctaattttgattcgttgagaggatagatgggctttgccttggtgatggaatatatgatcttcctagtcctcctaattccgccaatgtttagacgggatgagttcatcgataaagttgtcgtcatggctaggacctctatgtctaacacattgatgcatcgcacatctattatagtttgatctgcctcttaatttcgtctcaattgcattattttcatgcctagttactgcttcctctcctcactttcgacatagttgttgtctcgtgtgttgcatatatagaaatggtaacatcgacgaaactaaactagataggacctttaaatctgggcattaagtcaataaaagaagcatgtctcaatagagttttgacgactcattttttctttagtttttctctctatttctcttctttataatgctcacatgtcatcaataagaacacactcattcttcattggaatgtattaccatgcacgagggctcttatgtgttactgacaaaacaaatcacattttgtaaatactttaatgcaaagttgaaaattgatgatgtactttatttactcgatgtagcttgagaatcgatactccatttcctttttaagtataaacaaacgaaaatttaccttattactcacaccacaataatatcatatcaatcacacgttcaaagggatgccttcttattgccattagcatctcagacataggcaacgagcgaatgatctccatttcttgtcaatattcctattgtagaaaagacctaaacacttacagtctctcgtacctttttccccacacgcactgttagtatagtcgacgatcctccgttatacttggtcataatactatcagctccttttgggatagcatctagtcagagtcggagtctttacaagtctcgtcccaagacatgatcatgtattatctatacattgcacgactgatgttggacgtattttctctaaatttgtatcataagatggttgtgttattaggttgagtgaagagccataatcctgtttatgtaggtatgtcaattatggccaaagctggcgagctgatcgggcccagacctaaaataaattcaaaagcaaaactccaccaagcacaacctaaaacaaaatcaaaaacagaatcttataaatgactacccactcatttcaaagtagtttgagcacatcttcgaatagaaatcagagttccagccactagttactttttaacaaaaaatgactacagttatccttaccttttaacaaaaaacctaaagtgctatattatgttgttttaaattttactattatatcattaactatcatagcataccaaaaagtactatcgtaggagtgacacctaccatatctgccgagaacatagcgtttatgaatttactatttataacgtaagatttcagattttttgcggtaaaaatgaataaatttcttgtaatgactgtgtgtctacatgtgtacatcatctcataaagatggaaaaggtgacttgtcatgcactacaagaccaaaaacaagattggaagtgaggaaattattcaagttttcacactaaaaatcaaagaagctcataaatgttgtcatacctttaaacagcttacttcatagatgttacacatgtcatcaacaaacaactcgcgacaaactcgatttgtagctacgaacagttttcacattctcctgaatcatgcaagccccaagtaaagaaccacatacaggagcatgttccttgcatggtgacttcatttcaaaattgtacgcttcttggtaacggcacgtagccaatgatctttttgggagtttattatattgctccctagattctttggtgtccgtttgttagttttcataatatgtgaccatagccaaattatttttcataagagctcttgtttcttgaataattttaagtgatttttttcactaatgttatttatcaacaatcataggtattgattcaatcattatgaaggatagattgtggttctttgaaaaagatatgctacaactgtccaaagaacacaattacaatgatttgaacttaactattaaatgttggttatttacttatttatataactactagtagattgctatgtatagttgtaagtaattgtatctaacaaaaacaaacaatggaataacatttgttaaaatttatttatatagctactagtagtccgctttgtatcgatgtaagtaaatgtatctaacaaaaacaaacgatagaataacatttgttgaaaattattaaatcaaaacaatcatatatataaaagtaagttcttaatctctccttattaatccacttgcaatatactcttaagtttttagaattaggccagatcagcccgcgagcattggcccttactaaagccaaaattttatcaagtcaatcttaattttatgaaccgggttttactgagagtagaaattgtcttgaagttgatggaaaccacaaactcaaagacatgcgggtagcgcgtgaaaaatagaaaaccaaagaaatcttagaaaaccaaaggaatgcacgtatagctatatatattatacaaatatgctaatgtaataactaataaggatgttatatgataacggttgattaaaatttaaatgtatcgtcatataaattacaagaatcatatatataaaagttggtcaactctcttcatatgattgacacatcatcactttaacatttgtcatgtgtctattaaataattaatgtaagtttttcaacttctaatatataggttaattatatatttcttatttaatttacatattattatattttacatatttaattgtagtattactaaatttattttaatattaaatgatttttcaataaaaccattttaatagttttctcatactcgaattttttttttcgtaatccaaactcaaagtatggatatataatagtcgtgaattacttaatgatttgagtaagttattctctgatatttatatttatattctcgtaaattgatatttaaataataaatcattgagggtgaaagatacgtaaggagttccatcgtcaaattcttaggtttctataatccaacactaccttctgttaaattggtttaagacaaacgttgtttatgaattatgtgtatgatgcattgttgagaatattgttagaaaaaaatatttttaatactaaaaataattgcttatttcattattgaatgattagataaataaaaattatatttaaattaaacaatctaaaaaaatccaaaaaaaccgcggcgtaacgcaggtgatcacctagtgcaaattaaaagttattgagaaggaacctcctacaatggttcattcctcagcttgtttatgaattttattttcacaccagactttcacattcagataatattaatctaattatactaaattaacaatcacttttttaataactgatgcattctccatttgatatgtggcataagtttcaaattctatttatctattttttcttctctttcatatctatttatttacgacttttttaaaaaaaagttcttttaaaaaatttaaaactatttttcttccctacatctccatgatctctacaatcttcaaataaattattttctttcacacatttgtgacaaaaaaaaattgttttttaaaataaaaattgttatgaataaagatggatgcccattataaggcccatcatctaagcccatcatctagatgtttctagggttttaccctttccttgtactcctatataaagaaccctttatctcaatggaataacacactcatttatttatttatttatttatctcaaaattgtatcttcttccccaacagttgatttatttattttgacataataatgatacaacttttttgtgtgtgttttaatactaatacatatgtttgatattttaaaaatattttaatatatattcttaattaacatttaacatcatatgtttgatgttatatgataacggttgattaaaatttaatggaattaaaaaaaaaaaaaaagaattaacatttgttgggagaaaacgttcgtcgaatcctctgacccctttatcgccgacgcttcaaactcggtgacgtatgttcaggtcagttgttgaatctctttctctcgcatcgtttcatcttcggtgatcgactacaattttcacacgcataatcgcttccgtagttctatcaactctcatgacggccgggtttgcgagtgccgtgtgatgatcgattaggtgtttttgttcgccaaaaagatttgttttcttgacctggttattgcgaaattagggttcgttggttctaaaacgtgtttgtcaagtagtctgagcctagggtttattggttcggtagatccacacggaaatgtgtatccttttatttatttacgtacggtcatgtggattttcttgaaatatgttattaaattctgattttggacacagtttacaattgaattctgagtaaatacagagtcatatgcgagccatagaatggagggagaggcagttgaatctaggagtagtaggaaggagcaggaaagggaaagaaggcgtctacgagacagagaaagaagacaatcaatgagccaggatgagagggaaaggcatttggctcggcgccgcaagaactaccagctgagaaggcagagagctgaggtaaaccgccttgactctccgatccaagcaatcactggaggcaaccaagcagcactgaattcaccgcctgattctggagccagctttgttgagtctgatcagagtgagggtctctcattctaattaatggaaatactaaaacacaagttgttgtgaaagtgtgtatcatatgtgtgcgtgtttggggacatgcaggtgtggtaataccagtggaagagctggctaagatgatggggactatacggctgacacgtctgaaacatctggcgaggacactgaacaagtccagcactagtactggtgcagagtcaagcaacacaggagcaacagacgcaaagacaagatgtaattaagctatagctaagtcaatatctaattcagagagagagatctatcttcattaattaaggctacgtcaatggacaggtgcaatgtcaaatgggctacgtctgagtcggataaaacgactggtgagatttaagggccagcaactgaggatcttgtcacattcccaaacaccaggttcgtaaataacttgcaaagtatttaaaagggttgatatatatatatatatatatatatatatatatatatatatatatatatatatattttagatgatgattacaacaaattaagtcacttttttctttctctaatgttattttcttcttgtgtcaacagaacctcagcttcactagagttgacaacttgaacgagaacctcatcaatattattgtttgtaaaagtgaaagtattattcttttggagatccacagctaggaaaactgaccatatttgttttgaaatacaagtgggattacattacattcttcattttttttttgtcacagccatctcctatacggcttttatcatttgtagttcggaagaagaaacgagaatgagatatcatagttgagtaatctgttttgctgaacaagataataagtttgacaatgtgacaattcttttgttattgattgaagtatagcaaaacatacataaaagctttgaatctttgagaatgaaggatggccaagcagttgatgccataagaagttgtcagattacacaatattacaacaataacagagaaaataacactagggctatgaggttatctctaaaaaagtagatcttttgatgcagtttggtagtcccaagcatggagctctggatatatttatatatatgggttataacttataaagatacaaggatggaagtttactgataaagcatttccggggagaaaaaagctaacatttgttagattcaaattaacaaggaagagaaatgtgaaaaaaaaaaagtttatatcatgtataactaaaatatatagtagacatgttgcaccaaaatccaagttgtgtttttgtttatatttatcagtgtgcaacagttaacgtgtagctttcatagctcagttggttagagcacccgtttagtaagcgggaggtcttgagttcaactctcaatgaaagcaattagtaaaattatttttgctcgtaatgggcttatatattggcgcatttttttttttgaggccctttcttattgttagactccggttaacctttgctgatcttactcgcagggtccttaaacaagatatgctacaactgtccaaagaacaccattacaatgatttgaatttgagaactataaaaagtttgttatttatataaccacaactagtagtgcgcaatgtatcgatgtgagtaaatgtatgtgaccagaaaacagaaaacgatgaaataaacatttgttgaattgagaataggacctatttacattctccaaagatatgagtttacatcaataccaatcacatcaatgtatactttctattcaatccaaattcagactaccttctaaaattatctacaaatcacattctaccaaccaattagttaatgaccgtccaaaccacaacagattccacagtgtgcctattctctcttccaggcttaatatgagaaagtgcaacagcatccttggaaacaaaattctttcagctgttgttgcgttcaaacaatgcaagacaagacgacatatcagtccatcaaacaggacagctagagtctaagccatctggatagtagtcaatatccataaagaatgaagtcatctcatggaccttcttgtatatcttttcagagagtctgtgagacgtatcatccttcatgaatctatgaacttccccttgtaattctatctggctatacccgggatcttttttcactcctgcattctccatcttcctcctaacctttgaggcagcttcacgtaatccacaactcgcgtatccattggcaaacacaacgtaattccctccatttgttggatccaactctaaaaattttgtagctgcgagttctagcagtttcacattcccatgaatcctgcaagccccaagtaaagaaccccatactgggggatgctccttgcatggtgacttcattacaaattcatacgcttcttgtaacctaccagcacgccctaacgtatcaaccatagcagcatagtgttgtccctcaggttcaatcccgtaatctctcttcatagaatagaaatgctcccaacctttatcaactaaacctccatggttacacgcagtgagaaccaccaaaaaagtaaccggatttggtctacaaccttcttccttcatcttttcaaagcattttaacacctctgaaacttttccatgatatccatagccagatatcaatgaggtccacgtaatcacatttctagtggacaattgatcaaatactctgtggccatcagagaagctactgcatttaaagtacatatcaacaagagcactatcaactataatgttcgacttaatacaccgctttatcatcacagcgtgagctctctttccatgttccaaccgatctaacgcagaacaagctctaaacactgaagcaaatgtatactgatcaggaactattctgttctgtctcatatcataataaataaaaagcccttcttgctctaaacctttttgcacatacccagatatcattgcattccacggtatcaaatctctaatcttcaaactacgaaagagaatcccagctgtttgaagatcacctgataaggcgtaaagtatcaacaacttaactttcaaatactcattgagagcaaatccaacaacaaacatctgagcatgtatacgtttcccttttgtatactccttcctttgtttacattcctgcaacagtacagcataagtctcaggctctacttgcaatccgctactccataacaacccaacagcttctttcaatctccctgtaacacatagaccctttaatgtcttatctagcttctctgttttcctctgattctccacctgaaacctagaaccaaattttgatcactcaatggaaaaagcttcagactttacaatctcataagagatgatcatagcagaattataaaaaggttcagcctttatacgtgatacaagaacaaagataaagattccaattttagacgaataaacccaaaatcagggaaatgaatttcgaaaccttccaattctcttctctgcaagcatccggcgtaggatcgtcgtcgcatttccggagaacatagaaccggaagccgacgtctgagacgcctctgtttggaactcccgagtgtagtaaaccattgcaagcttattcagcttgaagcaaatagtcaaacattgggatttgtgagaaagagaagaagagattaacgttttcattctcacatcacccaccttaccgatggagaaattgtgcctcggaattaaaaatttcgaatttagggttcttcaagcacagtggaaagtgtttaatatttgtaatatgttttgatataaatatgtctgatttcagttattaaaaagtcaagatggccgagttggtctaaggcgccagtttcaggtactggtccgaaagggcgtgggttcaaatcccactcttgacatattctttttgtatttaactatttatttttttcttatatgaaaaacataataggaatatttatcaaaagtcatgaaaataaagaaaaagaagagaagatgataagagagaacaaaagaataattagctaacacaactttagatgatactctttttttgtttgttttaagacaggtaattcagttaattataaactagataattatttctcgtgtttggttggcttaaaacacgtacatctgtgtttgagatatgtcgaggaaagtgttcgtcgtgggaagacttttcttccaacttgaaattttgatacaaactgatgttgctcatatatactaataatagccagatctaactgttacagttattaactaacacaactttaggacacacggtttttttcttttgactaatgagattttgagaagaaaacacaaccactaaacaaaaccattttccagtgaatcattcttacctcaaatattgacctaaagttaatccttaattattggatatttagaccatttgttttaccatcaagctgtcactgttacatttctttttattcttcttctaaatttagcatttcaattttgagcttgttctctataaatacagtttcccaaatccataacacattcattcttgttttgtttcaatagtgttaacttaaacagtattcagagaaaaatatttgtttactcgatcgagatttggggaaaacataatcagaccaggtaaaattttctctgctttgtaaaaatctggctgatgtaattagaagatatcatcacctctttcataattatccctgctttaggatttagattggctcatgtattatggtatggaaattaaatgtagtagttatccagaaaattatctggttggttatctcttgaaaagataatcaggtaatatggtacttaatcacagagattagttagttatctagggaggtctcctttttacttttcacccagaatctcgtgaaactcggatttaaccatcaaacgagatcgtcaaaagtaattaatccatgtaggtcccacttaatcaactttataattaagagaatcttatccaaattcatctcatcttctatcctctcatctcctcgtatctcactctctgttgtgttctagtaaaaactaattctctggtacgacactggaacattttctttcttttttaacttattatgtttttttcacttgcatgtcttattcggtttggtcttctaatctaattgttgactttgactataagatctgtctaaatggaaaggaacaaaatgaaaatcttaaaacctttaatgatagaagatgatgattttaaatttcccttttcgaatatattcgtttaattgtctctttatataattaacagtttttgttaatgggaatcgcaggtaacgattgagaagaatctctcttttctccactgagagaatcacattctgagagatcagacaagaagaaacaatggtggaaggaggaattgcgaaagcagacaaaacagagttcacagagtgttggagaacaacatggaagacaccttacatcatgcgacttgctctctccgccggaatcggaggtcttctcttcggttacgataccggagtcatttccggagctcttcttttcatcaaagaagattttgatgaagttgataagaaaacatggcttcagtcaactattgttagtatggcagtggctggagccatcgtcggagcagcagtcggaggttggatcaatgataagtttggtaggaggatgtcgattcttatcgccgatgttcttttcttgatcggtgcgattgtgatggcatttgctccggctccttgggttatcatcgttggaagaatctttgttgggtttggtgttggtatggcttcgatgacgtctccgttgtatatctctgaagcttctccggcgaggattagaggtgcacttgttagtaccaatggtcttctcatcactggtggacaattcttctcgtacctcatcaatcttgcttttgtccatgtaagtaaaaataatttagtttcaagttcttgtgtattataaccaattcaagaatgtctctaaatttgattgaaaatgttgttgaatagactccgggaacatggagatggatgttgggtgttgcgggagttccagctattgttcagtttgtgcttatgttgtcgctacctgagtctccaaggtggttatatagaaaggacaggattgcggaatccagagcgattcttgagaggatttacccggctgacgaagtggaggcggagatggaagctttgaaactgtcagtggaggcagagaaagcagacgaggcaatcattggagatagcttctctgcaaagctgaaaggagctttcgggaatcccgttgttcgacgtggactcgctgctggtatcacggtgcaagtggctcagcagtttgtggggatcaacactgtcatgtactacagtccttctattgtgcaatttgctggttacgcctctaacaagacagctatggccttgtctcttattacttccggtttgaatgctttgggttctattgtgagcatgatgtttgtcgatcggtacgggagaaggaagctcatgatcatctctatgtttgggatcatagcatgtcttatcatcttagccacggtgttctcacaagcggccatccacgcccccaagatcgatgcgtttgagtcaaggacgtttgcaccaaatgctacttgttcagcatatgcccctctcgcagccgaaaatgctcctccctcgaggtggaactgcatgaagtgtctcaggtccgaatgtggattctgcgccagcggggtacagccgtacgcaccaggagcatgtgtggtgttgtcagatgacatgaaagcaacttgcagctcaagaggaagaacattcttcaaagatggatgtccaagcaagtttgggttcttagctatagtgtttttggggctttacatcgtagtctacgcaccaggtatgggcactgtcccgtggatcgtcaactctgagatctatccgctcagatacagaggtcttggtggaggaatagccgccgtctcgaattgggtctccaacctgatagtgagtgagagcttcctctcactcacccatgctctcggctcctctggtaccttccttctctttgctggcttctccacgatcgggctcttcttcatttggttgctcgttcctgagaccaaagggcttcagtttgaggaggtcgagaagttgctcgaggtcggcttcaagcccagtctcttgcggcggagggagaagaagggcaaagaagtcgatgctgcttaagacgatgatgatcacttatctctctctttctatttttattattgtcgctgtctgttcctaattctataatgtatgacaccggatttggaatacgtatttttcaacaccttttaaaacctcaaagaccacgattcaaagcaaaacttctaccaacgtgaattttccccaaaaagagtttacaaaagcacatagcagacagctttgtgcagccaaagcatcagcttaataagtgaaatgcttacttttgagacagtagtcataactatcaatgtcaaagtggtgggacaaactactgtttcaacgataaccatttactattgtaggacaagaccatgcaagtggtgccagatatgctgacacacaaatcatcaaccagatccaccgtcacagacacagatccacaaacaaacactcgaaagatcctacaataattgatccagatagagttaaaaacaattttgatcaagaaatatcgattaaaaattgcttagttcttgaacaagccatttgccgacgctactacaaagctttttgccttaaaaatcagcataatccacccaccctcacaaaccagaagccaaaacctgaatgctagacttgtaaaccaaataaataagcactctcccttgaaactcctcaaaaactagcttaaccatcaatacatgagagagatcaaaagtcagtcaagtttctggtaatcatttgatctctcttttacagtctacacaaaagacgctatacaaaacccaccaaacatacactcagtatatacatactagactgatgaaacctccacatggttgcatttcatgggcttgatgaacttgcctccttccttggctcccgaagataccccagaagtctttctgcctgcatgatacaaaacgataaatcttgttcaaattcaagtttttcaactttttaccaaatatttaagaatagtctaatccgtaacagagagacaccaatacataagaataatctaatccgtaacagaagaatctgagtgttttgtagctaagctaacgcatttggtcaagctaaatgaacgaagatgcaatgagaaaatagaaaaatagtaaagtttttaccttgcgcttagctctaacactgacggagccgctctgagagaggcccacaagcggaggaatcgcgccttccctcacaagcaacccacggtttctaacgctatcagaacaaagctgcaacagcgtcaagatcgcaaattctttccctttcacagatccatcctcgatggcctcaacaagcgctgcgatccctccttcctcgacaatagcctctttgccatcatctatcgctgcaaggctactcagaaccaccatagctttctccgccataccagtcccttcctcagccacaaggtccaccaacggcttcaccgctccagcagtgaccgctctctccttgttttgctgaagcgtacacagcttgtagagcgtcgtcaacgcatccttctttcccctgcaagatccgttcaacagaagagaaaccagcggcggaatagcaccgcaagctccgattgagcctttgttctcctccaatagcgccaaactaagcaaagcacatgcagcgttctgctttgaagtctccgtccccgttttgagtacccacactagtgatttaatcgctcctcctgcggcgattacagctttgttctggtcgtgtaacgaggaggtttaacagagctgtaactgcgtgctcttgcgtccatggatcgttacaacgaagaagtggaatcaaagcttgaatagctccagattccccaatcaacacacgattatccgctcgattcttcgccaatagccgtagcttcgccgcagcagatcgctttatcgccaccgaagaggaacgaagtccgtcgatgcatagtttcacagttggctgcagatcttccggcgaaatacactcgataatctctgtagagaagttttctctctgtagaaaccctagacaaggctctctctctaactctggatcatgctccgcttcgttatctccgccgctctcatttctatcagcctccggcgacggcaagcaagcaagacgctgtaactcgccggagatatcactactacaagcggaaaaatcactaaacgcctgagaaatgtcgagaaacgcttcctctttcattgaggaagcgtttgaattgagagaattactgtttttcaaagcaagctcgccgagtctcatgtcgatgacggaatccgagagaaactccgacgcatactctgatttatcgccgattgagccgacgaatgagcaagattgatctccgctttgatagaagttagatctcactgttctcatcgaccggccagcttgacggtgtaacctcgccgccgacggcgatgatgaaccgtagaaatcggttgttaacggaaagcgagtggaattggaatgagataaaggttcctccaccgataccatttttgcaaaactcgaattcgatatctgtttgttctttcaaaaaatctctaaactttcatggtgactggtgagattaaagaggaggagggaggcttgaggaagaggatgagagaaggtttttaaaaacttgtagctgttggtatctggtgattcttcagtcacgggactgtgacgagttttctaaatcaatgttacacgtggcgagatctagaggtggatgtaattaaatcgacggtttagaaggagaagcgtattggtcgcatgtctgtgtcaccagccatgtggaccgtgacttttaggtgtagtcaggagggggtccaggttaaactacaaaaaagcccctgcaaacagaagaatgaagttcacaagacacgtggggacagttggcttttttggtaattccgatacacggctgtgccgatgaggtctttgagagttatgaacggctttgagaaagagttgttttacaccgttagattggatgatccaacggttgttagagctttaaattctacacctcggtgccacgtgcagagcttgtcgacatagattcattcatgggccaatgccttgggttttactcttcagtgtctttaccattgtgatctttgattgatttaggtcggtttgggtttatagcgtaccaacaaaacgaagaaatgtgaggttattagtggctcaagacatctgtggatatgactttgatcaacacgatcctccactcataaagatgtaaaaaacatgttttcttacatgatcactaggatgctacataatcactcgttataatttctagagattgcaatatcttgcggactagtatagtagtattggacaagaatactttataaagacccttttctcattaacaaaataatatgattctgatttttcgagctaaattcttatcttttacaacattttttcataatcatcactcaattttctctataaaaaaatctgcatgttttatcttttagtgaacaataggttcaggaaataactacttcgtgatttttccagtgaatcggtgttatgaaaactctcatatttcaataggttccgttaatctattcttagatcaattgagtaagacatcaacttgttgcaataactaatacgtgatcttgtagtcaaaaacaagaataagctagtgcacgtacgaacgattaattaaacattaataatcaaccgccaaagcgacgtactaacaattaaatcatgttaaattttgtctgtcaaaggttatatataatcctaagtttaatgatttagcatattactctgtattgcttcgaaggcaaacaatctcagtgttatcaattttaaaataatgtgatgtctaattatacagcatggtgagttgttcaacaccccaactagaatctaaaatgattaataatcctattaaataaatgagattgtaaagattgtgtttgtcctcactctaacaatcgttaatttagacagccgtagagatagagtaggtatatccttattacggcgaccaaaataggaaaatactactattgtataaaagattatgtaatccttaattaattaatattctcaagtgtctattaattaaactataagtagaccatttttgtcgttttttgcagttttaagattgtaaatttgatgaatgtttccatcactaaatgtcattttctgcaaagttgggtgtatgtatgtacattaatctgtaaataattgtatgtctacgcgtacatgttatgttcactagttttatataacaataatccatacgaaatgttaaatatattaataaatgattactgctatctaaataaaatgttgaagttgacaagcaaaaaaaaaaaaaacaaattgttgattgagatatctggtttaatatatatttgtgtatgccattaccatgaatttgaatatcttacatatttggctatatagatatatctttagacatttgagatacttttccaaaactaaatgcatgaatggcgatgactgttttttaaaatataaatcatttttgagaagaggttataagtacgtttggataacttttggaaaaaatcttcggttgctagaattcggaaaaattgagcaagcgttcgtgtgtttgagtcgactttggagagcaaacgaaacaagtgtgtattaagaaagatcaagaatcaaagcattgaacatcttttgaaaaaaaatcaacacaagcaaaaccatgtgactagccggaaaactcagaagatgacaaaaaggtgcaagataaccgatgcttgttaaatatttcgaactctagctattattatgtgtaccaatttattcgaattctaaatggatatatcatgcattgtgaagaactcgcaggtgagatttaacagtaatgtatatctcacctcgttgactagtcaccccttacgatccctatgacacacatgttggctaggttcggcagatggcaaataatgacattatgtataaagatgtttaattaatgtaacaaagagttcgtcatgacaaacattatatggaaagaagtttcaacatgttgttagtctcgtgttaaaaaaaaaggaattcggcatcttaatacaaaaggtctataaatggcatcaaggctgcaaatagtttaggttgaaaattcatttgagagtgaagagtcttttacattgttaatgcctaatttaaggaattacaaaagggcttttgtatatgaacatggaagacctctgagcagtactgaggtgggaatgcatttttcaaaaatgaggagtcactcttgtgcgttacgctttcaagtgtctttcattaaccttttgtggaagttttggaaaatttgtttaaatggcatttaggaaggaaaaaataactaataccgattgaactataagttgaagaagcctatactaattccaaaaatttgtacaaaattgggtgtacttttggaattaatctagtttaatttattatctagctatcataaagctaatggtcctaaaataacaacaggtacacgttactcactttgttcgaaccgtgttgctcactttctccggaccaaacaaagcttggatttcacaaaagcaagtccttaatactgctttatcgaaaaagagagtccacaagactgttacaaagaaagtattaatacatttaggtagcacctttgctcttagttgtttatttaataattcttttagaggcttggcctatgcctgtgaagcttccgtcaaagcttttgctaaataagaggattgaaaagggatctcaattcatactacgtggtcatcataccaatgattcaactttatgttatttttattttgataagaaacattagggtataaaaaaactttatggtgtatatatatacattttttataatatttcttggtatagtcatttagaggttttaaaacaagaaataatgaaattttcggtggtcaatgagaagaacattcagcaagccatcaccattccaaatatcgcgtttacgaaaagaagatcaccctaacatgtcttaatgtttcaattatacatagaacaagtatgttttaatatagttttggataaatgtttaggtttgtacgtaatggtgacgaagaagaaataaaaggacttctcaacttattagaaagaatgggagtacatttctatgatgtcatgcttcacatcaacgtttttttggttcagaaaagtctaattattaattagtcaactctttgtggtcatcaccttattacccacacgtgtaaataatgtttttttgaccatttcgttcaattatagattctcatataaattttgtctattgttcagattactaatcccgataatggtagtaaaattctacattaatacaacccaatatggtgccacaaaaagttcatcattcgccactcaatcactaatgactaatgagtaaacatgccgccaaagaaaaaagaaatattgaaacggaggaagtaagtggatccaatctcattttgaattcataataattaccaagtttgattaaaactacatgcgcgtctttgtttcggacagcgcaaaagagattatgccggtgtgaggattaaggaaaattcatgattaatttgaatgtgagacatgtacaaaagtgttttccatttttctttttactttttcgttttttttttacttatctgcgaatgaagtagaaactcagacgcgtgtgctacataaaacatatgcagatattatgaaataaaatacgtttaagtgggtttagaaaaatagaaaagttaaatagaaaaatgagaaggaagtggagatgggagggcaacgaaagattgaccaaataaagtgtatgcaaattaaaaattgcaataatgaaagggtccaggcactattcttttttccatatatcatctccctttcacttcaaataaacttgttttttaacttcttgtttttgaaaaggacaaagtaagctttagatgtgaagacaagccatcatctaattttgtttgttaataaaaaataacatttcaagttttcaacaaaaaaaacaaaaaatagaggtttaacagattttttactgttttaaactacatattcaagttttattctgaaaatcatataaatagttttgttaataatattacgtttagaagttcaaacgttcaatacaaaactaaaaatatatatatatatatatatactgcataatttggttttatcccaaaacaaaaaacacatccaaaaaagaaacctcatttggtggggaaacaatttaaaaagcctatgctaatttggtccagtgggctttcaacaagaacaactcttgtgtatgttttctattaacaaaactcttacatctacgagactacgaccctcatttttttttgcttctactacggtatgatttagtaggatactagcataaactacgcaatttggaacgtgaacaagattatatatagtattctcgttttaccacaaccaagtaataacatgtgtatgtgaaactgtggaagcaatttcaattttaaaagggttaaaattgtgtgacaaatttttcttgaaagcttaagagcagcggtgatcaaacacaaaatcaataaagcttctcgatttacacctgttatttttttaaggataataaataggtgattcaccctttcatgcattggcctccaatctaaacatgatgcttgacatgatttggcgctagttcttcataaccaataagagaatttttttaaacaaagacgtagaacattcatgatacatcatacatccatgttaaacattacccatttgcactctaatttactatatcatttctttttatcaataacatattcacatgtaatgtgaatctcgatttaacaaaatatcccctcatttgtttaatgatgaccggaatccgaaaacaacgtctacactaacttccgaaatttttatagccgcttcttgaatttcacaaattgatccctagattaagtgactaaccgtacctggtttaatcccaaaaaaatctaggtcttgaactccgtctagcaaggattgatcttcgttgatgtatgtatagactaaccttacttggtttattccaaaattcttaggtctcttaatattcctattctctcattattccaaaaaggcttagataaagtttacctgcatacgtaatcaatgtaaactcttccattctcccgaaacttgtcttttaattacgggctacatttagaacatggaagtttacccagttatattaccgagtcgcgaacaaagaaaaaaaaaaacagatcatgtcaaaactcacggtcgacgcacgtgttgtatgcgttgcatcattatcctgtcggtcgattcaatccaaatgcagatccatcttaacgaattctcataaaacataagtttgattttatttttaattccacagatattaccaacaacaacacaaacgtcagagtctcaaatcatcaaaagctagatagatatacccgagagagagatcgatctacaaaaatccaattaaagatctataacgccttgaaagactcaaggctcttagaatgaagccaaagcttttcaacaacaacagcctcatagttcttgatcttaccaccaccatccttcgccgcaattttcagatcgtactttgtaccggagaccacttgcgtcgttccctccacaaccttgacgaaaaccaacttctccttcgactccttgttatgttcctcgatggcatacttggcgaccgcaacaacatccggatcagatacattcttgatcggcttccggctaccaagaccaccaccaccaccgagaccttccacgacggagacaagtgggaggaggatgagagagagacagatcaacgacttcatcatcatattttcgtttccttaaccttttttaattttcgtgtgtttaatggtctctggtgtttattatatagacaagacttgtagatttggttttgctttggaatgtgggctgatagttccagaaatttacggagatctcaattgtgtgttacgcggtgacgagtgaattgtctttttacaccgtcagatttgacaactggataagtccacgtggcgaaagataatgtacaacatgttaaagagtcaacgagggttgtcccgtcacgtgtactcgtagtggagcagagcactaaatgggcccatatatgttgatttgggccaatctagatttgcgtcggcaactcagtatttgtagtacgacgtcggttttgctctttagtcaagaactatgttcaatgttcattccctgcttcttaatagcctggtttgactggttggcccgttgttttattccctagggtggaaaaatccacaaccgttaaaacccaaaccgtggttaaattgatttgttattgcatttaaatctctctaaattaatatccagtatccaatataatgttaattctaaattaagaccaaactcgaaaaccaagttacaaatggttttatataattttagtttctaaaaaaaaaacaaaaaaggcaaactgaaatcaaaccataaaccggattaatcatccataaaccatagttattggcacaacactaaattggcccatatttgtttatttgggccaatatctacatataacgtctagtgttttccgagcctggttctggcccagagtttttattttccacaagacgcaagacaaattcaacggctcagatcatcctgttcctttctaatttaccgtagacacgagcacagatgattacgaaatcaaacgtaagaaacgaaacaaaacttttgctgcggcgacgatcggcaattcgaaatggacgacggagaaggcatggaaactgcagcggcagagcttgagagactccaaattgaaatcctccacaaaatctccattcttgagagctcttttctcccacagaattcctctgctgctccgtcgccttctctaccggttgatgaaaacgaaactgtgactcgcctctccaccattctccagtccggcggcgttaacgacttctgcttcaagagagttgctaccgattactatgactggcctctcgaatctcgtcgcgacgttctcggcgcttcctcagtcgaccatctctgcaagagtattgttctggtacttcaattgctatataattgaattctatcggatttagtgtattttatggaacaattttaaaatcttcgttgatatgtgattgtgacactacacattgaatctctgtgcctgtgtttgtttcctcactagatgctgactatattacaggttaatactcaagctgcatcaaatattttggattgcagtgatccaaacaactcaaaatactatgtggttgtggttcaggtgctcctcatggttcctgtagaatagcattttcacctttgtttcgtctttaatcgtattcatctgactattttacttatggtagtatactgctagattcaatgctgaagcagtgaagcagtttctttattcactaaacgagggcaagatcccaaagaaaagatttaatcgttagtgcttcttatttctatgatctgttaacatattgaagtgtatatgatatgttgcttctttatgctgaggcttgtgttaacctctgtgtagtgagacttgctcctgaggagacgtcgattaaattgacggggtttgagcataatggggtaacctgtattggtatgaagacaaacataccggtaagttttgtttccacaccgttatttctgtgataggtttaaaaatctttgtttgattgaagctggccaacttttctacatcatgcattattgacatgttttgggcgtgcttgctcaatgctgctctacactattaattacatattagacataggagtagtatgagaggaacctctacccacttatgttttcttctcctagacaaacagtttcgtgttgtattttgtattgagaaatatttacagagagttttccctttcatacacatgttcttgccaagcgttttgcagacactatagtttattgtcctgtcctagaggcccggaaggttccagtgcctaatgagttacacagctaggtttggccttgttttgtttctcttagtctgtacaggagggtgtggtgcattataacacaatttgaattggtacagagcagaagttaagagtttccgtgtgagccagctgctgattgtcccactcattgtctttagtactttccccgttgatagtaaaaaattagaacctccgtttttacagttcaataccttctttgcattacaagtgcgagagttagtaattggtgtcagtcagagagacttaaatggcgttatttttggtctgtgtatatataatcttaggcacgtaccctactgcattgatgtgtttatcttcctttccttatccggaattggcccacttcagacaacacactatttgtgctactgtgacacatgagtctttcaatatcatctttagacctcagtaattaagtaaatgagtttccctttagggtaattagttaggttgcttatgctctcatgatgaattacttgatctcaattggatatgtgcagattgacttggtatttcgaagtattcattcatagtggagatatggagtttagtattaattcatgtttagagtttccatggcatattcagactaatcgtgctttgaattgaaataaactttcgatatattgatactgacgagttggatggggggggctttgggaaatgtcaggttatattggatgaggctataaccaaacttaaaccggatttcttctggttgggtggtggagaaatcgatctgaagctcggtgtcagaacatccgaattccttgaatttgtgaaaccattcattgttccttgcagttgaaatcaggaatatgtataacactatttttatcaccctgttatgaaatgttaggcttagctttaagattttagcttcaatgaaggtttttatctcttatacacattggtattctttgtaatgatacttttgttacgtgctacttggagctaaaatggcggcaaagagatctatttgagtctacatgtcgattattctagattggttattgttgatttagcttcaggctcggtttagtttctgtatttaagatctcttgtacattcaaagcttaatgaagaattttcacaattctgtttctcaaatgttgaaaatcttttatgcaatacccataagaaacagagtaattaataggaagcaccttgtttgttgtatacgaggagaaatagagaacaaagaagttggtcatgaatatatatagagatagcacaagagtcattacaaccaccaacatggtgaatgcatatgcatataacagtatgatatatttagagagactggtatatatggatcgggtaattaagacttctcgttgtggatcggaggcttacgatgaggctgaggataatccatgactactacttcttcccctgtctcgactccacccaacgcccgcctcctttctccaccattgaagacgtccaaagaagcaaccttgtgatgatgatgcttatgtgaccttaaacgacgagcggcagaggcacatccaacattggaagacaaaagcagaagaatgaaacagaacactatcacgagtccactcctcaaagagcaagacatgacttctcttattcttcttcttgttcttgagatacttgtgtatatatgctgtgtctgtatacagggagatgagactagagcaggacaaagaaagtttgaaatgttgttaattggtgtaagagaagagaagagggaaggagagtatttgtaggcagaagagagtaaagagagtaagacaagcattaaatacaggtggggggaggggtccttcattatcataacatgctcttgttcctcttctcttttatttctttttaatcttctctcttgtctattattcaaatatattttacattcaacatacatatctatcgtatgtatatgggtgtcttgatcggccaaaccttttgtctacttgagagtcttcgtggggtcatcatctcctgcattctcattttcctttcttccatttgctcaccttattctccggttcttcacctttttcatccacgccattattgtatgaccgacgtgtttactctcttaagtcctaatcgatcaccttcttatcactacactatttgacattgatttctttggacaaaacactcacaagttatgaaaagcttttacattcaactttcacttcaatggtccaaaatcccaaaaacacaaccgcgtctctcatgttccacgtgaccggttggaaccttgaattacaatctttgacgatcataaatcgagctaaaactgtgaacaaataaatatatgaaacaaaaatcaatattgaaaagtgtaagatgagaaacaagccagcatggtccgaccgtctcctccttctctccgtcaacgacaatgtgggacctttataagatcgtcgccggccaaccttcaaccggtaccgaccatgtctgccacgtggcacagttcccttgtgcttgcacttctattgagtttggtgatataacttctcttcacttaggctttgcaatttggaactgtcatggcccatgtgccataagcgacgtgttatgtcggcttatagattgaagacatcaaaaaaaacacaacaaagtcaagagggagatgtgatagattcacctaaagtaggtttttagatccttgaaagaagattatatacattattttatgttttctgtacatattaacgcccgaccaaaggtccttagagaataagtacataggtggcttgcttgcttagtaattaataagaagatgaaatatttggtgaaaatagagaggagtaaaatgaaatatccagcaagaggtctctattatggagatccaaatccaaatgtgttttctccgctgtaagtgacatagaggaacccatcatcatcctttttctcttcgtacacagaagacatgagcgcacctgcaaagttaccagatcagatcagccaaatataaagaatttataatcaccggggaacatataagtagacgccttcttatgctcttgttacttgtgttaaaagataatgaaactcctgagtcttgaatacagaggagatctatctgtttacctgctggaggaagaacattgtccacgaatatgaagatagccttttctgcactcaatttgattcttttgcgaatgacatacacaaactgccccacagtcagatcagccgggactaggtacctgcaaatttgaaaaaagcttagttatcaatcactattattaacaagtcaggtccgaatgaaaaggatactgatgccatttatatgcttactttttcttgtcgatggttggtatatcactcttctcagccttctcaacaatcacctggatcccacaaaaatataaatgcgtggaaatcatcatctcaagtgtcatttttaccatgtgaatcataaagcacgtagccacatgaatcatgcaaatctacttatctaagccgtaagtactcagtaagaatcgagtttcagaaagtcacgttccaaaaaatgacaactaaattcaaagtcctaatgttgttatagtcactataactcaatcaactccatgtagttgaaacagtggcaaacatatatcacaagcatgaagctaatcaaacaataataacttgataaccatcctttagtcgggtagggtgtccatttaaaaccagatgctatcccaataagttcattatatcccaataagttcattactaccatattgctgggccataaaccacaacaacttaacctgcataaactcagtcaaacacaaaagattgatccgaacatagaaagggaaacaatatgctaatcacatataactttagaaatgtatgatcgatcaatgtataagagagacactgaaagtctcaccggaatcctatcaggatacttctctctaatcctagcagcctctgcccttctcttctctgaagatttaggaaacaggatcattagatcaaagcacaaggttttgatttcgaggaccaaacagtaaagcaagaacaaagctcaaatccaaacctaagtcatgctcttgcttgaacgagctttttgccattccttccacgcctacacacacataacaaataggtgacaccaatcagacaaccatcaaaacaaatttaacactcaaatcaaatcatcaattcccaaactctggaactcagattatcaaaattcccacaaatctatcagtcgatcatgttaaagacccaacctttaagtaatctaaacgaaagtacaggatcgcaatcaaaccaaaaaagaagttaagaactcagtgatcaaacctgtagactacaaagaacgaagcttttctgcgatcaaacacttctccagagcacaacgctatcgttgaagataacaacaacaattaacgaaaaaatatgaaagaaaaagcaaataagcaacctacaaaaattctgcaaaacattaaaaaattatgcgataaggtcagagattctctacagatggtgtatggtaacatctaaacacttcagctgacgttgtatgcttaatctgttcagtgagaatctgacggtagatattagctatttactgaaataggaatctcaaccgtccattttactgaaggtgtacgaggtaactgtctacgtagatattgcctccaacaaaggataaagaagaaccggatatgctgggatcacgtttctgcatacgatatgacacgtttacccctagaaaatgtgtgttaggtgaagagttcggaagggtaatagttggaaattgagaatgtcgcttataagctttgcctcttctaacaaaatgtagggcctagtgcagtaatgggccttgcaaataaacggatggaaatatgaaaactaataaataaagtataggcagaagtttttttatgactgttatagagatctggagatgtaggtcttggtgtatggacagcttaggatttcaagcttaggcatttcgaaatcaagggttgaaagcaattactgtatttgagaatatatcttcaacactgcacaaaactcattttgtaatttattaaaataccggaattgagtgattaatgtcaaaaccgagaatttacaggataacaaagataattaatcaaaatgaatcttttatcaaagtaagataagttttctaacaagttttttacttatagatataaaatattatagttgtgaaaagacataaacatttttaaaagttaagattgagttttctgaagttgaaaaaaaaatcaaaattattttttaatcattatccaaaatcattacttaatccaaaccgatgcccaccctaattatttaactatattaataaggtttgtaagcaatagtatataaaaagctaaaaaaaatataagggtatctcactacgtatgacacttatcaagtttgttagagcatatggggcacatatgtgggagtatgcactttttcatgtttatttcactgcactttttcatgtttatttcactgtttcaaaacaatcaatacaattatatccttactctcgtaacctcaggtcaaatagcatggttaagaaatgcctttgacgaatgatttagctgtgcagcaatatatagtactttgaactgctctaatgggagtggattgtggattttcctttcttctgtttcttaatcttgacattagatttccactccaccccatcttcgtctagtaccttataagtcgttccagcaatgtagaaggtgactttcttctcttcaaggtacctcacaaaacgtttagcaaactcaatgggtgttgaatggcttttgtactttgataaaagactcacagcaatctcctagttaggcttgaaaatcaaagtcttgacaactcgttatgcctcatcaatcacttttcctctagccaagccgtctaaatatgtccccattatttcaatagttggttctatccatagagtcttgactatccttgcaagaagataatgcccatactcagtttgtcgagcatgtgtacaagttaccatcacgttccaaaatgttgagtgagttttgatcaaggtggaaggaatgttctcaaagacttggattgctttgaagcattcactatttgtgcctaaggttgatataaatgcattccacatacctatacatgtagctccagatttaccgcattcatgaaagagtttttctgttaagaagagtttcaaactccaactcttaagattggagagatatattagtcacatggtaactttgttaaggaaaacaaaaactcaaatatttttaaaatttgttaatcaaataattttaaaattgatttcttgtataaaagtattgtttttttgtgtattttaaattatatttttatttttattaagttattatgaatcaaatatttaagaattaaattgaattttgatttatacttatattccaatcttgtatataagttagtcagattgaaatatatggtcgaaaattggtaaaaaataatattcaccattattttggtcattaagttttgaccactttttggtaagatgttttcgaccactattctcggtcaaaaatgtcaaccgatcaaaatatttctaccatttttattggtctaaaatattcgaagcaaatgtttaattcagtataaacatgcaaccaacaatttacaaatggtcaaagaatttctaccaattttattggtcagaactcaacttgcaaccaacaatttacatcaacttcgttttggtaaaaaaaatatcgatcgaagataggtgtttttgaccaaactgatgaatgtatcaattctaatcgtaatacattttcgacatttaccacactgatgaatggtttttactgttagggtcgaacaaaaaaaaaatccaaattgatgttagctgttctgatgtctctaatttcgattaattctaccaaaacattaataacttggactacattttagttgaaatttaccccttaaaaacatccaaattgggtgatacattggtgagagagaaaccaaacctcatttaaagtcataagttataataatgcagatgaggacaaatatagattaggatatggtgttgctggtaaaggtgtgaagcgactttgcctccttggtaccttgagaaatgtaatgatgaagatgatagtgttcgtggtgaggatgatgatggtggatatagaggttatgaagctgagtgggaagaagagttattggcccataattctaaaaatatacgacagccattttgaatgatttcaactaaacatacggttagttccggtttatattcagtttcgtaaccaaagaaaaacgcaaatcccaaattttccggaaatggaggaatatttgaatcttatgttgaaagcgagagagattcttgttagtgaaagccatgaagaagtagcgatggtcatcgatcatctctttaagcgtcaagactccgaagagtataaaacatcgcgtgcgctgtacgacatctgcgtttcttgtaacccaggttgcttaaccctaaagcttcttaaagtctatcaatcttcttccagtggcattctcagactccgatcaatctctcaactctctgagaccctcacctatctgaaaaatcaaatcgtattttccaaattctctctcgactctctctatgaaatcaaaccccttttgattttatgccttacaatgcaagaaaccaaagaatctgacatcaagatcctcaggaaaatcgtgtcttttgtaacttacaatgtcgtggagttgcataaagacaaatgggacgagctcggtgattgtatcttatccctagcgagtagcaaagaacctgtcaaggcttttcacgtcttcatcgatctgccaccagtctacaagagtttcatcggcaagtttttggacaaaattttagaggaagctagtaatgtctttctttatccttatagagttgaagattggagcttggctttacaaacttttgttaaaatgtggattcagcttgagaaaacaggggtgacagtagagttactaatggcgttgatggagatttggatttcctctgttgtgaattcagtaaagaagctagtggagatgaaaaaagaacagtttttggtacgagggcttgaagatttcgagagtttcttctcaggagacatgaatctgtatcattacactaaagaccaattccattttgtgttggcttccatgaacgagatcgaaggagtagtcggaacagagacaaaggagattgtgaggaagatcaaaatgttggtgacagaaccatatgatgatcttaagaatcgtagagaagagtttgaacgtggctggtatgacattttgaaggatttatcatcactggaagtgttaaagattcttgcgtcctctgaacttgaagataggtccaaagagatagcaatcagacgactcaatgtcttactctctgatcacacttcaaagaaagtgcagatagacatttcagagatgagacaactccaaccattgctcatctcttgcttaaaggaagaaggactttcctttaacagtatgttcaaagtcctaggtgaggtggtgaaccatgttgcatatgagatgttgatctaccaagaggagacatggtacgagctacgagattatattgcatcgagtaaaacagagtttcatagagcggtttatatcttccagtgcttaacaatggcacttattgacgacgattttgtgattcctgtgatggagaatcttttcctagagataatcacaaggctagacccaccaagagagttgttggtagataacagtagctgggtcttggcgtttatgggtggcttttgtttagcaattcacttgatagagatgtcaagtaaagctgaatccgttaaggagattgcacataagatgatagattctataagagagctaatggaaagagaaatggaagttgggcttgtgaagagaggtttcagagatgtggaaagcatcgtgaagaaacaattggaatggtatagtacgagccaatacaaattcattaagggtctgctttggagactgtatgcaatcaaaaggcatgaaatgggaaagtaagattgtgttgtggagaatcaacgtcattgtggagagaggagtcaaagaagaggaaaaagagctaccagagaatgagtttgattggctcaaccttaatgctgaatagaaaactagtttttggtgttcactatctgatattgtgcagaatcttgtttttggtgtatatacagtttgcattgaagaaggaaataaatagataagagttttggaacatgtacttagtagttcttaaagcactttaattttgagagttacttaataatctttcatttactagcacttttatcttgatgctaaaacaaattcgtagcatcaacaatactacatgtgtcacagattttctcaacaagaatctgaaacagagattcattactgttgttgacgttgcatcagtctaaagcagatctattgggcctttgattattaaaatatcacttaatgggctcaatgggctcaataggcctcaaagttaactatatcaataattaggcgattttctctaacttctctgccaaaattcaattttattccgatcaagtttttattttccaattcgcttcgaagttctctcatccatctcctggttcgattcaatctcatcgtttgaaaaccctaattttgtttggtaagattaagccatgggaggtcacggtggtttgaatattcttccacagaagaggtggaacgtttacaacttcgacaatcgagaaaaagtccgaaaggcggaagaagctgccgctagagaagagcagatcaaacgcgaggaagctagaaaacgagatgctgaatctcgtctcgaagtgcttcgtaacgtccgtggcttggcgcctctcaaacgagcgtctccggaggcagagaagggtaaggatgaagcggtggtggcggcggctgttgttaaatcgactgctgttgttgtggagagtgttgaatcggaggagcctaagacgggtcatattaatctgttcgaagggattaggatttttgatccgattgagatcaagaagaatgataagcctgcggatgaggaagatcagagaaggaagaagatgaggaaagaagcggctgcaacggcgagagctctgcgaaagatgctgctgcgagagctggtgatcctgatgaggagaagtatagattgggatatggagttgctggtaaaggtgtgaagcgtccttggtaccttgagaaacgtaacgatgaaaatgatagtgttcgaggtgaggatgatgatggtggatgtggtggttatgaagctaagaagaagaagatgagtgggaagaagagcttaaaggagttgagggaagaaaggttgaagagggagagggttgagaaggaaagagagagagcccttttcatgaaacagagccagagagccggtggtttttcccggaggtgagttttgggattatattggtggctctggtttcacacttactgatgaaatcatacgttatttgcattgggtttgtacaagttagtagttaactgttacttgattcatatcccaagtattggtttattaacgctactcgatgcttgtactgtattagtgctgatagaaccatgtacataggttggagtttgatagatatttggccatttggggatctaggaatcaatagtttatcaggtcctatcctttagcatgtcctaaagtttagtgaagcatggttgtctgttagtttgatggtagcttttagaccctgaaagtttgaactttgtgagtacaatttacttgtttcaacattgggttggtagctgataatcccattggttctaactataacaggcactgcaacgtattgtcatcagaagaagagtatgtaattgaatatatctgtagagatgtttcaacagatagaaaaagaggaaatgatgtgaagtgaatttggtgatagtttattccttcctgctcagaaactaataatgcacgtgtgtgagcaatagcatagtagttcatttgtgctgatagaatcgtggtatatagtttagagtgcgttttgcagacatcacagtctattgtcctgtcctaattgtcacaggtcgtggaaggtttcagtgcctaatagattacacagctagtcttttcttgattgtttctctaagcatgtacaggaaatgtggtatattttcacaatatgcatttgatatggacccagtgttagagttttcttgaatcaagctgctgtttgtcccactcattgtccttggtatttccctcattaatagaaaaaacctagaacctcctttttgacagctcaaaacctagaatcttaggctcgtaaccacttgaaacaacacactagttttgattctgtggcatatcactgttagggcctcaagttagagaactgttttggtagctaaaatcccattgtttcctacttgaataagcacaccaaacttttagttttgagaacaagagtatatcgatgattgctaaaattagtttgtgaaattcctgcaggcggtgattaaatcacaaagataacaaagaagacttaatctagagattcaaaggtggttccacgtctgaaaagccctttttaatctatatgtgtgtgtatagagaattagagatgtttcaacagatagaaaagtggaaaggatgtgtattgagtttgatggtggaaatcatttgtcattgcgtcatgctcaaagagttatgtggccttaaatttgatactcatagcaaaagttttgtaaaactgtttgcaattcaacagacttcggaaaatgataacaaactagccgaaaagttgaaacatatcaaaataaattgcgtctttgaaacattaccaaaataagttgcgtcgtagagacataatcccaaaataagtactgataaaacataaaacgacacgatccacaaaacaaacgacaccatcccagagaaagggtccaccatactagaaagacaaagtttcatcatgaaatcatcatcaaaatggagggataaggagacgaatgacaccgtccttggcgatggtcttgatcctacggctgggaatgtcaacaggagtggagagcatagcgccgtcaccagagtagaaacggccacttgagtcatggctcagagcaggagcttcaccagtcaccttgactcgcccattcgtgacagagacagtgaagttttctttgggaacaccaggcatgtctgcacgcacgaatagtttgccgtttgggagctgcttcgactcataggccatagtcgattgtgggaacgcaagtacaaatactctcattttaaacacccaatctcagtactaaatataattactaggacaagagagttgtacaggagaataccatttggatcggtgccacggagatctaccgaccacaaacacacagaaaagacaaacatttaaagatgagtaaacaattttcgaaagttcgtgtaggaaaaagccaaacttttagatattgaaagtttctggaaatggtagatggattaaaaatggaaataccttcacggaaacctgagcaaccaagaactgttgacaaaagcataaacttttcatatcagaaaaatgatctataaacgacgagcatataatatattagagaaagatgggtgatactgaccgatgcaagaagagcgatttggatcgatgcgagtcttggagagggtaagtctaaaaacaccgtcggacatgtgagtggtcatgcttgagatcgcacagcagctgcagccaattccagtcatcgttaggtaacgacgttcggtggagtcgtgtgtgtgaatcttgggtgctttggcgtaaacaactacagattcctccgaccggttatgataaacactcatgccgccttcatcaggaactccaggcaaatccatcctcacgaacatgtctccgttcgctagaatcttgagctcagagaacccttttggcccattcgtctgaaactggttgttgattgcgtaaaaaccttctgctttctccaacatatcaaaacagagataaaccaaacaaatcagagaaatgaaacgcaaatcagtgaaaatttgaacgagatgagagaggaatcataccgggagattgaggacgagcaggaagaggaacggccattgccaacaaagattcaagctttctcagtgcttaagggtttttgcatttgtagcaagttttagcatttagtggcttcgggaactttatgggcatgggaagtaggcctgggcagcgaatatccggaaaatttgggatatttgttattcgattcgttttaatcgaatacttaattttattatttgctttgatctgaaaatttccggaatatccaaaaatacgaatatccggatttttgtgtgatatttgtcggatatcccctttgctttgctatattcaaatatttttaaaaaaaattatttaacataattcaaatttcttaccttatggcttacgagtgtgagattgagagcaactagaaattttcttgttataaattatgtaaccaaattgagtgataaaaatagtgaaaagtcgaagaaaggaaacagaaacgtcgctcttatatttgatggattgaaaactaaaacgacaattttaggataaaatataaaatatgaaacaattttattttaaaaaattccacttatctaataaaaattgtgtcacaaaaaaaaacacatgcccaaaggatacaaatacaagcccaaatcccaacatatacaaattcacaacctatattatgatatatatatatatatatatatatatatatatacggttcgaagcgaatatccgagtttagaaaaaatagtatttgttatttgcttcgatttttacgaatactacattttcctatttgctttgctccaaaatcttacggatattcggatttttcgaatcaaatcaaattgaatagcgagtcaaagcggatcgaacgaatattttgcccagacctaatggaaatgctacaaatggaaatatctaatcttctcacctgacgtggcatgtttacttttgacctttgacgaaatgtatgaaagagaatctgacggtccatattattagctgatattgaaaccaaaatcacagccgtccaatattatctgctttcacacttaaagattatttaagaagttatacttaattgttttgttgcatagtatttgtacacgttattagtatatctcctggttatattcttagataattttttttgtaattttacctaatgcaaatcaatagagaccttgagaaattggtaacaatttagagactaatactagacacacacgtaaagattgtctttttgaaacatatccaaagttgataaaaacttaatcccaaaatgacgacataatatctctaaaggagaagtccacaagatgtcacgaatttaataattatggaatcaaacgggagggatgatcagacgaatgacaccgttcttagcaatgatcttgatcttacggatgggaatgtcgaaaggagtggagagcatagcaacgtcaccagtgtagaaacgtccacttgagtcgtggctaatggcaggagcttcaccggtcaccctcactctcccattcatgactgcgacagtgaagttctctttgggaacgcctggcatgtctacacgcacgtatagaccaccgttttgaagctgcttggactcataagccatctctgatccatagttcacacatgggtgtggcatcaatatccgacccgttaatttcggatctgctccacataaaacacaacaacaacaacaactattcccatttagactaaccaatctcactactatatactactatatatagtgtttgattcctatttaatactcttgctatgtatagcataagcttggagaagggaaatatgagtgtaccattaggatccgtgccatggggaaatttgtgaggaccgttgccacgcagatctatgaccataattagaaaagacaagattttccaaacgttaatgaaggcaaaatcaagactttttttttacccaaagaaaaatgaagactttgtaataaatgttgagagacgatatatcaaaatagaaagtttggtgaaaacgacagatcgaataaagtaccttctctgaaatctgggccagcaagaaacgctgtagaaaaacacaaattcatcaaaagtttttattaccaaaaaaggttccataaattgaagtgactgaataataaaggtaattacagatgcaggaggagcgttgtggagtgatgttggacttggtgaggagaagcctaagaacaccatcagacatgaaggaagtgaatccggagatttcacagcatttgcagacgagtccggtggaggtaccgtagttccgttcagagtagtcgtatttgtgttcctttggtgcgtcggcgaagatacaaacagctttcttcgactggtcaagaaaaaccctcacaccatctcttggaacgccgggaaaatcaatccgaacgtacatatcttcgttctccaacattttgaactccatgaacccttttggcccatttgcttgaaactggttgtttattgcataaaacccctctgttccaatcaacaccaaaaaaaggagtaaactttgggttaaaagagcaaatgtagtgtaagtgagatttgagatttggtttagaaagatgttagtaccgcgagatgaaggaatagctctgagagggacgaccatgatgattcgactgagatttctggttagctactttgggattagttttttcctgctttctctctgggttttggcatttagggtttttgggatctttatgggagggaaggcaacaggacggagttgtcaggtgaagacaagacaatactatggggacacgtgtctcttttgcatttgtgatttgcaccagtattagtttgacacgcgttgtcctctttttgtgaaacaactgtcgtacgttgctttgcattttattgtattggttgacaaaagtaatgttaaattcattttgcaattcaatagtgacctttgaaactgataaacaatttagagactcataaatggcagtgggttatagaccaaataagttgtgtcgttgaaacacatccaaatatgttttgtcattgagacatatccaaccaaagaactaaaacatgaaacgacataataatccttaagacaacgacactatcccgaaaaaagggtccactctagaaaaacagatttttaacagacccaaacacaaagtttcaccacgagatcatcaaacaggaaggatgaccaaacgaagcacgtgttgaaagttaaacttgattttgaatcaagtttaattattggatcaattatccaataattaattatggccaaatccaagttttagagttttctctagaaatatcatcatcttccacctccttaaacataaaaatctagatactctaatagaataatctagataatttgaataatgtaatctagatcttatgtaagacctctctagacttaggattaaaatattttagatattttgtagtttggaggctataaaacaccatcttccaacaaaggtatgaatgttgttactgatttccacagcagtcacagagtagtccccacggaggttccatacttgcggttagaagcatcgtgtttgctgctcttagctgcgtctccggtcacagtaacagcttttttggatggttcgagaagggtaagtgggtaaccacagtctctttcttgactccaggcaaatcaagcctcacgaatagatcatgggtatcttccagatacttgaactcagcaaacccttttggtccgttcgcttggtacggattgttcatagcgtaaaaaccatctacacatatacaccaaaaaaccagaaatgtatgcatatcacgtggagaaaaatctaagatttttaagaaatggtgaagtaattgtaaactttgggtttaaagatcgttactatgagcgtgaggcgccggagctatgggcgtgataggcgtgatcattcgggggctggtagggatgttgattctgactcggcggcggataggcatgatgatgattcggcggccgaagatttcggtttgggtttttttccttttgctttttgagatctctcaatctctctctgtctctctctggttctagggttttaagatgtttaatgaagcgaagttcaataaagtaaatgaaggtgagagtatggcggtgtcaggtgagaaacgacaaacagtctctagactgacacgtgttctattttcatttgctgacattttctagtgcatcattttttattttattttcattttaaccatgcattagacgaagattaaaaacatacgagtgcgacaaaaaaaaaacatacgagtgaatattttcatacacgtcttatacgtacatatgtattaaagtccatttaattagtgttcttgaaatattcgggaatccaaaagaaaaagacaaacatatgcatgtcccaatattgttttaaacatgatgattaattccaaaagcatgatcttaattaagagccgattcattaattagtagggagggatagtgagacggatgacaccatgtttggcgattatcttgatccgacgccagcatagcctctagggacaatggcgaccttgcatacgtaactacgcccacttgagtcgtgcatagtcgcaggagctcgtcccatgatggtgacgacaccattgccgtccactgccacaatgaagccgtcgctagggacaccaggcatgtcaattcgcagatacagaccaccgtttgagagctgctttgtctcgtaagcactcgtggatccctccaacactgacgggtgtggtcgtatggtcggaccagtgaacgccggatctgtccaacgttcaaacacaaaatataaatcagtaagcatctcttaagtcttttgtttgcgcatagtaattgatacatataactacaattactatatttggaaattatgtcacaatggagagattaagttcataccaaaagggtcagtgccacgacaacctacgatgataaaacaattaatgaaatcaatcaaaacaatttatgaagttgtctgtctttagacgaattaataacaagatgataccttctggattaagtccacgaagatgagctgcaagattcaagaacagaaaaaaaagaggatttttatttttaaaacaagtcaaagaaaaaaagaaatggtaaaaaggtatagtcaaaggttgatgttatacataccaagaggatggccacctgcgactgcaacaattggaatcaacaacacaaacccatgaaaaatgtcagatacgtttactatactaaaacaacgaagactagtttctaaaagaagctcaactgataagtctgatctattaaccagaaaataatagaagaagaaagaaacataaaaaatcatataccttctgggttataaccacgaatgatgttagctgccaaaagtcatatacaaagcacatagttttattaataaacaaacgatagatcataatgacaaataagaacaattaatcaaaagattacacagatagagacattacgagaagcatcagtaggcattcttgcacctccgactgaaacaatacaagacaaaaatgtcagattttttttagtatcctttaaaatgttagaagtaaatctttaccaaaaataagacaaaaaaacaaaacattttgaagattagtgatcttacaggaacagaaaataggaacacgaagattgatcttctgcttggagaggataagtctaacgacaccatcaccaacaaaacactgaatgttactgatttcacagcagtcacagattagacccgtggcggttccatacttacggtgagaagaatcgtgtttgctctctttgggtgcttctccggtcacaatgacagctttcttcgatggttcgagaaggattatcacactctctttctggattcctgggaaatcaagcctcacgaacagatcatgggtctcttccagatacttgaactcagtaaaaccttttggtccgttcacttggtacggattgtttgtagcgtaatacccatctacacacacacatacacacaaaaacagaaatgtatatgtatcagtcgacaaaataaaagatttttattgaaatggtgaagtaataatctttgggtttaaagatcagtaccgcgagggtgaggtaccggagcgatgtgcgggatagacatgtttcggcggctggagatttcagaggctctttagggttatggttttgctttttgagatctctctctctctggttctttagggtttttggaggttttgtgaggcgaagaagctcataaagcaaatgactcttctcctattcctatatacaatgaaattctctaaataaaaattctaaagtttccatgtataagcttaaaggggaataatgtgaataccattaggatccgtggcatggggaaaaccatcagtagccgtgccaacgcgatctataaccagaaaatcagagtgcaaaacaattctaattaattaagtaagtaagctatatttcaaaagtttatggatgaaattaaaacagaactaataataccttctccgtctgagccaccaagaaaagctgtagaaacaaaaataaaaataatggttcatatcagataattatcctattacaaatttctatttttcgaataaataaataaaaagggttagatagaaaatatacagatgcaagtacaagaaggacgtcgtgtagaggcgtggctcgtggtgagaacgagtcttagaacaccatcggccatgtgagaagtaaagccggagaagaactcacagcatttgcaagggatcttggtgttgataccgccgacactgatcttgggtcttagcttggtaccgtcgtagttacggtgcgacgagtcatacttgtgttccttgggagcgtcggctaagatattcactgtattattaggttggtctagtaaaacagtgacgccgtctcttggaactccggggagatcgaagcggatgtagctttcattatccaaagtcttggcctctaagaaaccctttggaccattcacaaggaatggattgtttattgcgtagaaaccctctgctcaaatcaacaacaaagaaaaaaatgacaactttatcggaaataaaagaaagaggttacgatttgatgagaacgaaaaaagagaaatagttaaaacatacctggagatggaggagcaagagtaaccggggagaccatgattaggcggctgaagatttcgttagggtttttttttaatgctttttgagatctctctctctgtgtctttagggttcttggaggttttatgaagcgaaagctgtaaagcaaatgaatgagagagtgaggaagagagtattatggtgaaatacgacaaaaactctatactgacacgtgttctattttttggagcaatctagaagcacacgtattagttgagctgtatcgcgccactctagactttgagtcaatctctcttgaaatcaattacagtactaatagtgaagtagcaaattcgttttaccaggactattaaccatatgcattagatggtgacaaaattaagcataattaacatgcataaacatacgagtgaaacgtcttaattaggtacatattaaagttgttgaaacattcggaaatccaaaagaaaagacaaacagatagatatgctccatgcataagcatgatcttaagatgcgatttataaattagttggaagggatagtgagacggatgacaccatgcttggggaccaatttgatccgacccccgtcatagcctctagggacattggcgaccttggctacgtaagtacgcccactcgtgtcgtgcatggtcacaggagctcgtcccatgatggtgacgacaccatcgccgtccactgccaccatgaacttctcgctagggacaccaggcatgtcaacacgcatatacagaccaccgtttgagagctgctttgtctcgtaaggcatcatgggtccctccaacactgacgggtgtggtagtacgaccggaccagtgaacgctggatctgtccaacgtgaagcaacaaaacatataccattaagcctcccttaattaagtcttttgtttcagtatagaggaatctatttatagaaatcatgcatgtgatataaacatactataatgaaactaatatattgggaaattatgttacagtggagagattaagttcataccaccagggtcagtgcaacggcgacctatgatgaaacaaataatgaagtagattagttaattaatcaaccacaaagttttatggagtggtaaaaatatcaaatcaaatatatatataccttttgggataagtccacgaaaatgagctaagagattcactacaaaattaaaaagaagaagattttagaaaacatgtcaaaggaaaaagaaaaaaaaatggtaaaaactaaaaaggattagtcaaaagttgatgttacataccataaggagtgccatctgcaactgcaccaattggaatcaaacacaataaacccatgaaaaaatgtcagatatatatatacacgttactaaataaaacaaccaagactaatttctaaaagaatctcaaatgataagaaatatcaaatatctctgatctattaaccggaaaataatagaagatataaaacacatcattaatataaacaaaccatagataatgacgtataagaagttaagaacaaataatcaaaagattaaatggatagagacttaaccaggagcatcaccagtagggattgttgcacctccaactgaaaacaatacaacaacaaaaatgtcttgaataaattattatctttcaaaatgtcagaagtaattttacccaaaaaaaaaaatgaatttacaagaacagaaattaggagcatgaggatagatcttcttcttggagaggatgagtctaacaacaccatcttcaacaaaggtatgaatgttgttactgatttcacagcagtcacagagtagtcccacggaggttccatacttgcggttagaagcatcgtgtttgctgctcttagctgcgtctccggtcacagtaacagcttttttggatggttcgagaagggtaagtgggtaaccacagtctctttcttgactccaggcaaatcaagcctcacgaatagatcatgggtatcttccagatacttgaactcagcaaacccttttggtccgttcgcttggtacggattgttcatagcgtaaaaaccatctacacatatacaccaaaaaaccagaaatgtatgcatatcagtggagaaaaatctaagatttttaagaaatggtgaagtaattgtaaactttgggtttaaagatcgttactatgagcgtgaggcgccggagctatgggcgtgataggcgtgatcattcgggggctggtagggatgttgattctgactcggcggcggataggcatgatgatgattcggcggccgaagatttcggtttgggtttttttcttttgctttttgagatctctcaatctctctctgtctctctctggttctagggtttttagatgtttaatgaagcgaagctttcataaagtaaatgaaggtgagagtatggcggtgtcaggtgagaaacgacaaacagtctctagactgacacgtgttctattttcatttgctgacattttctagtgcatcattttttattttattttcattttaaccatgcattagacgaagattaaaaacatacgagtgcgacaaaaaaaaaacatacgagtgaatattttcatacacgtcttatacgtacatatgtattaaagtccatttaattagtgttcttgaaatattcgggaatccaaaagaaaaagacaaacatatgcatgtcccaatattgttttaaacatgatgattaattccaaaagcatgatcttaattaagagccgattcattaattagtagggagggatagtgagacggatgacaccatgtttggcgattatcttgatccgacgccagcatagcctctagggacaatggcgaccttgcatacgtaactacgcccacttgagtcgtgcatagtcgcaggagctcgtcccatgatggtgacgacaccattgccgtccactgccacaatgaagccgtcgctagggacaccaggcatgtcaattcgcagatacagaccaccgtttgagagctgctttgtctcgtaagcactcgtggatccctccaacactgacgggtgtggtcgtatggtcggaccagtgaacgccggatctgtccaacgttcaaacacaaaatataaatcagtaagcatctcttaagtcttttgtttgcgcatagtaattgatacatataactacaattactatatttggaaattatgtcacaatggagagattaagttcataccaaaagggtcagtgccacgacaacctacgatgataaaacaattaatgaaatcaatcaaaacaatttatgaagttgtctgtctttagacgaattaataacaagatgataccttctggattaagtccacgaagatgagctgcaagattcaagaacagaaaaaaaagaggatttttatttttaaaacaagtcaaagaaaaaaagaaatggtaaaaaggtatagtcaaaggttgatgttatacataccaagaggatggccacctgcgactgcaacaattggaatcaacaacacaaacccatgaaaaatgtcagatacgtttactatactaaaacaacgaagactagtttctaaaagaagctcaactgataagtctgatctattaaccagaaaataatagaagaagaaagaaacataaaaaatcatataccttctgggttataaccacgaatgatgttagctgccaaaagtcatatacaaagcacatagttttattaataaacaaacgatagatcataatgacaaataagaacaattaatcaaaagattacacagatagagacattacgagaagcatcagtaggcattcttgcacctccgactgaaacaatacaagacaaaaatgtcagattttttttagtatcctttaaaatgttagaagtaaatctttaccaaaaataagacaaaaaaacaaaacattttgaagattagtgatcttacaggaacagaaaataggaacacgaagattgatcttctgcttggagaggataagtctaacgacaccatcaccaacaaaacactgaatgttactgatttcacagcagtcacagattagacccgtggcggttccatacttacggtgagaagaatcgtgtttgctctctttgggtgcttctccggtcacaatgacagctttcttcgatggttcgagaaggattatcacactctctttctggattcctgggaaatcaagcctcacgaacagatcatgggtctcttccagatacttgaactcagtaaaaccttttggtccgttcacttggtacggattgtttgtagcgtaatacccatctacacacacacatacacacaaaaacagaaatgtatatgtatcagtcgacaaaataaaagatttttattgaaatggtgaagtaataatctttgggtttaaagatcagtaccgcgagggtgaggtaccggagcgatgtgcgggatagacatgtttcggcggctggagatttcagaggctctttagggttatggttttgctttttgagatctctctctctctggttctttagggtttttggaggttttgtgaggcgaagaagctcataaagcaaatgaaggtgagagtatcgcggtgtcaggtgaaaacgacaaactctccctacactgacacgtgttttattcttgtttgctgagatttttaaatgcatcattttatttcatttttggtattaataaaagatcattttatgtttctaaacgtttcgttttcaattgtccgtacactgtaaaagtgtaaaaggtgagtttttctttttaataagagaaagaaattaaatattaagcggttttgatatgtacaaaatatttcgcaaattgttttaagtaatatcgaagtttagtaggtgaataaaatccaataattaatctggactgacattacaaaaatgtcaaaaacagtttactaattatgttattttggggttaataatgtttcgagcaaattaataatgagttactgtatatagaaatttcatcgttaaaagctagtatgatattgtacaatgtattgacctggattaagatgaacaaactttctgcgatataactttgggatccttgaactttggattgcaagcaaactgtaaaaatacattagagaataaaagttaatttgggatgtgtgtgatacagttttacatattccttttgaggtctagtgggtttggtctacgtgtaaataattcactgtaagaactaagaagacgcggaacaccaacgtgtttgctgtttccgcctctctagacttttattgcaagtcaatctctcttgaaacaaatcaataattatcaacttcttggtcgcctcatcatctatggttactagtcattaaagaaattttggtacctcccccctaattgctacttcatatatacctatcctatttggtgtcaatttaatactactatttattaaaattggctctcaattaattttaaaaagcgatgcttaaccgacatataatataacaacctcttttaattatgacggaaaaacaaaattaatatgacatctatttgaaaattgtaaacacttttatgtactttcgagtatggtttcatcgaaattattaaggctagctacatctattttacgtacttcccaacaacgtaattactgttcgataagacctcatccccaaaacatgatcataaccaatccggtccaccggtcaaaccggagaggctcatgttaggcttatttcaaagatttattggcttcagcgcatgttaggcttatttaagcgaatcccataaagatgcgcacttcctcttagcaaacccaactcttctgttcaacagatcataaaccacctcaaacccttgttgctggtaattccccagaatagccccagtaccacctcgaagttctgattcatctccaccgttcatcaacatcaaacatccaattttcctcttctcttctttaccatctccaccgtccataaattcgtaaaaataatttctcctggggagcgtcacactggatctgttcccggcaaaatgcaaaaccagagctggaactttaaccgtctggtttaaatagtaacaaggactcatacccgaactcggttcgacccgatcagcccgttcgtgaacccgcccgacccgactatcgaattcttcaaccaccgaattgtagaatttcgccggaagcatcgtgaacgttgtccctgagtcaacaacaactcctccgccaccgtttttgtcaattcttctgagcatcgccggagctggaatattccgttttccgattgagattccttggagtgaaacagagtagaagtagggatgctttgggttttcaagcatctctgtgaagacgaactcatttttcttcttcttctcatcatcaccgtcatcatgatcatcggtggttccgacacgtttctcttttttatcgacgaagcgaccgaggatgagcggactcggacggcggactcggtccgagtcaaaagagtgagagacgagacaataagagaagctattaccgagatgaggagagtgaacagcgagctgagcgggaagagagagacgtccacggccgaatccagcgacgccgataggttcagcgagagtggtgtgagcgcagccgaaggtgaagttagagacggagacggaagggagagagagtgagtcggagtagagttttgcgacgagagagccgtcaccgtaagcgtagtagaaaggaggacaagggtaagaagaagtgttgcaatctccggtttcgatgaaatcaagaggacagttggagatagcgcagaggtcggaggagggaagggaagagtgagcggcggagcaagaaggggaggagcaggagacggtggtggcggaggaggagagagatgaaggaggagaaggagggagtggtttggattcacagaggatgcaagtgaaaggacggcaagggaaccaaacgaggtcgcttccggtgtccaagtacaaggagacggctgaggaggaggagccgacggagagggagatgagataatcgctgccggaggagatagggagtgaaagttgttgttgttgttgtttgtggtggtggcggcggaagcgggcggaggaacgggaggaggatgatttgagaaggtggagaggagatgaagagtgttttgaggttgagagagagtgggagagatggaggagaagaggtgttgataatgatgacacagagaagtggaaatagtattggagaattgttgtgtagaggaagaagatcaaacaagttttcatggtggataataaaacagtggagtccaaggaatggttttgaatttttgaagcagaggaggtcgagtgtttttataggacagagcaaagacatattgtgagacgattaaaaaataaattattgttggctttcatttcagcaaatatagatatttatgcttttgacaaaaagatatttacataattattttgaaactaaagaaaaggcttgagcgatgaaaagagtggcatgcagagttttagtcctagataaagaattagatttagacaggaaaccaacaccattacatatgccaaaacgcagcagtatgttgaaacttgcactgtaatagtaatactattgtctagctagtctttgatgattggcaaaactcaaaagtcaactgcattgtacattgatgagatgggggagtttcgcatgcaaccatacatgatacatttattaaacctacgtttgttatcttctcttgtttatgtttcatttattaaaattcaacttcattggtttataacatatccaatccacaccctcggataatctcaacttaaaggaaaaatatcaaaagccttgagacgctaaaaaacataaatagtggaaattgtaaaaaaagcaaagaagaaagtagagtccaagccaggtgggatattgccatggcatggacagggttaaagcgtcgaagagagagagaaaggtacgtgtacctcactcttctccacacacaaatacaacttaaattcctcttcggtattgtctcacctgacaattttctatttttttactgcatttctttagaaaattgctctgctaatatgaagtctaaccaaaaaaccaaacatttaaccaattaatcaaacatccaatcgagccgaaccacaacacctagccaatttgccgaccgcagcttgaataatcatctatcatgcagccgaactttatcattccatacatattcgttacaagtgtatgatatcatgggttttatggattttgtaaaagataaaaagggatgcattgtttatcccaagagactatatcttgttaccgattttcatgaacatataatctaaactaatcaatcatcacaaaaagattagataacaattaaaagcattaatataaaatgccagtggctatgttgtattgaagctagattaggtagagagaatcgctagaggacaaatggtcttataaaattcaccaacctcctccagtacaagccgatactttttcgattttaaaatacgaaaaagtaatttataggataagtttcccgcattgaaaatttggaacatcaaaaatactttgacttattttactaaaaaagtattggaaactttgaaatacgaaacgaaaccgtgtcaatggttttggatatgatgggattcgtcagctcttaattaaagagagcatggattctttttgttttcttttaaatctaaaattttggatacagctgttaacagagaggcgatttcgagaaattatgtaggaaaattaaattagctgtactctgaaaatacaaaaaacgagaagaaggaaccaatgaagcaaaagcaaacctgaggtttgagacttgagagtgacgtttattgcagctttgtagttttacggcaaaaaaaataaaatcaatacgttggttcgtcgctacaagaagaaaaggctcaagcctgtcttcttcaccagagctgttgtcctcacaagcaccagctttagcttttttttatagctttcttgtgtcaccattaacacaaaggttactagagatttgatttcatcaaaaagctagtcgtcggtacatgagattaccatttatttccattaattgcatacactacttatttccataaactgcatacacttccaagtggttcatctgcgaatatgatgatcctataaactactggaatcagcaaatgtttagacaggtagtatcatcataacacaagtcacacaactgtaacaaaacaatgagacatgggaggaatcataacttattgagagccctaagagttgtataaccaaacagacaagaagacgaactcaccaacctattcatctataatcattgccaatcaacaaaacaaattgatattttattgtaaaaattctctcttttagaagtgcatgatcaccctgcaactttgttcaaaggcattacaatacaaaaaaaattataaggacatgaccaacccggtttaaaatatcaggaaaataagaagctttgttgatgtctatatgtcgtatatagactttatgaactaaaaaacagagcaagaaccaaacaaagagttggtatttgacaggggtggttgaggattacaagtagatccatccaaaaaatgcttataatttgtgggcctaaatacttcaagacaatgccaacccaagaatctcaattattgcaattccctactcatttagaacataacaccattaagaagttttgttgctttgttatctcatatacttgacttcttctagtggttcctatcaaacgtccccagaatgttataccataacaaatctcagaaaaaactatcttagaaactgtattcccgcatccaaatcatcactcaaagaagctaaaggcagtgcaactgcaagctgtacttctatctaactacacaagttgcatgtgaagtgtgaacagagaagatttggtctcaatggcatctagtacttagataagctcaggtttttagttatgatcacccaaaagtcttatccatgctattgatacctaaggatccccctacaagggaaaacgagtaatctgaaccgcctgagtataggcgatagtctgaaacttaatgctagattttcaatctcttttgttcccctaatcacagtgcttaatacctcctaaaatttgttagcatgacctatactgtttccacctcacacgatcacaacacagaaaggtcactactaacgtacaagttcattcaagacgtgtttacctgttatgtggataactatgatgtcgcaagaacacatctgcaccagttaagctggaataggatgatgatgatgatctcatgcactgcaaccagtacaaacccctacattttagagatgacatagcatcaaagcaacacaagaaggcccacatataccagagatcctttatggaagtaaggggtctaaatctctgattaagtctaaatttcatggcaattattccagagcttatatcagaatccttcatgtatacgtctcatacccataaagcatggaaacaatgagattggtgttaagtgttaactattggacaatggcagaaattacatataattacttgacacatccttctttcatatacaaaatctctaataatatttggcatttgttcacagatttgccagcaaaagaatagaaaagagatattgcacagttttagcaaagagaagcaacgcaatgcggttaaacaagttgggttcagttacacctttgaaagaagaggccttatcttctctagcagtgtctcggcttcaataaatccacccaaaggtcccaaagacttgtacttgatggctttccatctgttttgatgacaatattgataacaaagcttattatctcacagttttcaagccatgggaaagtaagagagagacgcaaagaatttcccaaaaaagatcaacgagtatgaagcatatatatacctgggcacataaggcaatgcaaaacagtggagatggagatgatcaacactgttaaatggtggctggtgaaaaccaaatctgtgagaagaaagtacaaatcaggttaatgctacagaagtcaccaaaaggagccttacttactccaaattcataattgatttcattgagtgtatgtaaccaagaaagctcacctatgaatgctttgaggagcatctttctgcaacagttgttgtcccacactaagcatgtgtcttactgctcaaatcataaaacaaacatcctcatcgaaactttacataggcacaacagaaaatgaagtataaaaatgtttagataaccaaccaagtgagtagtcttcatctcttctctgaaggtcattcacagtaggaatatgttcttttggaatcaccaaatagtgcctacatcatcagtgctttgttcataaataccagtaaatgatagctaagtaagcaaggagatgcaaattgattacaatggacaagcttaagtaaacggaatcaaactcaattcacaaaactcgatagagcaaagtgagtgaacagagacacaaacctctgggctgcaggcttgatgtcttgaaaggcgatgactttctcatcctgaaaaaaagataatcgcagacgtaagaaaacttgttcaatttagcctctgatgatgaaccaaacaaacaagagaagggaagaagaagataacggtgtgaaggagacgagtagtggttggatttcgcacgatctcacagaagatacacgcctgattcactcccgccataattcttacgtttggaatttgaaatcgctgctaaccaaaattcgaaatggatttcgatttccaagttgtggaaatgggaaagttgtcttctccggccaaaagcctctttttttctccgaaactaaatatttggatctttcattttaaccccacaaatatttttattgctaagttaaacccttaactcatatacgttccgatttagtatagtctttacttgtattaattttcaaaaatatggaaaatttgcgctacaccaccgaataaccattctaactgacgaaaaaaatctatatttgatttgtcctttttgtagattaattttgttttaatataagtataattgatagaagggcttccaggatttggtattttgtatttctcaaatttttgtaatatttattttattatttgattactcttaaatataaatgtaccgtataatcaattttttttttgtattttattttatataaatattttttaatatgtgtataagtccttatttgtttttcaattgtaatatatgtagatattttcaacgaatattatacatcaagagctttagtttattttcgttaaagttttcattctttattttaatattagatcacaataattatgctataaggtgattctatgacatttgtagagtagtttaaatatttttggtatattgttccaacaaaggtatatgggaaagttgaaattctattatctctgatttagtaataatagtgtttggcctatttggcatcacaaaagagttggcagttgggattgttttacttgtatttaaaatttcgaaagtctggggttcatttgcaataaaaagaaaatgatgagggcctaaataaacaataaacataaacaatcgccggaaagtttcttctcacgactaataaaaaccttaaaagctctcctccgttaatgtcgcctctgtcttctcttcctcccaaaacatttatctcctccttccattgccactcagtgactcgcctaagaaggtccgtcactgctcgaaccatgagctctcagtctagtcaacgcgtcttccagctcagacaagaccctctcaccggaaattccgaatggattgtcattgaggacaatgaccaacccggaacttccactgacggcctactcgcgacgacgtcgtatctcgacatgctcaatgattctcgccgtaacatagcttatcgtctcgctatcgagaaaaccatcactgaaccttgccacgtcctggacattgggttcgtcttctcattgagtcatttccataaacttgattcaattcttggtttaaacactcagattttgataaaggagaatgtggaatttgtgtgtatagtgctggaactgggttgctatcaatgatggctgtgagagcaatgagaggtgattcaaaaggaatggtgacggcgtgtgagtcttacttaccgatggttaagcttatgaggaaggttatgcataagaatggaatgactaagaacattaaccttatcaacaaacgatccgatgaactcaaagttggatcagaagacattgcttcacgagctgacgttcttgtgagtatacaaagatctatactttgtagttaatttttcagaaggaaataaccataagtgtgtctctcttcttcattaggttagtgaaatattggactctgagttacttggtgaaggtctaatcccaagtttacaacacgctcatgacatgttgctggttgataatcccaaaacagtgccatatcgagctactacttattgccaggttcgttatttagtctaatcgaattttggtcattctttagcttgattgaattcattctcacattgtttccctttgctctgtctttacaatattttcaagcttgttgaaagcacattcttatgtaacttgcaagatctacgaaataacgaggctaaaacatccgatggtgttcgtctagttcctcctggattagagagtctatttggtatcaagtcacaacagtatagcatgcatgttgatgctattgagaaagagatcaaactggtactagtatcctgaacttctccctacagttttgcaatgagctttagtttataaactcaattcatatattcatccagttgtcagagcccgtcaaaatatttgaatttgacttttggaaacggccagaaagtaatggagagcttgatgtgcacatagaagcaaaaaccacgggtagtgttcatgctattatatcatggtactgtatcctttactggctttcttcttttcgtttttaggtgtttgaactgcatatatcttcacatattagtagttagtactctacaacgaaaaagtacacttttcttttttggtgatgcattatcatgcattccacctaaaaggccttggcagagggctcaagacttgacctgttttaccagtatgatatgaagaatcgttttttttttggttcaggtgggtgctgcagcttgatagtgaaggaacaatcttctattctaccgctcccaggtggatagattcaaattctgagataggtgagttacaccttactgtgacttatgtcaattctcacgctgttatatggtttagaggaatccctttttcccccagttgcagtacattcagctccattgcgatcgaataggttgttgatcactgagtcatttgaccaattttggttttcttttcttgttaaacaggtgttagagactggtgtgaccattggaaacagtgtgtttggtttactccaggaacaggcgtgtccatatccaaaggagaaaaagttcatttgcatgcttctcatacttgtactaacatcttgtacaatctgaagaagactcaaagcttgacacatgagaggacacactttcctttaagtactggagatctacacctcacattaccacccgaaagagtcgcaatatatggtgacagtatatatagacaatccttgtttgaggccacaagaaaagctgtaggttctaaattctatgtctatcgtatatttacaaaatattcctctggaaattgcataaggttgtggtgatattttggcttgttaatcctaataaggaacactactctaatccatcgtaagaaatttattcatacttgtcatattatatttctccaacattccggagcacactttaatgtttcttctcctattttcagttacaggggaaatcgtatccacaatgtctcgtcattgatgacagtcttctcttaccacttatggctctacatatatcgaacagatcacgggttttatcattgtcacctgggttgcaagagaatgctgccagatactttgaagccattgctgattcaaatggcttttcaaaagatcgtttcgaatatttcagagatgggaagacaaatttggccaaagcgtatccaggcaaggtacacttccatttgatgcacatcatattcaaaattcataaaaagttatggtttgttgccgaactcttgaaaagttatgtccccttagtttagtccttttgcttagtcatttaattccttaattgttttttgggttccattttgattatgtgtccctatgttttaatcaacagattgatctgctgattggagagccatattatagcggacttgaaaatgggcttccgtggcaaaatctcagattctggtaaatgttgatattgaattggtcacgttgctttgtcaaagacgctagtttgttaacaatatagcctcaattactgtctggtatgcgtgaaggaaggacagaactctacttgattctgtcctgtcagaagatgcagtggtaatgccgtataaaggggttttgagaggttgtgcgatgtatcttcctgtaagtactgtgtcgttcgtttcctagctattctaaaacagaaatgcgtttgcttgtttattcatgaaatgggttatgatgcaggatctctggaagagccgttgttgcctgggaagtgtagaagggtttgaccatactctggtgaatacaaccttagggggatgtggtgatctaccttctggtaaagacagtccttgtttgcccttcttcatctggcaatgtggagagacaaaggtaaacagaagttgttagatttatatgtattggcaaactttgggaatgtaaagatggttccttttcttggacaattttcagatacttagcaaggaattcacagtcatggagtttgacttctccaagcccatcacaggtccatgttctggggaagttcaggtatgttagttggaaattcacatacatgcagtttgcagaggcatcagtagtacacaaataactcggatgaatgcttttaagaaatgtttttattcctgcaaacagattgagtttataaaacccggcgtatgccatggaattgcattgtggatggattgggtgatggatgaagaaaactcaaccgtgatctcaacaggaccaggtatgagattcttaaccttgagtactttgcttgaaagggatcaaatagtttgatcgttgcaggctgatgcttacggttacccctgtaaattttgacaactaaagggcagtttttatagattgtcctcttagctggtttcagtagaggattggctttttccccaacatgttactttcagggcttgcacgatctataaggggaataattagcggatttgtttctctgcgtacagatgataagtattggaaacaaggagtgaagctcttagggaagccagtcacagtaagaatggaaggtccttcctcatccataggaatacaagcttccttagatttatcttcaaacagcgagctcatcgtcactcatactatttcttgactgtttttttttttttgtcttaatccaatcctgttcaatttcttaaatatgaaactttagtaaatttgattttgtgatatgtatcctctattgattgttatggttgcagttatgtacatagacacattttatttcgacagcacgaatcatgattgaatctctactttgacggatttataaatggattggaaaagaagacaaaaattgaagtctaaaaaagtgacaaactccactggcttttttaactgtgggcgtgttaacagattgagtgagtccgtgggtgtcaatcaaagactaatccaactcaagttctctttatcttttatttacaatatatatcaaaaaaatcaaatataatcagatgagaatgctcacaaaccattaagcaaaacaagagaggtctctgcaaaacacaaactttataactcaacacatgacacatctgtatttgtctcttcatcaatgttttccttcttctttcgaagccgccacataagagacaacaactgtaatgtcatcaagcttaccaccgtagtatctgaagccagcatcttgtgctgctgtcgagaatggagtttgtctgtttttgtcctgtgctctttgtcgcgccaatgctgcaatcttctgcgctgttacctggggatctatgttggctctcacagcgtgaaccactatggctgtgatctcgttgttgtacaggttgtcaaacaacccatctgttccagctattatgacgtctccaggagcgacagcaacagtgaaaacctgacctgagcttggcaaatcgccgtttcttccactctccagctgataggtgaagttgaagtcatgctgttgaacaggggaacggaaaaccgtatgcccttcacgaacaaccatgaacccgctgtcgcctaaattgattgcatgaagtccctggttggttaaggctatgatgcaagctgttgaagacccttgcgactttgtgcaagtatgagctttttccaatactctggctggatcaatcgaacctttaggctcatcttggattgcattcactgagttagacataagctcccgagaatagtaacctgcatcaataccaagctctgcccaaccccccacaccatctgccacacctaatgcttgctcttcagcacagataaaatgtgcatcctctcccccagtggcctctttatcaggatgcggtagataacacgaccccgagacaagcttcagaggcttagtacatagcttagccgctacagaatccgaagaatctctaacctgttcgtcagtaacagagttatctaaagagacatcaggcgcattcccagctgataagcgattagagagtgagctatgcaagcctctaaatcccattcctcttctttgctgattcaaataaatccatctcttagcacctctataagcaaaatacgcacagatcgtagacttctcattgtgatctttacctctgagtctcatactgattcttccacggttaggaccatctccagataccataccaccagtgaaacgctttgaaacaagagaagcagaatgacgatccacaaacaaagacttagaacctaaactcgccattgatttacacggatccgaaagcaaaagatcaatgtgatatccacagacctgaaaggccggaccagatacagaaggaacagagaaagttcgagaaacagcaccaataacagaaagattcctcctttcgttaatcaacaacaaatcagagctagctggttctaaaaacccgttagggttagtaaatctagtgtacaatcctctataaccaccaaaccctaaattccctaatccaatcaaaatcttaacttgtttctgaagactttctctcacaggtaacatcttaagcacaagaatctcgaaacccagtaataaccagagatagagaagatcatatcttccaaagcatcacttttttcgtcgatttaaacgctttcaccaacgaatctaaagattgatccaacacaaacccttgaaactcagagctcaatcaaatacgaattcggaacttaccaggacccacaaattctcttttcacctccttctggagaagataatgtcaaagtcacaacagaaattggctagaatccagataagtttctgaaagaagagatgacaaatttcacgaaagaaccctagccaaatctgatctttaagacaagaaacacaaaagctggtggtcaaaagcaactcgcttttttcttttgttctaaaaaaaacaaaaccagtgaaattttgggatgtctcaaaaaaaatttctgtatttgaggtttttgtgcgatgggtacagattatcagaaattcagaatgttcctctcacatctttttggatataagtgattttcagctgttggatcatacatttaacaatctcagccgtacattttctgtttttataaaatagactaataacgagaaaccgagtcgtggagattaatgggcgtacaaaagcccattagagtagcaatcaaagcccatgcatcggcatcaaattgtttttgaggatcatttgtcaattgtcaacgagtagagccgtgcataccatacaacataaagggaaatagccatagctaggccacaaaaaaaattctactacttaaaacgccacattttttatacaaattatttgatttttttggttacactaagacttttttccactaaaatagattacttttacattagaaatatgttataaagttgtaattttgtgaaaataccattcctataaatattttaagatgcttgaaaatcatattttgtcaaaataatagaataacgtttctaacgataattagaaatcataaaataatatacatgttaaaataaaataaaataaataagtagtcagtacaaaagaaagtttacacgtataacaatttgccataggcctccataaatccatcatatcagaccactctaatgtttttacttgtaaatatttgatggacaaaaacaaatgctgggcctactatagctactatcatatggatgttacatgcagaaacaaaacatgcttttctctctgaataacgaactaaacatgttatggattaggccctaatagctagtccagttaggattttaagattttccgatgtatattaagtgtcaatgtgtcatacatgagcctctaataaacacacgcccaaaatcaatagaactaactaaccctatacaccgaagtaatatagaaccagcacgaactctagatctggaaaatataaatacaaaatatcttttaaaatgttttctaaatattattgtaattatcatatgaaaaaaaaactattcataaaaagtaattatcaacatatgtaatctttcaaagatgcacttgatgtgtgtatcttgttggttagaattttaatttattaatcgataacttggaaggcaaataacagtaaaaataataatctaactgtagtaaatatctccccacacgtcattttttttatttttttttattttttattttggcaactcacatggtttgattcattgataagtcagtttcaattttatttttctcaaatttaaataattctccatttctaaaaataaaggggcaaggtattggtacgcacatgagactaacattcatacctttttatgaaataaataaaacaaaaagggacacaagaaggaacgcaagaattttaaactgaaatgattgtatctctaaattgagaaaaatcccaaaaagaattagtaacaaattaaataactaagcggtgttgttttattcggaggtaaaatatatatatggagggtatagcgtcaactcgcttttttactacattttgatttctctcccaaagttctttaatttttgtttgggtatcacatttgtagtcagaaacaaaattgttgaatgaattatcgacgactattttcactcgttggaatagtcgggattcaatttattaaaccgtcgtaaggaagctaaagatgtaaaaatgatgatatacagacaatttggctagctcattcactttttaaatgggcaaaccaatcatgaatgctagtttaatttatcgtgtgattgattttttttttatataaaaaaatagaagtaaaattgtaactttttatgaaaaccgtcgtaatcgtacgtcactaagctacaaaaatacaacaaacagtgactaataagaaaatgtagagtgatattagatgaatttaacacgtggaaaaatcatgaggaggagatgattttttctgttgcattcccttctgtggttaccagctacgataacgttcacgccctcctccacttaaattagaatgtgagaaaataaaatagcaagaaattggagatcacaacagtattgagtgtaggacatattacaaaggagacaaaatcagtcaatagtaaaaaggtatcacaataaaaaaaaatgtcaataaaaaggggccattgtatgacatgaaagaacaaaattaagtgatcatcacttctcctcctttatcgagagcttcagttttagagcaacaatgtctctatttctgaagcccttcctcttcctatacgacaccactcttagtcttctcttacttctggtactttatagctcgatctctctatatataaatacttaaataattactgtgacattaagttaattgttatttctcatgcatgaattagttcaatggatggagtcttgaggatacagcagcagcccaaaagaggcgtgaagcagacaaaaatgctgcagaaactgaatggatccaactccaatacttgtggaccaaaacaaggagtgttgtactacttcccgttttcaagggtttggtggttatgtgtttggttctatccattatagtgttcttcgagagtttttacatgaactttgtgatactcttcgtcaagttatttaaacgtaaaccccataaagtgtacaaatgggaggccatgcaagaagatgttgaggttggacccgataactacccaatggttcttatccaaataccaatgtacaatgaaaaagaggtatacgcatatatatactacctttattaattacactcttttattatatggttgatttagtagttcaagttgtagatgattttacggatccggccgtaagggtaagtagcttgttcgaattccttttttttcttatttattaattagatattacaaaaaaaaaactaaacaattcatacaacatgttaaaaacaatggacaaaccaatctaaagttcaaaacgcattggttaaatatttattcaaccgattttttgacctagaccgctctaattacttggttaagaacatcagactaatatatttttaaaatttaaatttatttaataaataaccacaaaagtggaaaaatattttgaagatacgaatatataaaaataacatcatgttttattttaatttgaaaatagaaaatatattgaaacatacataatttctgtaactatcatatatattttattaattaaacaaaaataaaataatatgaaaatgtttccgaaattttttgtttaattagttaggtgttagacttagacccccttcaagcgcttgattagtgcctaatttttttgcacaaactttattttgtgtttcttatcttttattggagaaacaaacaatataattgtttgcttaattttttcttttataatacttttaactattaaatttaaaatttgtttgaggtttaaatagttctccttatatatagaatttccgataataaatagtatagtgtgtaacacttttctcacaattttttcacctaagatgtttatctttttcctataattgaatcttcttttgatttacaaatcaaagatatatcacaaaattttgatatagacgggacttctatatcgatccatcacatattagaatgcaaacattgtaatttgtatatatagtatgatgaatgtgaaagtgtaagcaggaaggtgtggacgtagagattgcaaaatggcaaagccaaggcataaacataaggtgtgaaaggagagataacaggaacggctacaaagccggagctatgaaagaagctcttacgcagagctacgtcaagcaatgcgacttcgtagcagtcttcgatgctgatttccaacccgagcccgattatctcatccgcgctgtccctttccttgtccacaaccctgacgttgctctagttcaagcccgatggatatttggtatgtttacaatcattttaatttgtgtaatgtatttttttttccagtaataatgaacggtaattttctggcagttaacgcgaacaaatgcttgatgacgaggatgcaagagatgtctctcaactatcatttcaaagtggaacaagaatcagggtcgactagacatgctttcttcgggtttaatggtatgactaattaaatctccaagcatatcaaaataacacaagctattagaaaaaatgataagaatcatgagactacttactaattgattatatatgagttggaagtcatctaccctaaggacgggttagtcaaaaaaattaaggcgatgatccttaaggattgccatcttaacctaagagagagcatagtgtgaaccttaaactaaatgggaaatatgaggaagtataaaaaaatttcatagaaagatgaacattaattacttagctccttcacttattattagactcgttcaaaacaccttgtggacgtctataagacatattttttagaccatatatatatgaaatagaagtgagatattaataaatataggaaccgcgggtgtatggagaatatcggcaatggaagcagcaggaggatggaaatcaaggaccacagtagaggacatggacttggctgttcgtgttggtcttcatggctggaaatttgtctaccttaacgacctcacggtaacacacacgttttccttaataaattaaagaatttgttactcaaaatcattagattgctaaatacataaggctccttttgttatcacaaacaaaacaataaatggctaatttggctgtatgcaggtgagaaacgagcttccaagcaaatttaaggcctacagattccagcaacataggtggtcctgtggaccggcgaatctatttagaaaaatgacgatggagatcattttcaataaggtcatttttgtcactttgcttcattcagaccccatgtgtcagtgactgatgtcctggttattttgtctttagatgtattgggaccccccgatagttataagcagggtgtcctgtttgaactagttgaggaccagtgttgaaagacacgtttcagtgattgattggtttaagtccttctctttgtctcttgtttggaccggggtagtgtgatatgtacggtctaatatcaaccagtttggctaactaattagggtttgttcggtttcaacatggttcgattttactaatgcttgatcgaaccaaacttcaaaatgatacttccgttattaatcagtgggtagggtttaatgtggttcagtcctttgtttgatattttatttcattttccagtttaagaagttttgaggattgactttattaacaaggaatgtttgttttggaacagagagtatcaatttggaagaagttttatgtgatctacagctttttcttcgtaaggaaagtggcggtacacttcttgacattcttcttctactgtataattgtgccaacaagtgtcttcttccctgaaatccacatcccatcttggtctaccatttacgttccctctttgatcagtatcttccacaccctggcaactccaaggtacgtcttaatcactcatcaagattaatatgtcttctaactttaaattaatgcatgtttatatttgaatcaaccagatccttctacctcgtgatattttgggtcttgttcgagaatgtaatggctatgcatcgaaccaaaggtacgtgcattggcctacttgaaggaggaagagtaaacgaatgggttgtgaccgaaaaactaggagatgctttgaagagtaagctactctctcgggtagtccaaagaaaatcttgttatcaaaggttaggaaaaaaaaagacgtatatatatttttccctttttgttagattaatcaagaagttgtaaatatataatgtttccgttgatgttatgatgttttgtaacgaatacacattgttataacaaaataaaagtgtgctattttgttgcagagtgaattccaaggaagtgatggtgggggtatacatattaggatgtgcactctatggcctgatctatgggcacacatggttacatttctatctttttcttcaggccacagcctttttcgtctccggttttggttttgtcggaacctaagaaccttcccggcccattatttttagtcaccaaataaattctccatgttttagttcttatttacacttttatttattttgacaccattgtacggtttggaccccatatcatcatgttgtataagtataacgaataatgattttttgtttgtttgaatgtatgcgtcactcggtaatttccccattattatttatcatcctttatttgaaaatcgatataataaacctatctgacgaattttacctaaagaaaatttttaaaaaagaattcgaaaggcaatgtatcaaaaaaaatttatttttcaatgattaagataaacaaaccatcaatataactataatttctatctcatatcttcacatctcttttcaaatcaagcgattgtgttaacgagctagtggatatattatatatgctcaacgaccattcgttttctaatccctcaattttgtttgatttcgctctacgtttagccaatttaatgacatgttttttggtaaaaaaaaatgcttactatccaaatatactacatccactagtggagtttaagtaataagatgcaaatgttctgaccaagaagaagaaaagtccgatatgacacaggaaaaaatgtatattttacagaaagagcatgtattagaattctcaacgtccattaaattttgaattttgggtgttcaacttcaaccacaatccccccagttttggttaaacatttccaaaatatttatttctcaaaatggaaaactcggaaaataaataatttattctaatattagtttcctattggccactggccagtcacaactatacgaccttttaaagtcttcccagtctcctagaaacatctgtctttcataattccattaccttaagtgattacatttgtatctgtaaaaaacccaaaaacaaaaagcatgaaaattgaaatttcccacaaaccccatttctgaaaattctccttggtttgtttgtacagtataaagaacaaatttaagcatggatttacaaagaactttgatgttctcttgttgggttctgtctcttttgatcatcaaaacgacagcgtataacgagaaacagctgttccagccgcttgaaacggaaaacgcaaacgcgatgaccgcggttatggagcgaggattaaagacgcagcggcggccggagcacaagaacgcttatgcgacgatgatgtacatgggaacaccaagagactacgagttctacgttgcgacacgtgtcttgatcagatcgcttaagagtctccacgtggacgctgatatcgtcgttatagcctccctcgacgttcctatcaactggattcacgctctgtaagcgtctcatcatcttctttttcttcttctctctttacatcgtcaaaacgccaccgtttaattggttagaaaattctgaagtcttttttttttcttttcttctttgaatcaaggaaataacattattttgtagaatagtttttctaacctcatttggattatacaaattaatatatactatgttttttaatttagagtaaagagaacatggaagagcagtaatgcgggaacgagcatgaaattaatttttaaatttttcaaaattttattatttggctctttagttaaagaaaaaaagacttattaaaattgagaatgtccagaacaagacagtctttggtcgcagacgtgtttccacgacctttttttggagtgtgcttgtcttttttttcgtctattgttgatataaaatatctcagccataaataaaaaaatcacaataggattttctttcgaacatagaagcttacttataaaatgatttatttcttcttttgtcagtattatttcatattcatgttacctttttcattttcatattcaaacttacatgagttaggtggaaatttggtgtttctcttttgtgtagtggaaagtgagaatttaagagattggatgtgtaaaaataaataaatatattagtgggattgcttgttgattttattataaagagaaagaaaatataatgttgttagaaagagtaatttggctgtcagataccttattatagtaactaaaaagtctcagaccttttctttgttttggtaaaaggaatgaattataattaaattttaaaaaatattttgaaagtttcagtatacataatattttattgctgcattttatacataatgcaaaaaaaatctgttttgatcttattataattcattaatgaggtatgtagggaagaagaagatggagctaaagtagtgagagtagagaatcttgagaatccatacaagaaacaaaccaacttcgacaacagattcaagcttagtctaaacaagctctacgcttggtctctctctgattatgaccgtgttgtaatgcttgatgtcgacaatctctttctcaagaacaccgacgagctcttccagtgtggccaattttgtgctgtcttcatcaacccttgcatcttccacactggtctctttgtgttgcagccatcaatggaggtctttagagacatgcttcatgagcttgaagtaaagagagataaccctgatggagctgatcaaggctttcttgtcagctacttctctgatttactcaatcagcctctctttcgtcctcctcccgataaccgcaccgcgcttaagggacattttaggcttcctttgggatatcaaatggacgcatcttattactgtaagtggctactatactctgcatttcaacaaccacaaaacattttgctaatctttttgtgtgttactatctttattagaccttaagctcagatggaacgtaccatgtggaccaaacagtgtgataacgttcccaggagcagtatggttaaagccatggtattggtggtcatggcctgttcttcctttaggcctttcatggcaccaccaacgccgctacacgattaggtacgtttcagtttataacagaccgaaacctagacaataatactcacaacatgaccctgtgaatcccattggatacatgctctcaattactattgtaggcatatatagtggttgcatgtttttgggatttttatgggtttggacctctgattctcacatatatttttggtaaggactaatcctcatgtgtcatttcagttattcagcagagatgccttgggtcctaacccaagcagtgttctacctaggaattatactagtcacacgtctagcgcgtcccaacatgaccaagctatgttaccgacgttctgataagaatctaagcatgatccagacagctttcaagtttgttgcactcctctttatcctctcagcctacattataccattcttcatcatcccacagacgatccacccgctcattggttggtctctctacttaaccggctcctttgctctctctaccatacccatcaacgccttcttgcttcccattctccctgtcataacaccgtggcttggcattttcgggacactcctcgtgatggcttttccttcttatcctgatggcgttgttagagcattgtcggttttcgggtatgcattttgttgtgcaccgtttctatgggtctcctttgtgaagatcacatcgcatcttcagattatgattgacaaagaggttttgtttccgcggttgggtgaatccggagtcacttctggtctcagcaaattgtactgattaagacggtaagattttgatcaacttaatggattgcttatgtacataaaggttagagacgattaacaaaaatgaaagataatctctcacattttctaggtactttgttcactaagattcaaaagaaatgcaagttcattagaaaggagtttctaaatagtaaatacatatcatcatcgacttaacagaacactacaaaaaaagttacataggttgtggttgttgtgactgagcacatccaaaatgggcctgatcaaatgagacccataatggcccatcaagcatcttcttcagatttaagtttaattcagattcccgacacgatgtcgttttacagcaaggtcttcccaaatgccactccactgttttacagtgggccctaatgaattaatatgatatttttgtcaaaacattttaggtacatgactccgaataattttcttacaaattgttattttgtgtgaatatgataaaattatcaccaaatgtatggtgaacatgaatattacttaaaatttggtagctctaaaatagaaaacaaaacataaaggaatatgggttcatgtttgtatgatcggtccacacattttccaacggaagcttaaagcaaaaaagttgtgccacatgtccccgacctttatatgatatgacaaactatccaatttactaaaataccctgcatctccatttcttcagacacatactgtaatgtttttgttcctcaagaaaattactcaagcaaactaaaaaatctcaaaatatataaaaaagactcttcgtttaattatggtgtcgatctgtcagtggataattgtttgtttaacactgagagtcaggcaagggtaaacatgcagaaacgtgattttgaagatggtggattcagggatatttctgtaataaataagtatgttacttaatgaccttgcgaatagaaaaaagaaagtgtgttgtcttttttttttgtgtgttaagaaagaaacataaatggttctgttttgatataaaactactactactagacagagttacacagatgcagctggcgacacgaactacaccacaaacaaaataggaattaaactaccaaataagtaactatcctctcttattttttgtcaataagtaattgtctttttattgttttaagaaaaagtagtactccataaggtagatataaaccgatatatcaaaaaatttatgatatacgatctctgattcatataattattcgtagctagtttgtcagaggttcaagaagagaattacaacactattcaacgaatagtattcattgcatttttggagaaatatctcagcatttttgagtttagatatttcacttatcgagatatttttgaatgtttatgatctaatcatattttggatggttttatgtatcaccacagtgtctatagattctagttgtgacttgtgatagaataatatttacaatttacatagagcacacacttgtgtgagttgtgtcataaaaaaatgtagttgaaattaaatagttccattaaaaacacattactaaaatcaaagatccaagatccaaagatcatgcaaaagaatcatctcaagaattccaaatatcaaaacgacataacaaagatccaacaatttataatcaagaaagctcaaattgttaagaaaactagaaacagagctagttcctttggtttctttggtttttgttgttgttgtcttacatcaaaagtacattgttttgataatatgatcccaaagattccaaaaccaataaacggttttctctaataaagaataattatcttgaagacaaaccaaatcatcaagattctttgattttttttgatgttactctagactctgaaacctttatatggctgaaacgacggtgacagcttcagcttcttgcggcggaggaagattcagatctatcatacagcgacggagctcagggaaatgtcttttttccggcttcctctcttcctccggttttttcagtttaatctcgagctcccttgaatctcttgacagcatcatcaagcacatagctaaatcttgttcaggagaaccatcagagacagaactcgctggttctggtgactcgtgaattgtcttttgcttcttcgagttctcaaacactctcttactctttgccttcttcttcttcttctttgaaacatctcctctgacccgtttcttaaccgggtctccggattcaggttcggtctctgtctcactgttgtaaattgtggatgactcaggatccggattaaagacccggaaactcttcctcgggttctctcgtaacccgtaggcgagcgctttaccatcggaggaagaggaagaagaagaatagaccgagtcacctagtttcttccgagctgaagactgagatgagaccaagtgagacttcatgtgaccaccaagtgctctgccattacagaaactcttggaacagagcttgcatttgtgtttgttctgcattttgccaaaagaaacaagaacagaacaaaaagcaagaaaaagaaacctaagaagactttaataagtttcttttgtcaaatctctctctcgatgtctcaatttgattagagagactgttgtagtagagaagctatgagagagagagagaatgagagaagttaataagagtaggtaacaagcattcctctctttttcacaaacccccaaaattaacaattatgactttttggtccatacgataactaccactaatgatacgtaaagataagtttttttgtttagttttagtaagaaaaattaagagaaaactatactatttttaattctggctgacaacgataaccaccgagtgaagaatctcgaattaatgcagaaagattaaaatttgaattattagttaattacaaaggtttaaaagatagactaacaaagcacaaaacaaaaagctgttgttttgcttctttagttgattattgacttcttaaagcataaaaagagtttctaagcataacaaagtatgtgtgtgtgaattatgttggttgggttagttggaggaattgtaatggcagaatcggttgaagtgtcgaggttggaattatataaacgattgttttagttgcattgattttaattgggtgttgaggttttaatgctgaaatgtcatttttaacggttaaacgtttaaataacttgatactcatgagtttttattagtggttcgagtgtttgaacaataaaaactaaacaacatataatcataacatttatataattgtacttaggttggtatcctttaacatacgatggtgtcgacacataagtgaatgactacacaatgatgattggaaaggtccaagtaagttgaaccactagaccaccataaatccaaatttccggtttggttatttagtttttttcttaaagaaaaatttattttaaaaatagagaagtatatgttttacatgacttcaacatgttttgcattcggttccactttgtttagctgaattgagaactcttggctgtcattattttgtttgcagcagagagattatactcattgctgttatagtctcatttcaaatgaaagaaaaagacaaaaaagtttttaaaaaaatgtaattgtttgcgagtgtgataagtgtcttaatgttttgaattttcgaaccgggactgaattttgtttatgattgcaagttcaacaaacttgacattcatacttaaatctctatttagttttactttaatttctacgtaatgggttaatgataagaactataaaatgattaccattggttcaatgatagtatagtattctgatttaattaccaataatacagatgatactaataaatgtgatagcttctccgattcgaaaaacttacttatgtgttttggttatccaaaacaagttggtttatactttctaagcaattagaagttacataattatttgtcgtattaactatagtaacagttcttgttttggttcatacaaaacatgtggatgtcaaaacagtaaatatgactactaataaaaaaaaactaatacttttttaacagaggaaaataccatgtattaaaaatgttatttctttgataaagtgtatgaaagatgttgcatagtcacacagacgtagcagtagtcaagaatccattaaattgataatatacctttggtaatcatggttttattgaaaaggtgacaaagaatacatatgttaacattaccagcaaggatttgaatttgagttgttggaactttaatacatagttgagtaaagaagaggcttacacaatggaatctatcgtgttaactacttagctttgcttcaatctcaattttcagtaactacgtaactcttcagatgcaaacaaaaaaatctctgttcagtgtttaatattagttaacttttcatccaaataaatatattaattgactataagaaagaaatcgtggaaacctcttggtctaatggttgaccaaaagttcattaatgcttttacatccagaagtctaatgttccagttccagctactgcgatttattagcaaatttgcagattaatggaagcacgtatgcatgatatctacaacgaagtacaattatagtcgttcgccaagattttatgtagagaagatattgaaggtatccatcaagcgcatggagaaagagaagaagatatcgacattgatggaggaattgtaatccttcttttgtccccaacacacatgcctgtgaaatttttaaaacttgagagcaatacaccatttgaaacaaagtgatgaaaacctttaggaggacgaaactaagttaccatttaagccaacatcccatcccttaatgactttaccatgacctgcatgtaacaacaacttcataagtatcacgtaccaatcacataactccatcccttaattgccatatcacataagtattaaaaggtgcttttccaatggtggaatcgaagatcttcccgttctcttgaagctttccgatatagcggacactaacctgcttggtcatctgctatgtaatgacaattctataaataccctgacttgcgtttttttgtttctaccttgtttgtcattatctaactccatctccacacctgacttatactctggctcagcttttctttgggaataggaaaacagtctttggcgtgtatttgcttagttccattcgcattctcatattaggtaggtttatcttcatcttctaactcaacggtaatttttatttatatataaatataccttcacattgaacaactttttacataacatcgtttaggccctttttcttcgccctgtatgtatgtgatgttttttttatatccaactattttagtatcacacacgaacatatactgtagtctacagcctactacatgtatatctaaccgaattatctgtaaagtaaaattgtcttacttctttaaacctaaactaaattcacaagaacattaagaagaagaaaaaaaaaagactttgaactaaagcaagagaggcttctgaagatcaaactctgttctaagcaaactttcttcatcatcttgtttcatttcatctatttcttcacaatcctcttttcctttagcccacagaacgaagtagagtcctccgaacatcaacgccattcccgcaaagctaatttgacagagaaaaacaaacaagaaagaagataaatgacttctctttctgtctaaaagatcatacaatgaatgcgaaaagctgcaaaaatgtaccttcctaggttgaaactctcttccatggtaaaagcagagacaacaacacataccacagttgcaattggactaaagagagacacaatcactggtcctttcctcttaatcacccatgcattgaagcttaaccctcctccactcaccaaccctccctagaaaaaaaacaaaaacattttcaacacatccaaatgttgccaaccatatatgatttatgacgtaccagtattgcgtatcccacaaggtggccgagaccgattactgatgcacttcccatttccatacttcccttaagagcatactgcaaagctactgtggtgatcccacccatcaaagataccatcgagaacattgatataggcgccggaaactcggctagtatggatgcctaattaggacgatcaaagtgatttcacaagcaaagaatcagattaattagcacaaccggatatatgatagctctagggctaagaaggggtataaggtgaaacctgaaggacaatactagaggacaagccgcaaatggcaaggaggagatagaggcaacctaagatcttgtccttgtccacaacgacttcgtcagggacaataggtatagtcttaaccgagcttaaagtagcggtagtactgtgcattaagctcataatgagagctcccatcacacacaacactgtccctcccatcttaactctactatacatacaacttagcttcactttctccatccttaacaattacaatttattcaaataacacattaatgaaagctctaatcttcaaacactaaacagattagattaacacaaaagtaaaagatttacccagcagcccaagcaatgacaaaaatgaaagcagggcagagattaggcatagctgtagccattgaagcagaggtgtgtttcattccttccaagaataacccctggaacagagtcactctgtttcaaacacaacttctctcttaattaatcccttgttatgaatttttaattcttctccttctctttaacgtatagaagaagcaaggtaagcatctattaatcaaaacatgcagaaataaataaaaagaggagtttttacccagcaagagcaaccaaaactagttttatcttcaacttgaaacttagacttctaggccaaagcttcctacaaatacacaccacaaaaatccaaatttttattagaaaaagaatgtagaataaagttcgaaacagagattttgtaaattaaaagaaagaagaagatacctttcaaggagaaaagcgagaggggtgatgagaagaactgatgcaaaggtgcataagataacgataagaagtgggtcaattccgagagacagcaactgactcagtagctccgagtttccggcgtaaatcacctgagctccggccaatcctccgattattcctgcttctattaacgtctctctcttcatcattttttcaacacaaaaaaaacacgaagaaaataaaaagaataataacggacaaatcagttggaacccatttggtaaccgaacagaaggattcgattttgtgggggaactaaaaaagcagagaaacactaattaagtttttggttttgttgttgttgataaatgaaaatagaaaagatgctttgtttgtgatctctctttttggtaatgtgtaatgcttgaagttgaaactttctctatctttcacttcttgcttttaaagacatgtgtccattacattgcattggttttattatggagtgtctcgccattatagctttttggggaagcgcagattttaatttatttttagtctaaaacggtgattatttttataacacatagagtcctcaaattttggtgcaatggatttaatatgtatgaaataagacaaaacaaaaatttgagagcggttagcttaatttgttaagaaataaatatttcggtgagtctgatatttcttaaatagaacaaataaataaataaataaaattcgccaaatcggctaggcaaaaatttaagattattcaaattgtcaagatttttatttgggaagttgccactatattaataaaatttggaatataaaaccatagttttgattggtaaaataacgtaataaaaatagcaaaattataaaacaagattctatttatttaagactaaagaataatatgtttattttgtcagtaaagtcatttaaaaaaaggtggaatgatcgatcataaatcgccctcacacaaatttatgttaaagatgaaattctgtactacagtgaagtttaaaaacatgcagagtatgaaaaagaaagataaaccaaaaagaaaggagaagaaggaaaaaaagacagatgcaataaactccgtcagattcggggaccttggccttttctcgggggagtaacaaaaatatttatcagtgttcttcttttgtttgtattcttatttttggatatataatacgacatcttaccatcttctcctttattcgttttacgtatctgactatctgttcactctttacttccttctttttttcttgcatgcaaatatggaatgtcttcatatttgtatttgtcacagtctcacagataaatcatatgtgtatgccatgtgcctacctacctataatcatttttattggtaaaaaaagcttcctattctaatatccttgttaatgctaatgagatggtttagtgatctgttttcataccgaaatgttttagttatttaacccaaaacaccaaaggatggtttagtgattcgttttcacaccgaaatagttttatgatcaaaatattttctagggatcagttttaactagaaaactagactagagtctataacgaattagttattttataataaatgatgtgcctatgaaagatttttaattggagatgtataatattggagatgttgtgtggagtgtaaaatatggtaggtgaagcgtaagataagaaaaaatgaggagtgtaagaaagaaaagagcaaaagtggggatgcttacacgtcaacaatcctcagtctcttttccaatgacttgtgaagcgtgttatcgtctctcttttctccccctctttttttcccaacaaatataatatgcgatctatctaaatatattaagttaagagtttaatctttatccacatacatttttttcttttgtaacatctgttatccatatcatgaaaatttaatgcgtttaaaagcttagaaacatttcacgctgaccaaaaaaaagaaaagttcacgctcaaaacacttaagacttagttttatagaccctaactagtatcaaaaccccttggtgtgaaataaaaggcatcttgaatatgcagaaactcatattagctcctaaaccggttcaaaacattctaatgactaatgagttgtgccacgtacgaacagacaaaaggttacagtctcaagttctgaagtctgtgaacatacatagtcttctcacgtgcccacgcgtctacaactacaaccgtcgccaactcacgtgactttttacctcttctttttttttttaatttttttttaaaccactttttgcttcttcatactacgaataatcatggtaaagctttatgaaagattataaaaaccataggacaaagaaaacaaaatttcgaacatcttaaccagttttgttctaaattatgatattacaacaataatttaaattgtttaaacccttctcaatgaaatgtccttcttctcgtgggattgtccttcgatatcttctcaaaaatgctttttccttttacctacgcttatatctgcacgataaaagtagaaaataccgagttaaaccaacaaattacaatttatgttactggtaaatttcatgtttatgatgaaatgtttcttacctggctttgctcttgaatgagttcttcgacttcgtccgaggttttgctgcagccgcggcaccgcctctgccctgtttcttctcgcccatatcactcttgaacagatctttcatctcttcaccacgaggctggtttcttggtttactccggctttgtttcttgtccggctttggtctctccatcttaccggaatcaattgctctctgttttgctttcaccgcttttgctctcatgtaaccaagatcctttagtgtcaatcccttcttatctgtctcctgttttttcttgtctttcccctgaaaaaaaacacacatttaaaatcaatacaatgtttgtcatcccggcgagagagagagagagagagagagagagagagagagagagagagagagagtgatgtgtatctctgaaatacttactcttgatcttcctctcttttcgtctccttcttcgtcttcttcctcttcttctccttcgttatcttctagcatctctctggcagcttctagctttctacgttttttcctaggaagattcttctgtacttgcatggtcaagagaattgtaagttctctaggaagaagcaatcaacactaaactagaacgataatgcaactgaatagtgaagagcttcttgataaacagacctcgcgttcacgttttctcttctccttcatcttgaggtcctctgctctatcagcactaactagttcgcctccagcagggttccctgcagaatcctattcagagaaagtataaagaatgattcagacaagtgtatccctctctctacaacaacaacctcaggaaattaaaagaacaccttttcagcctgtgccacgagcttcttctccttctctgtcatgaaccaagtcctttttgggcgtgcatatatttcatctctgtgctcaagcatgttctccgcctgcagaaacaagcccataatcacgaatttgaaattattcccacaataattgaacaaagacaagaaccaaagctgcctacctttgcaaattccatttcagctttccttagagctcgctcatccctgaaattgatgaaaacacctcaaagcttaagtatacagatcaaccaattctcctgggataccataattctttgatgagtgtgaatgaaacctctctgctgaaataacagcggaatattgatcttccatttcatcgattatctgagaccacttgacgattgactgctctgggatgactcggctcttcaactttgaacccaccttctttgcctttaaacaaagaaacaaagtcgattcaaatgtctaaacaaagcgataatgaattgggtaaaagcaagatccatgtatgtctgatgattcacttacaatgactttcaaaagggatcggtcactatcagtcacaaacgttacagcataaccttcccttccagccctagctgttctaccaactctgtgaacataactgcaaaatcaaaggaaaacatattgtcctcacatcagttaaagagaacaaaactagtagctttttaatttaatcataatacaggaaatatatcttgtttacctgtctatttcccgaggacaagcataatttataactgtttgaacaccaatgatgtcaagtccctggaatgatcaaagcagacagtgttcaagaggttaaatagcagagctactgagaagagaatcttgaaaataagttttttgcttcttatacttactcgagcggctacatcggtagcaatgagaaaatcgacctcctgctttctgaaaagctccagagactgcaaaatgataccattaagtacttgcaaacagagaacagaaatattcatgtacaaataaagctgatgtgcccaagtttcttacatcaagacgttgtgcttgagttaggtttccatgaagctcagctgctttgaggccagctaatccgaataaaattttcagtctatgtgcagcttgttttgttccactggcgcaagaagggacaaaaaattctctcagctgaaatacaaaatgccaaactatgcaagcactttatggaacttggatttgaaaggcatcatatttatagtggcttctaacctaaagataatgacttttgatttaaaagtccttgtgcacaatgatagaagaacagcttcctgatttgcctcacgagtcctgcgtattcttaccaccctacagttaggagatcacgagttagctaattggcatacatgatgtatattcataagctatttgtggataaatattttggctcttgaaaaggttgaaaatgataagtagtggctgacatactcctcagtcaagcctggtggccttctagctgatggatcagctgagagccgcaacggtttgttcaaggaaagtttgactagctctttaacttcttcagtcattgtggctgagaagagcattgtttgccttctcttgggacataagcgaacctgcatatagatgtggactcaaatataaatcaaataacgaacagcataacataatctctcctgttaagtcaaattatatagtgtccacttcttcagattagaaactaacaaagacaagaagttattgactacaattcaatactaggtgtcacaggaaccgaccgtacgaaagagataaacgcaaagaaatcagaaagataccagctctgtgatttcagtggcaaacccagtctgtagaaggcggtctgcctcatcaaggattaaaaccgctagatcatccaaatcaacagacatagaattacgcaaatgatctatcatacgtccaggagtcgccacaacaatatctggcatagacctcagaaccacctcttgctccttacacaagaaacattaaagattttagcaatcttgctattcccattttaagaaacgattctcagagagaaaataagcttgttctcaaacatcaaatagtgtacacagacaaatacatccttagagaaagataaatacatacccttacagaaagccctcctacaatcaatccacacttgatatcagtaaactgtgcaagattctgaatcatactgtgaatcctgcaaccattccaaagaaacaaatcagctttttcagcaacaagaatcaaaaggacttgaaagtttattattgttatgggaggcaaagtaatgctacttactggacggccaactccctagtcggagtgagaataagaactctagtagcaaagacccgcttgggacggaacagcaacctctcaagagtaggtaaagcgaatgcagcagtctattacaacaaggtaaattgaaataatcataatcaaaaactctatacattagttaaatacctaaacaaaatctcagtattacacaaaaccatcaatctagtactcaccttccctgacccagtgatggcactggcacaaagatcacgccctgtaagtgctaaaggtatacaagctgcctgcattgtgcaacacaagcgattcagataaaaactctaattagtaactgaattagaacactcttgtgggatgaattggacctgaatcggagtaggtttcttgtatccgagagtttcacaagctcgaagcaatggacgagagagattaagctccatgaaagtatcagcatgaaatgaaactccatccactgtagagaagaacggcttgggagtagcatcttctggtttgtactcagctgcctcatcgtcttccgaaagatactcctccttcacaatcaaaaccacatttcaatttctctaataacctaattcgaaaacttattcaatcaattcaaaataaaagatttacttgtttgtcagtttcagcatcggaggcatcttcttcttcttcttcctcttcttcttcttcatttattgaaatgggaactggacgatgctgaatagctttagagatcttttcatcaatagacgttgtgtgacggcgggcgtgttcttcaccaacggagcttgagtaagatgcaaaatcccaaggagattgagcatcagcatctcgtttccgcttctcatcttcttcttcttcgtcgtcatcttcttcttcatattcctcttctccatcttcgtcttctccagcttcatgctcttctgcttcgccttcctttacgtcttcctcactactgtcctcttgattgcgtattaattcgagctcgtcgtcactagcatcctcaaagaagaaactcgacggcattgctagggtttaagaggtttcagaaaatttcagagagacgaccgcctaatcgaagcaagaggtttactaataggtctggagaaaaaaccgaaccgatttagcaaaaataaaccattcgattcgtaatcttaaaaaaacggtttggtttgatttgaaaccaacaaaaccaacttgttttttagctccttgcattttgaaaagtttataactttgggctgggcttatgatacaagatttaatgggcttatataattaattttttcaagttgttgtaactttgtataatgatgttaaagaaaaaatgatgatacaaaacaccaagatgttattttctttcaaaaaaggtttgtataatgtgtacatatttagccaaaaaaacttaaaacagttttctgttttcttaactaaaataagattctgtttaatgaatttttttttctaatggaattatattctttcttttttgtctgaacaagaaactaatgtatatagcttgtaaatatggagaaaagattactatgaaaaagaaatgaaggtaggatcttaagaaagtagatcagatattttatctacattttttcctcaatctagtttggattgggaaaaaaacagtatttacttggagcacatatataaagtaatctatcacctatgaattagtcattagtgccattaggggtgggaccaatcatgtatagttccataaacatcaatatctttcaattttttgagataatgatatacacaaactcaaaaagtaatgaatcaaagaataataatcccttagaggaagctatcatcaagaccataaacctaattataagcctaactatatatgtacatctttttttgttcaactatatatttacatttacatagttgaaaaatatatgtacatttaattaaaaataaatgaataaaaacagtattttttatgcctataaacctataggaaaagaatcaaaccaacaaccaacagaacataaccgataaaattccccgacaagaatctatgtgatacggtgccgtttttaatagaatcttccgactgcgttagtgaatccaaccgtagtttaggattcggaccatatagcttaagtacacctgccacgtcatcaaccgtaaggtcaactttcttggtcctcggtcggagactcggatacataaccgccgactcctgcgagctatgtcctaatcccaacaagtgaccgatctcgtgagtcgccacagactccaagtcaacggccacctctgaagatcctttcaagtcatcgtcgacgatccacgtctccgccgcgtcgaggtgaagcctcccgttctccggcgcaaaagcgtgtgctaaagttccaagtacaccgtcaaacggaagcccgtcaccgtgatcaccagcgtagaatccgatctttaaatcagccgtcgtgaaatcgtcgacttcctcgaaactcaccggaatcacgcttgaccactgtgaaaaagctcgccggaaaacggttttgacgtcttctgacgtcaagtaatcgagtttgtgagttttggagatagcgtaggttagcgtatcacggttccatttcggtttaccgttgaaatacgtataatgcgccgttgtgtggaggaaatcgttgttgatggtcatgtgcgtatcgctaacgccacatcgcggtaacgacatgagagtaactgtactcgtgtcgagtcttccggttattggtaaaccgagattttcttgatacagagagattgccgattccagaggaccatcgaacacgtcggaaaatatttcggagccatcattgacgtaaccgaatcggtggaggtatcttttgagctctgatacgccgctgacgtggctacctatttggacatctacaagacgagagaaatcatgccacgtggaattgctgacgtgtattatttgagttgcttttgctgtggattgttccgcctccggcgtgtttctagcgccaaaccggtaagggaagcagaacaagattaaaacaaaacagagagctctgtttcttctatagattaaattacgagacatttgcctgcgtgagattaaaagattctgaatttttttgatttaaataagaagttccgtggaggtaagatcgatggagaagaaaaggtgaaagagagacagaaaaaggggaaagacttaagtagattctgacgtgagggtacatttaaaacctcaaaagaatctatgatttggactactacttggaagttggttcgtcgggtgaactgaacttttacaggtttaagaatcatatatatgaaagttggccaactctctccatatgattgacacatcatcactttaacatttgccatgtgtccactgaataattaatgtaagctcttcaacttttaatttatagattaatgatgtatttattatttaattttacatatttaattatactaatactaaatttattttgttattaaatgtttttcaataaaataatttgattggttttctcatactcaaaagatttttttctgtaatcttaactcaaattatgagtgtatagtagtcatggattaattaatagtttgaatagtttgcatattattatatatatatatatatatatatatatatatataataaatcgtcgagggtgaagagtatgtaagaagtttaatcatcaaattcttaggtttcgagaatcccaatattaccctctatttaattagtttaagacgaacattgtttaggaattgtgtgtataatgcattgttgagaatgttgttaaaaaaaatatattttaatactaagaataattacttattatataagtaaatgattagataattaaaaattatatttaaattaaacgataaaaaaatttgaaaataccgcaacgtagcgcgggtgattacctagtacatttgtaataattccttacttgttatataatacgacaattaactacacgattcaattcgatttgtgatcaccgtatcatgtatatgactacgtgaatatttcataaaccaatgtttagaagttcgtgctaattggatggcaaagatttactgaccaaatattgtaatagattcggcttcttttacacacaccaaaaaagaaggcaaacaaaaagtaaatcaagcaactagaggaattaaacaaacagaaaaaacatgatcttttttaaaaaatgagagcttacaaagatttttttttttttttataggaatagaaatttacttggactatcactttctaaatagagttttttttttttttttgtatttgagagtgtaaaatatagtaataaaattttgtgaggcgatattgaatgctaattagttagagattaattaatgatagctttttttggtgactatatatgttgattaaaggataaaataccacaaaatataatttcaaataaatgaaaattattggattgatatgtctactacatcacatcatactgtatatcggacataaaagcaagtacgtaattaatggattgatgatattcgtgagctaattaagctatgagtgtgacatagataatatggaacgggttcgttggagtatagttgaggtagctaatgagtttgttgaccagaattaggtaaatttcaatttcaataatatatccgatccttttttaactggagtattatttaagaataatcaagaccttctcaaggtttactagttcagattcttcgttattgggaaagtttgtctgaagaagaaatccttagaatcatggagagggttacgtgtgagaggagacaactaacagaagagtctcctgttgaacaagatagggaggttgaaccaaaaggataaacaattctaccaattagcttcaattatttaattagttttgtagattagtcctatcgtattcaaactctcttaagcataccattgttttcttcgttggaggctgcctatgtttatctactattattaaaaactatagatacgtcacataagaaataaacagatgtaataagattaaccaactagatgaattacctttggttgttgaaagggagataaattataactgatggtgatgtaatgcattcggagaaattctgagagagacatggacaatggcactagaggtgtcccaacaaattatatttccacacattattattcgattagggttccaaattccaaccacttgttttttttatccatattgatttattcatataaaacatatcattatcgtattttatagcgataaaaacatgtggatacttttaaagaagataaaaagattaaaataaaacgttattcagtatatttcgtaattctttgtagtactagggacttacctggacgggatcaactcgtgatcaataagacaagtggcctaggctagtgatcgcattgcacatatcgtttgggtgctatgcttaaggttttcctttaaggaagagtatgtgtcattatttgtgacagaggagatttgcattcgcgcaatgctactgattttcaattttccactcttgtcacgagtactgttgagagttaaaaggttcattgtcaagaacataatcggcattttagtcttttggactcaacatttgcattaattgtattcaatatagatggaccatggaggcgtgaatattgttctaactgctaaggacatcatatctcgatatactagcttgaccaaatggttgagctctttacatactcttcctcaatcactcgtaaaattgaacaaaaaaatttcaaatcccccgtttcaaggaaattatttaatattctttcatccttatttcaaactcactatataaattaaaatattgcttatttataagctcattatacaaattccatatagattctcgtccctttgattaataaacgtcaactaattaacggtaataacttattatatagtaccttacaaatctctagattggtggtccaacggtatttggatcaacaccattgaaataatttagtttattgccgatttaaagtagattaattatcctaatgacaaatatgattttttttttcttctttttgtcatcacaaatatgaattggtatcctcattggcctgattaacatttctaattacggatcttacctcttcgtgccaaagaagacatttggaaatatatgacccccataaaccaaatatatgtttcttattaatgttgtggaatttgggacattttttaaaatggacaaaagaagacagaaacaattttcctacccaaaatggcgtccttaattttttcattaaattgtaaagcctgtttcaaaagaaaattgactttttgttgtgatagtataaaaaatgacatttgactttttaagtgacaccaagattctgacaataacgaattatatccatgctaattaattgatagcttaattaacaattgcgcaacataacgtgatcaaattaattaagctacatatcaggccttgatccgtggtccaaataatcatcctactaaagaaaaccagcttgttatagtaaaaagccgaattcgtgtaaaaatcggtttaaaatattcggtatagactctaatctcgatttactccggtttggttatcgtgtgtgtgatcgtaacttgccggtggatttgcgacggacacgtgggatgttgtaattgtctcacgtgactcatcgtaactacctttaaattcgctactgtgattttccagattcttatgtacatttgtgacttcttcggtctatttttgttatgtttccaaaaagacatgaatgaagaaacattattacagtttcttttcttcccttaagcctatttaaaattgatatttctaaattcgaactatttattcactagtcgaagccttttaacgcaaatctgagctcttaagtggcgcaaaaaccggtttaatatgtaaatagtaactcggtttagattaatttcgggttatttttgtgattagtgtagttaactaattaattcaggtgaataattatattagagagaaataaatttcaggacaaaaaggcaaagctttggtactgtctcttctcttctccgtcttcttcaccatttcgaaaaatctcaaaactttacagagagaaagagagatcctttacatatacttcactgtcttcttgaaaaccctaatcctccgatctgtttaacctccgatcaagagagatttcttcagcttgtgtgtatcagattcctttggattccccgattcttcgtcgtatcgaatcgggggatggcatttccgtgaaatcagtgatgaaattggaggtgagaagaagttatttctatctatgggcgtagtagctgaggtttggaggtcgagcgtgaggctattaacgaactcgcctcagcttaacggtggctctcacaagagtgcgttatggaagtggcgatttttctctgctcagcccaaaagaaccgtaatgtggacatgggtttgtggtttcatgcttttctctttaggagtcatctcacttttcactggtcacgttgtctcgcaccttgagtggtattctcagcaattaagcaaacggagcttactggtaccttttagcttacttagtgtttcgtttgttacttcttctgctcaattttgtaaccaagtagtgaaattggatgttattcttcaggatatgagccgtcgagaaccaattgatgtatggaagtcaaaatattcgaagtttttctatggatgcagtgagagaggaaggaacttccttcgtaagtcagatcttcttacatgtgttgttcttgcctcattgaataaggggttataagaaagtgaaagttttgtcctttttccaaattgatcttggatactagaaagaaaagtctgtggctttattgatctaacagcatatttgacttagcctcttttttagtttggttaataaaagcacattttgctttctggcaatataaattgggaatttgttgatgtacaagtgaattaggcttccaatatttcttgttcttttatcattgaaactttgttgtgtagatgaattttcctctcacatttgtttcaatcttgttttggggtatgcagctgctgtccaggagcagtcatctaatggatatttgcttattgcagctagtggaggccttaaccaacaaagaacaggagtaagtgaaattatgtgtcaagaataaacgtgttaggatattacaattatattgcttatttgcccaactaaaaaagattatgctgcttattgtccttagggagttaggacctgcattttgaaaataatgttctctttgtgtgcagataactgatgcagtggttgttgcacggattcttaatgctactttagttgtacccgagttggatcaccattcttactggaaagatgacaggtaactttagcaagttttggcaagtgaccatcttcagttgccgtatcaattacttactgaaatgtatcatctaaatctgtttgtaacgcaaaacatttactgaaaaggttactttgttcgctgtgcagtgacttcagtgacatttttgatgttaactggttcatatcttctctcgccaaagatgtgactatagtaaagagagttcccgacagagtcatgcgtgcgatggagaaacctccttataccacacgtgtgcctcgaaagtctactcttgagtattatcttgaccaagtattgccaattctcacgaggagacatgtaagactatgtcacctaagaatcaaattgttttagttactttatcaaatagaatcataggtattactattcatctttagttttatcatcttatagctaattcatgtttgttgaaatcttgcaggttttacaattgacaaagtttgactacagactagcaaatgatctagatgaagacatgcaaaagttgcgctgcagggtcaactatcatgctttaagattcacaaagcggatacaatcagttgggatgaaagtggtcaagaggatgagaaagatggccaaacgttttattgctgtccatttgaggtttattaagtttctttaacaacccatattagattgtgttccctgatttttgcttaatagtctcaatcatgttataagcatgacatcttcatctccatgttatttatgtaaccatacttttacgaactgcagatttgagcctgacatgctagccttttctggttgtgactttggtgggggtgaaaaagagagagctgagctagcagaaataagaaaacgatgggacacattgcctgtgagttcaatatgttcttttacataactttcttaattttccaagttctctgcgttattcctctacggctctacctatgcaataaactgaaacttgatatgtgtgtttgcgcttcttatattaagaaatatgtttatatatcttgttacattcttgataatatcataaaataagaccattacacccaaattttattttcttgtggagaagttgtttggagttacaaaatctcactagccaatcaccgcaggatctggaccctcttgaagaaagaaagcgtgggaaatgccctcttacacctcatgaagtgggcttaatgctgcgcgctcttggttttacaaacgacacatatatctatgtcgcatctggagaaatatatggtggtgaaaagacactgaaaccactgagagagctgtttccaaacttttacaccaaggaaatgcttgccaacgatgagctcaagcctctgcttccctattcttcacgccttgctgccattgactacattgttagtgacgaaagcgatgtgtttatcactaataataatggaaatatggccaagattcttgcaggccgaaggtaaggatattttccacttgtccccattaaagatttgctgttaaaaactgttttccagtacgaaacaacaggcgatagcatcttatcatctgttactttgaaataagtaggcgatatataaatatactgcccttgctttgccacatagaattaaatagatttggtagaggcttaccatagctacacggcgcattctaattcacgttcgtactggttgcatttgcatcaatatagacccacgtggaatttgttgttcatgtattgcttgaacggccatgctcgttaatatactaaacccatcagacacgagatcatgacagttctgagtatgaatttacaggaggtacatgggtcacaagaggaccatcaggccaaatgcaaagaagctcagtgcattgttcatggaccgggaaaagatggagtggcaaactttcgccaaaaaagtgaaatcttgtcaacgtggattcatgggtgatccagatgagttcaaaccaggacgcggtgaattccacgagtacccgcaatcttgcatttgtcagagacccttctcttacgacaaaacctcaacggatgatgaagaagaagacatgtcagaagagaaccacaacagcaccagccctggacatgtacatttgtcttcagcagacaatgagcgcgacgaagttttccctgactagcaaattggttctgaggtcgctggagattttactgtaaccaggtaaagtcaaattacaaacttttttttgtaggagaatagtataacatgcaagcataagaatgttcaggatataattagaaagtcttaatgttgtttcagctgttgtaaggagattgatcaatcacagtagatcgaggagaggaataggaggcttcccgcgtagctacttgttgcttcaagtgttcatagatacttctatcgaataggcatacataacccaagctctctctttgtttctttctgattttgaaacaccaccaaaactctctcttgtcttgtacttgtcttatattattacctcatatctagtttttggttttcttttgtattcccttagatttcctgaaatgtataatcaagttttcatctgattcctaacatccttttgtttgtatttcattttgaaaatcagaaaatatgtggtttcactcaaagtttaagtattctttttttgtccgattttaagattggcttatttgatgaaaattcagtagaattcaaaactcgatttgaaaaatattataaatatttaagttgtaaaaaatcagtgtttaaggcttaagactctctagtagtgcgagaagcttcacctgggatttaaccaaaacacactccagacttctaggcctaccaagcgtaatcaccaacacacgaagcgtctcacatttcaacacgtgtcagttttcacacgtggaatattttcattggtggtatctctgaatcttattccacgtcagtgtctcttctcaataattatataaatgcactcttgtctccatttgtttacttttctttcctcaagttttctccagaacctgacggaaaaaaacttgaatctgcaaatcgacttcccccggagaatgcgatcggagatcggaaactggtcgttatctccgcttcactctctcagattacatcttagttttatcaagtttctttgattcaaatttacctgctccaattgctttttctttctcttcatcggaaatttctacgaatgcttctgtttgttcgctttgaaagttgcttaatcataacattttcgtcttcgattctatatgcgttagtaattatactctgtctaagctttcctagaggtgataaatcggtggatcgtagcggcagtgatcgatttgaagtttgaaatctaatcgcatgtaactttgttggatttattctgtttctagggcttttgattctaatgtggttgcttctatataactgcagaggaattgctgctctctactcgcggtgtttagtttacgattggaatatggggaagatatttagctggttagtggtgttattgtcattgatctcattagtccctgttccatcggaatcggctgttttgagtgtagatctaggttcagaatgggttaaagttgccgtagttaatctgaaacgaggacagagtccaatctctgtagccattaatgagatgtccaagaggaaatccccagctttagtagcatttcaatctggagaccggttactaggcgaggaggctgcgggaataacggctcgttatccgaataaagtttattcacaactgagggatatggtgggaaaacctttcaaacatgttaaggatttcattgattctgtctacttgccttttgatattgtagaagattctagaggtgcagttggtattaagatcgatgacggttcgactgtttactcagtggaggagttgttagctatgatcttgggttatgcctcaaatctagctgagttccatgctaaaatcccagtgaaggatatggttgtttcagttccaccttactttggacaggctgagagacggggtttgatccaggcttctcagttggctggggttaatgtcctctccctggttaatgagcattccggtgctgctttgcaatatgggattgataaggattttgctaatgggtcgagacatgtcatattttatgacatgggttcaagtagtacttacgcagcccttgtctattactcagcttacagtgagaaggaatatggcaagactgtttctgtcaaccaatttcaggttaataatgctcttctattatatgactcggatttttttgagatatattgtattttgtggtttcttcattttttccttcttggaacatgtgtgacacaagctcagcgtactaatttgtattcgtttggtctgctttcagttggaatagattttcaatatgggtcatgatatatttatgttaatgtaggtcaaggatgttagatgggacttgggacttggaggacagagtatggagatgcgcttggtagagcactttgcagatgagtttaataaacagctcggtaatggagttgatgtgaggaagttccccaaagcaatggctaaattgaaaaaacaagtcaagcgtacaaaggaaattttgagtgcaaacactgcggctccaatatctgtggaatctcttcatgatgatcgtgacttcaggtataactacaatatttgggtttctctatttccccagcacatcgaaaattggctgcaaaagtgttataatgatgtctcatgctctaaattgcatcatgattggtctaatttttgtgatgtgcgtgatattctaacctacttatcttttttcaggagcacaattacccgtgagaagtttgaggaactgtgtaaagatctgtgggagagatctcttacacctttaaaagatgtgctcaagcattcaggtttgaagattgatgatatatctgcagtggaactaataggaggagctactagagttcccaaactacaggtaggttttcatgctctcaaagccaatcaatttggcattctcatccaaaactgggggactttcactttttttttcttttcaaatgaagctaagatataatttttgttttaattacagagcacaatccaggaatttattgggaaacaacagttagacaaacatctagacgctgatgaggctattgtcctcggctcagcactacatgctgctaacttgagcgatggaattaaattgaaacgtaggctaggtatagttgatggttccccctatggttttctggttgagttggaaggccctaatgttaagaaagatgagagcacaaagcagcaactcgtaccacggatgaaaaagctacccagcaaggtaccgcattacattcaaaatctgtttaagcttagaaacatttctgtcttgtaataattctgtgtacctgattctcttacagatgttcagatcctttgtccttgacaaagattttgacgtgtcacttgcttatgagtctgagggtattctaccaccaggaaccacctcccctgtgtttgcacagtattctgtctctggtttggcggatgcatctgagaagtaagagcttaaagtttgttctctgaatgttctgtttatctttctgtttggagagatatatgttttcttaatatggaaaatcttcgaataagttgataaatgtaagttcattgatatggacagatattcttctcggaatctatcagcacctatcaaggcaaatctgcatttctctctaagtagaagtgggattctcagtctagatcgaggagatgctgtaattgaaatcacagaatgggtagacgttcctaagaagaacgtgactattgatagtaacacaactacatcaacaggcaatgccactgacgagaattcacaagaaaataaagaagacctgcaaaccgatgctgaaaacagcactgcttcaaatacaacagcagaagagccagctgttgcttctctgggcacagaaaaaaagctgaagaagcggacattcagaatacctctgaaggtggtatcctgaatttattgtttccaagattttcttgattcatttcattaccaccaaccaattctgtgtgaatatataacttgtaggtagttgagaaaactgttggacctggagcaccattttcgaaagagtctcttgctgaagctaagataaaattagaagccttggacaagaaagatagggaaagaagaagaacggctgagttaaaaaacaaccttgaatcttatatatatgctaccaaagagaaggtgtgtgcttatatatagatcactatctctgctgcttcatggattttttgttgctatagtcttcgtttcccctgtagctattttttgtctttggttggcattcctctcaaaattcttaagtgttggttttattttgttcatggtgcagctggaaacacccgagtttgaaaagatatccacccaagaagagcgcaaggcgtttgttgaaaagcttgatgaggcatgaataaattttcttttgaactatataatattatttgattccaatgatgagtgtaatcgtttgacactgaggacggtcttgtgtgtttcaggtgcaagattggctttacatggatggagaagatgctaatgccacagagtttgagaagcggcttgactcacttaaagccatcggcagtcccatatctttccggtttgttcccagctcgttttgattgaaccggagcttcctgagtatttcttacgaaccatttgtttatacatctgtacagatcagaggagcttacagcacgaccagtagcaattgaatatgctaggaaatacctaactgaactcaaagaggtactcagacattacatgattttgcagttttctcatgatcagaaaaaaaaaaaaagacaaactgctgagtttcaaccacatttgcagatcataaaagaatgggagacgaacaaaacttggcttccaaaagaaaaaatcgacgaggtttgttttactcatctaataagtgaaaatacacaagctctttttaaaacttctggcgagcacatgctaaactgcgttttccgattcaggtctcaaaggaagcagagaaagtaaaaagctggttagataagaatgtggctgagcaagaaaagtgagttttgattcactttctttaaattacagtctaaacatatatagagagactaaatatcaaacttgtcacaggacttctctgtggagcaaaccggtgttcacgtccactgaagtgtacgctaaagtatttactctacaagacaaggtaagaaaagagaatggctacataaaaaaaagtcagtaagttgcaccgaaaaggttttgacatttgggtttaaattgaattataggtcacaaaggtgaataagatcccaaagccaaagccaaagatagagaaagtaaccaagacggagaacacaacaaaggaggaggaacaatcaaaatcctctgatgaagctgccaaagaagaagaaagtcacgacgagctttgattaaggatatataataaatagagttttcgttaatttttgtgtttttaagagggaaaataggattaaaagtaggcagctgagatgagcaaaaggattttattcctttctcctcaacttcttcacatcaccattagaaacggaatattctgtgtttttgtttttcattatatcaagttttggtctctctatttctataactgaatcttcaatatatttagtagaagtttataaccaacatcagtttctttatgttaagacacttgatagattgcttcactaaacttcacctttactaataactagtgtgcatactgaatgatgatgtatgctgcaccaacaaacagaaaatggtataagttacattctatagccataaatcctagacgactgactacaaagtgttttcggcgaatgtaacgcaacgtgatagccttgacgtaactagatagctcgtgagattatgtcacttataatgtcaaaaccttattatagccttgagacactagagacgaaggtgcttctttggacggtgcatttaatgtcgagtctgtcccatatggacaatctactgactataagaacggtttttgagttgattagaaatcttggtgtgtgctaaaagagtgttgatccatcggaattgttcagttagacgagccaacagtgcagcctctataacctttttgcatgttaaagctatgtgccctgtcacatactgattgtctagaaatctaagtacttcgttagactttttggtgtatccgtttcgacagatgtgttgcggtctggttggtgactgaaaattaaaaactcattgatatatagatttataaagcgttatgaattatttctaatgaataagacaatctataaagacgcagcaacctatgtattaatgcaaacaccattgtagtatttatattattatggagacagaacaaaaaaaattgttgagggaagatgttaatactaataatagaaaataaatgaagcgtcggtgtgaagttgatgattaaaaacgcgtaagagagggatagaagaagaaagaaaagacacgaaccataataaacacattgaaatcaggtggagtatgtcgttgaagctgtgctaacacttgacacaacagctcacgtacacacccaattcaatccaaacaaataaaatacaattccgaaaacataagttttatttgtatatatcgtaagaaccaatattaaactgaaacataacttttcttgtaaatcattcaagttcaaaatatatcttacttaaaataagcagatatatatgttaaacttatgaaccaaacatatactgcctataaaaatttaaacaacccatcctattattgtgaattctatgaagtaaattcggattaaaacatcccatcgcaataaaccaaaaatgtaaacacaaaaagaaaagcatctctagtatatttagagacccacgtacagtacttgatctactggagcattcatcgtatgttataggtgactgctaaactaaagagaagaattatttttcttctagtcccaccacatattggatcaaagaagtagaaagttttctcctacatattatagtagaatgaaaaattactctgaattcttctcttctattcttataccagtcacacccatagattttatggtaaacgagatcactcctatatcagctcctagtaaataacaaagaagttttcagtactgaattatatcaatctttatcgtgaatgtttccgtacgtatggtatttgtccttttttcaaaataagaattatgagcttgttgattgattattcaaggatgaacttatgaaatatccttttgccagagcttggttaatcccaaaacatttcgtattgtagttctaaaaaggtaaaagaggaatgaaaattataattgggtagtaaagtttggtgggacttgcaagtttcattcaataaggtttcgtttattatgaatgcaccgccatattgtgaaagtgaaaatgacgttgcaccaaactaaacaattaattccccctcatgcaagatattgatcctcttcaagtttttcttctttggtacggtgaccttcctcaatgacaatgagtcaataacaaaaagaaaaactttgcgtttcatttactaatttattttccaattttagtttaatagatatatcatgccaaaacgttgggaatgtatatttttcatacgtgcgtaatttttattcttccggttaagtattcccaaactttaacaacaaattccgttttcatgttttacacaaaactattgtaaagttgattaaccacattagctatatgactaaattattatttttggttcagttgactaagaaaatagaaactgtctaacctatgatgggaccagacaacagtatctcatagcattattgaagtttggttagttttcattaaatgaaaagaatatatatgcaggttatcttctagtcccaaagtgacaatgacttgtcttgtttggaattggactgattaaagataaatacaaaaatatttactatatgaggatacataatgtgtaagtttataacaactgccaatataactatcaaaatatcatacaaaagcatgatcgcaaattaaaaatggtacgtaacatgtaagaaaacgaattagccaccagttgatagtagtctcatttgacatctattgttctattagaagttaaaaaaaaaaaaaaaaaactatatgaaaggtaaaccattcccaatataacgtaataaacataaccatcgagtatcaaccaaaatcatgaccacaatatgtcaagatgaaagtctattagttatttgtatgttagcttaagtgaaaaaagtggatgtgggtgagtgagcggttacaatcgatgatgaatgagtaaccgtacgaattgatattgtcaactatcaaacgttaaattttcaactcaataattaatcaacatttgatattcgtgaagtaacttttcacaaaaagtactctttgataagatgatttatgtccataaaactaattgcttcaactacattattgtcaatatttgatatcaatcaattctctatgcttccatgtgcaagtcttatcgatgtgattgaaatttaacttatggtgtaatctttttgtaacaatcgtttctatttcatattttaaatgtgaaatttatcaaataggaatcatactagaaggtctcatatatattgaaccgaataaataatatttaatcatttttatgatatatatcaatcgcttaaatccgcaactaacaactttatttacaggtagatgtctatcatttacacaaatttttgtcttgtttgcggttcgatctcctgcctagcaaggattccgatgagataagaaggcaatctttatcgcataacgtttatggtaatttaatatgtcatcacaacattatctacgatctgaaatcgacatagtatctctgaacctctgtaaataccacgtattaatttttttttaatattaaccttcgtagaaatcacgttgatcgtttatataaaaatataaatgaacaaaaatttcttgacaaagatataattttaataaaatgtttgtacatatatataagtctgtataggaaacaacatatgaagacatgaagataataatgtagaggtagttataattttttgtgtcttaagtcttcaccaactcatggtgaaaggttcacaatataagttgatcgatcggagttcgagttattctactaaatatggcttcaataaaaatttggttactctaaatagtttcaatgggaaaaatatgtaacaataattttcacaaacctcaagattgattttctaattattaaaataaagtacaccatcaaaaacaaaacagggacaagatccacgtcttgcaataaaacgtgccttgtcaaagatgttctctttgactctttagtgtagccatctctttctctatatataaaaatcaaccatggtgtgtgtcagtgtgtgcacatatttttataagatatcttcacatacacaaaaacatttattgtacagtgcacaagtgatcgaatatttgattctttttcataatcagagatctgatctaaatggagtatgaccgtacgttgaacttgattccatacggactacaaggagtaagagaggaggaagaaatcgaagaagacgatgaagagagcatgacgttgtcgtcagtaccagaaaacgaaacgtcggagtgttcttcgcctccggcgacgtatcctccaatccctcctcggcctaaaacaccgagagagccgatggagtttctatgcagatcatggagtctttctacttctgagatctctttagctttatcatctcagaaatctgataaacaactcaacaaaaaccctaatatttctcagttggccgatgtcacttctctggctccggtagcaccaccaccgccgctacaagtaagccgtctcttgctttcatcttctctttattgtatattaagttcgtatggttgatatgatcgtacgttaccatcaaataaaggaaattaattttgatagtactattagaaactcactaaagatcttggatgcatgcaaatgaagtcttttttttttttgggatcaaaatattatacacttgtaattgattttaatagttgaattttcacgtttataaatttgcatacaataagttgtcgttttcagtagttgccacaaagatacaataagtgaaacagttagacgttattttccaataatgttgtaaatacttttttttttttagtgtaaagtaattttcattatattctcatgtgtaacgaaattattactttatgctaacaatttgttaggtgttttaagtttatgggccaagaatatatttatagaaccaaaataataatattaagacccaatctgtaaaaagcccaaaatgtttaaattgtttctttcttcaacagacgggaaagctagcgagtgcggttcacgcgcggagaacgggaacgatcggaaaatggttccaccaccgagaattcgtcggcgggaaggtctccgccgtaaagaagagagatagagttcgcgtggagaaagctcatctgcattccgccgtgtccattgcgtctctggcgacggcaatcgccgcagtgaccgcttcaggcaatcaagacggcttcgctggatcaaagatgagctcagcccttgcctcggcgtcggagttgttagcttctcactgcctcgaattggcggagcttgccggcgccgatcacgatcgcgtcgtctctgctgtccgatcagctgttgatgttcgtggacctggcgatttgttgactctaactgctgcagctgcaacaggtacattgattgtttgacttcaattctcaatccttgattgtttcgctctattgaatttgactagtccattgtagttttgagttgatcattcgattatgattctcggtttttcgataatgtagcattgagaggagaagcagctttgagggtaagactaccaaaggaagctaagaacagtgcagctataagcccctgtgagagagttttaccagagactcatagttgctcttctgagctcgatcgcactagcacgaccgatgaactcatatctgcaaaaggagttgaagaatcaactggagagctaatgcagtgcacacgaaacggtaatgtttcagtaagagcttctttactaattgttgtgaatgatgatgatattataattcaagaatcaattggaaacaaaaaaatttcacttaccacgagattgatgaattgactcatggactttccaggtgttctgcggtggaagcatgtaaaagtgtacatcaacaaaaaatctcaggttaaacatcgaatactcattgaagctaacaaagttatatgctggttgaattctagagttgaattttgctcggtttctcttttgcaggtcatagtagaaatcaaaagcaaacacgttgtaggagcattctccatgaaaagcaaaggttagtgagctactcttctttctttcaatgtctatggtgttcatttgtataagcagagtgatcttgggactttgtccaatgctttacaataatccagtggttgaatcactacaggcattgtaaatgatgtatgcgagacagtctcaggcctgcaaaatggaaaagacacggaaaacacagaagaagagctctatttcggaatcggtacagggaaaggtctgacaaagttcaagtgcaagagcaaggctgataagcagacatgggtggatagcatccggaatcttctccatcgagtaactgctgttgaggtcgacacttctcttgaaactataaacattaacgatagcacataaatcatgatgtcttgtgttaacggtgttagtgttggttattttcattacaagccaatgatatgtattgtttcaagaacatatacatatctgcaagtaggtgtagtgtttttcatcttcgtcacttgtttttatttcagtcaaattgtaaacattgttttgtggaaataatgaagaagattataataaggcttgatgaatctcaccggagaaatgtccatgtgtttctccatggcttcttccccgatgacaatcacggtgagtttctctgtcacttctgcatacttgattttcttctgtctttctaatcagttgtctatagtctccagtaaagactcgaaaaaacccagaatcatgcgtttataagataaaaataaacaatagtcagtaaatgatgacttaaacataagaatctttcagagaaaaacggataaaaaagtactagtatcacaattgctttaacttcgttcagaaacagtaaagagaaacgactagtttggttgttacctctttgatttcttgttagtatcaaccttcgaggtccgggttttcttgttagtatcaaccttagacgtcgaggcttcttcgattcttctctgtgttttctttggccgagtatcttcaatgtctttaagcttgtagtaatgaggagctatttcaattagccactcaggcttcatttcagttgtatgcctcatatattccttggtagtaagtactagttcatgatacaccaaccacttactaggtgacgccccaaataagcctgagttagggtgtacataaactgtctgaggttctttgactcttctgtacgatccattcttttgtaactttgcagaatgcgggaagaatccggccaagattgctttctttattgcgtctaaatcattcgggttggaagtaagttctactccaatcttgtttaaaagtccaagtagctggtcacgtatatctcttgcccttttcatactcttgctctgaatgaacttctcgcagcaccattgagttgagtagttttcttccttccaggaattgtaaacccttaacaatgcaatgtgatcgccgacgttctctgtatcttcatagaaatccatccgagccttgtcggcgaaaacttgctggttctttggtcgatagaagaccgagttccctacagacaacatggcagctatcgtgattatctctttcgagcacttatacttttccgaaccaacaatcatctttgacagcattggatcaactggaaactccaccattctttctcctaccttagtaatctcaccaatttcatccaaagcacccagcgcatagagcaactctagagccttcaaaagagcgttttcaggtggaggatccatgaaatcaaaattgaacacatcttgaatcccaagactcttcaaagtaagcacaacacttgcaaggttagccctttggatttccggtattgtagtgggctctaaatccttgatattgtacaaccggaaacatttcccaggacctgttcttccagaccgaccagctcgttgcgctgcggaagccttggaaataggagttacaaggagtgactccattcccgttctcgggttgtatgagttgatcttgcaatatcctggatcaatgacgtatttaaccccatcaatggttaacgatgtttctgcaatattcgttgccaagacaactttccgtgtccctttaggggccggttcaaacacttttgcctgtagtggagttgggagatttgagtagataggacagataatgatctcagatccctttgtacccaaatccatcatccttcgcttcaaattcgtttctactgtttcgatctcttcttgaccagtgaggaaaactaaaatgtctcctatcgcctcagtctgatgtatctgaaccacagtgcgtatcactgtctccaagtagtcaggttcaggacattttctgaagagcttttcaactggatatcttcttcctggaatcaggtaaatccgagccgaatcaaagtattcggagaactttttagcttcaagcgttgcactggagattattaacctcagatcaggcctaaccttggctacatccttcactaacgcaaacaaaatatcagtggacagtgttctttcgtgcgcctcatcaataatgatgacactatagctatcgagtttcggttctatgagtagctctcgtagcagcatcccatcagtcatgtacttgataactgttttctctgaagtacagtcttcaaatctaatggaatatccaacctcatgtccaagtttaacaccaacctcttgagccactcgggaagcaacgctcattgcagcaactctccgaggctgagtacaaccgatctttccacgctttgtgtaaccggcttcttgaagatactgcggtatctgcgtagttttacccgatcctgtctctccaacaatgacaagaacctgattctcttcaataagtttcagcagttcctccctgtacccatgaatcggaagaaactccctcccctcccgagccttctctgcagcagtcttcgaataacaacctcgatgtttcccagtttccgcctcgctagactcctcaacaaagcctgtcaaatcatcaaacacaaactcatacccatcaacaacttgcttcttatcctttgcaccaaacctcactctcgctttctgagcctgatgatcctcccaagcttcttgctccgtaacaactctcccgctccttcttcgctcacaatacctctccttggcaacatcaaacctcttcttctgatcaatacacccttcttgatcataagcatctggaaacctatacccttcaacatcatcatcatcctctgttttcttcaccaactcatacaatgctctcttatatctaaactcaattacttctctcatcccttaactcctccaccttcttattctctcgatccgtcaaatactttcgtcttgaaacttcccttaacctcaaaatctcatcgctactcaaaaccttctcccaagaactcaacttcgttttattctcgtcttcttcttcttcttcttcttctacagatattcttcttctctttgtagaaattttctttggtatattgaattttatagaaacaggaagacgacatgttgttttctcaacagataaaaactgaattgtcgaattcatctcttccgggaaaccaaggatcttcttctccggaacattagtctccattcttcgatttacaccagaatagattccacggggctgagatttttgtttgtcgagagacgaaccctaattctcagagttagctctgaaatctaatttttgtttcgatttgttttaccaaaagaaacaaatcgtatatatatatatatagaattctcgtgcgggccagagtttcctatttggtttgggaatttccttatttttaatgaaataggtcaactaaacgtgataagcaagaataaatttaaataatatataggtgtaaattgtatactagaccacatcatcaatttgcaaactttattgcttttaaaacatgaaaattaaaattttgatgaaatctacatagttatgtttttatgattttgtccaattaatatcagagatatttgtaagattctcatgacatgtaattttaccatgtttcatcttactttgaacgccttcattgatatgatatgataagataatatatcttcacattaatttttgtagttaattacttcaaaagttttagttacttgtttaaaaaataaagttataagattttgttagagataaaatcataaaatatacttagtctagcatatgatagatttattgacaaagaaaccaagaatacaatttgaagtgagtaaagagagtaacctcaagaggatttcgtaatatattggcccaacaccaagctccgtgactggccctatgaacaaacacaaagagaattacggactcatcaccaccgtaacctcccatcgtaatctcaatcaatgtgtgtgcttattaatgctaatccactcaatttttaacactaaatgtatgcagtttagtccacatactggagatatcataacgttacacgtctatctgtgttggacaaaaccaacatatgtactctcttttcttgctagctgacaagtctttcaaacaagctagtgttcactcaaacaatttcaaggaaaaaggcagaaaaaaggaaaaagagacgtgaacttaatctcctctctcgtctgtggtccaaatacgttttgaggttatccgtaaaataacgtacacatgccttatgaataataaaaacaaaattttgctttaggccatcctgttatataaatttcggatctctacacttttaataatatatatttttttaaaatgtgaatctaaactgaaccaaaacaaaacaacaagaactatacgctaaggcatcgaagggtcacaaaaattgttaaaagcttgaggataatgacatgtcatagtgttgagataatgagatgacatgtcatagtattcacctcatgttgtcgttcaaggatatctttatcacctcatccatcaaaaacaaagatagcaccatatagtttttctccatgaaacttaattaatcttagctactatgatagatttattgacaaaaagaaaccaaggatacaaataacattcctttacaaggagatttctatctctcttaccctggattgcttcgcatgtaaagcttattcaaactcaaatcaaataacataaaggaaattacttaatagaatcataatatcatatcaatcaccttccaaacaaatcatctaattattcccaattagtttgttatctagatcggaatgtatgaaggataagttgaagtttatcgttgaagaaaagaaaccgcacggaggagatacgcgaataaggtagttgggacagagaagaaagcagaatggtcactatcctccaagacatacagctgagaaggtggccaattctccaccaaaaggtcttgacgcacagaatcaaatagattatccttagcagtcttgatgtaaactcgaggaactttctcggcctcgggatttggaggtagcttatcaagatcttgaaaggccctcataggagcaggacgcaacagcttagatgacaaagttacgtcctacaatataaccaattttatttatatactcaattcaccacatattaacaaaaacaataataataatactatagtgttgaaatataatttatgtatactagtaattaagagattaacctcaagagggctttggctatagtaataatggcgtataaactccggtttcatgaggactccggtgggtggtttatcggtaccttcaccatatgtgtactcccatatatcttcttctcccacatgtatctatcaaatactcacaagagttaaatagctagcgagtggttctatatatcttctatacattacaaaaaaaaacgaagaagaagagaggtgagttagtaaaagagtcacactcacgtttgaaagatgcggagaagggatggatccgggttgaaccatggaagccgcgaggtaaatggccatggagattttgtcagtgaacttgcaaagagcttcggtgacacttcctccaccgatgctatgtccaacgagtatgactttgtggtgaggagggagatcggacaagagagagaagagaggacggttatattggtcggagtcgaagacgatgttagagtctatgaggctgatgccagcgccggtgagatctacggaggttgatttgaacccggcggcgtcgagaagagtggtgagtttataccaacaccaagctccgtgactggctccatgaacaaacacaaagtgaattacgggctcagcaccaccttctcctcccattgcatgaatcttgatcaatgcttttacactatctcaccttttaacacgttatgcagttttggtccacagtttggagataacaacgtaacgtacgatcctttttttcctttttcaaaagggtctaatgtttgtatttaattttgctaccagctcaattttccattttttcattttaaatttgtaaaaaagatattgtaaagcacacaaaaagaaaattagatgttaaggtaaaaagaaatatttaaatttcagataattaagattccaagtatctgagcaaaactggaatcttaattatctgagtattattttcttgaaatgcctaatatattctaaagctattaactatgggatccctaataattattttggtacttattaacttatatgaagattctaattggagaacttgcttgctattaaaatatgtgatttatacatagatatatttaacggagattattgaaatatatttttatcatatgaagtttaatgtggttattatgtggttaactattctactagattaatatgataaattttacgagtatgacacataatcgaatgacttgtaattagtgtcatgtcttctttagttctctaaatttaaatttaaattgggccataagcagaggcccattaaatttaggtaaggttttaggctcagtaagcaataaattgggccgtaaagcaaaggcccattataagtagtgaggaaccagaaacagaaaaaaaaagagactcacctgacgaatctcaccggagagtctagatctcttctcttccacaacgaagtttggttcatcaccggcgaatcctttctccgacgtcataatgccggtaaattcctcacgcaatgtgtaattctagatctcagagatctaatttcctttctttctctttttctcctattcgtttccgcttgtttgctattgcgtcgctccacatttttgttgctgattcataattctcttgtctcgtcctgcggatttgcagtttaagacggtgatagaagtggagcctccgagtctgttacggtacttgatcggatcggcggtgatgatgatcggtgttgtattaccggttggttacatgatgtttcgcaacaaacgcgtccccttctcatcttcgtactctaaacagacgtaggtgtgctttttctttcactcttctgtgtttctttcatctgatctgctgaaacaactcatagctctaggtatcttcacgtttgttgtagtcatagttaaaatcacaattagaatcagttgttgattgctttacatgaacgtataagaatgatctaaattgagtagtattgcgacttgttttggtgtgtaggagatcagtaaccatcattttagtttgccctgaaattaaaaacctaagcttggtgtgtaggatatcaaataaccatgggttttaagcttgaagtctactaaaagttttgaataagttagggaagtgaattagcattgttctctaatccttactatttgtgaacgttgaagagatgtaaaatgatatgtatgtttccagtgaaagaagactgaaagctttgtttgtaaatgttagtcctgtcaatgctttgtagagactgaatgctttagtgtactttgtgtgtttggatcgagttcaggtggggaatccatggttgatagatgatcaaaaattatagttgctcctcttcgttaaagcttgtttaggctaaaaattggaaggtgatccttttgtgctagtcaagtaaccatggagtttatcatcttctcactgattggtactaataatctgtacttatatctacttttcaggaacaaagttttgatatagggggccagaggctgtggttgatttcaacactaaattgagaaggatgatgacatattgatgatttggacgactgtaaaattatgggggaattcttgtttttacatggcttgtaagagatctttcgatatcaaattcataaaccataaaatgtgagttatttttctcttatcttcttatttaggttaattcaaaggtcttttatgtacacaacctcttctctttggtggaaagatatcattcgatggccagagttttcattatctacagatctgtataatactgagctttgctctttcatcttcttcttgcttttctttggtaattgaaatgctaatgacgtgtttatattaggattgaattcaaagtttcaagacactaaaaaatagtagatatgggattcaataggtaggattagggcaattacaaaatctgtttataagtagcctcgactctcaagtagagacatgcataaataattttaataactgattgaagatttggtcagatctaacaaaagaaaaacaacagtgtggtatatgttgttagtgcataacgccatgtactcattcctctttccatcttcccaatgcttgtccaacgcggactctgtctccttgtttgacacagaatctgtaatctgaagaactgcttgaaccctcgggtgtgtttgcggttggtgcttgaaaaatgagcactacggttgatcccatgttgaatacagctacctgcatcgacccatacatgtgaccatttaccaatcatacgaacaaaagaactttgttacatttcttaaactggaatttttattctctcttttgaacctactcttacctctttccccttctcgagccttaagccaagaccttctggatcatacacccgctcctctggtggctctgtaggaaatagcttcttctttggcttgtttgttcttagctcaggttcaatgaaaagctataaaagcaatttttagcaagttccttaatgtctgaggcttatgagtttcgattttcattacacctacctcaatggatccaatgttggtcgcgcctacagcagcaagtgccataaaaccttctttccatatcccttctagcacaacctgttgtattaacagctgatgatcaatgtttggagacaataaaatgccagacatatttggttggtacacctacaaggaatcacaaaaattaccctttcattctcgacatagagattccttatcgttcttgtagcacgctcgttcacaggaaacaaccggcctgaaattcgttttgtagagatactaaaggtccaatcacacatatgttccaaaaattgttgcaaaagcccaactacagaggctgctatatattaaatgagaggattgagaataaccaaacctgcaaagtgtcgacgaacagttgcattccagtcagccggagagtgtattcgatgataatcccctggttttaggtatattacacaataatagagccccttcattggactgcaacaaaaactcgatgaaataagttgctgttattttaacacttaagttgcattgtagatgttttattgacctggctgagacgttctcccgtaattttggagatgccaaagagactctcaaccaagatttgtcgctcttatctccaacagcttcttccttagactcattcttaccttcaggttccatgggaagcagagagttatttcctagaagagctggtaccgagtaagaatgtcctttaacttgctcgatcatccctctattcccttttaactccccaaaccttagaacggtgccatccacaggactaacctgatatcttcgaaatcttagagagcaaaactaataaaaaaagtctgcataaaagaaagttacaacattattgttaccagttaccagacaacaaggatcagggtcgataggcctgcaaccttctttcaagctacgaacaaagaaatcctgcaatgaagtatattcttcaagaggcagagctgcttcttcaagatctgaaaacacagaaagatcagtcagggaatcactttattacttttttctctagagtcaaatcaacagcagacatatacaagaagaaagtgatcatacttgaatggaaagctcgagcccaggctttataagcatatggacgcatccacaccggaatttcctgagaggaataagacctaacaattgaaaatcatgttcaacagttaccacaaatgcttcaacaagaagaactcaccagactcataaaggagccccaagctcttgagattgatcgcagaggcagaactccaaggaacgaggcctagacaaccacaatcccacaaatgaacacattgagatttaagaactaatggccactgaagttgaagagaacaagagcaaaaagagttatactttgatatctgggtggaactcaagttcgattcccttctcccgtttctcttcgatctgtgtatcagccagtagaaaacgatgctaagaagaagtaccaaactctatgtaaagaaccttgccattgtggagttactacttactacattaccttcttgtcttcatagaggcggcgagcatgaagagctccaagcataaggatagtagccattgttgctccgggcacaagaaaagcattgcctacattgagtgaaacaatgattcaagctcaaaaccatagaatcgatctaattgcaatctgattggaacttcacaaagtgtttcctacagaacaaaatgctcaaaacttaaacttagaatcttttcaactgtaatctaactatgtaaaggagcttttcgaagcatatatatatatgaattacctttggaatctccggttccacctcctccggctccggctccggctccgctgctgccgccgagaggcgaagcacgagcaccggaataattcgaacggatattgttgaggaaagagctgaaggttcgacgttgactatgctgaaagcggcggagatatgaatagcgagccaaaaaatagacattttgaggaaaacgaggtttcatggcgtttttccggtggcagtgacaccgcttttgctctggggttttagggttgtttgttgactgtttgagtaaactaacaatttttcaacgacaggttaaacgacagcgtttactcctcttgacttgttgactacgttctttctgcgctgacattttatcccaattgggcctttttagctcttttatagcccaccatccttttttttggacagcagcccaccagacatttttttttgtcgaacccgaaacagagtagtttgccgtcgatgatcatcaacagtggagtgtaagcagagaaattacgccatagatcggagcgattttggagcatcgccgaagctaaagaggaattggaggtttctgtagatcggaaaacacttgttgttctctctctcgattcatcccaaagcaagattcttggatctgcctcttaagatcgatcggtgcttttgtatcctcaggtatgtgttgatacttgatcgtatctatctacagagattaatcgtatcgtagtctgatttggtagatttggaattgggaatcgagaagtttaaaaatggaggaggatagagagaatgcaaagagagtagtgtttgtaactgtaggaacaacgagtttcgatgctcttgtgaaagcagtggttagtcaaaatgttaaagacgaactgcagaagagaggatttactcatcttcttattcaaatgggtcgaggaatctttttcccaactaaggttcttcttaatcatcttctccactcacacttctttacttgattgagatttgattatgaaaattggtgtacacacacaagagatgttgttctactcttctcttggtgtacacacacaagagatgcttctcatttgtgttttttttttttccattactgatctcagtgtgatggagcggatggatcattagttgtggattacttcacattttcctcaagtatcgctgattatattcgatctgcatctcttgttattagtcacgctggttagttattgcaatagttgagcacttttacatttaatagaatcaaaaccagagacacattttcgaaatgctaggatataatgttgttgactctcactgatgtaggatctggaagtatatttgagacactgaaactagggaaaccattgattgtggtagtgaacgaagatctgatggacaatcatcaatgtgaattagctgaagcacttgaagagaggaagcacttgtactacactcgtcctcactcccttcatcaaaccttgacgaaaatggagttggggtctctggttcagtatactccaggtgatggaactcctgttgctcgcattatcgacaggttccttggattccctgatgattaaacacaacacatacatgaaaacaagtgtttagtttccaaatacaacataatatgcagtaactggtgcttttgccagtagacattgtgtcaaagatatccatcataatagcaaagcttttttctaacgtttgacagaggataatcaattttgctcagtctgtatcatttcaaacataataccaaagaatatttaataatcagatcatcttaattttattaacaaccaagtgtaaacacttagatatttgcagaaaataactactaataatctcttagaactggacatttatgttttgtatttaagttagaaataaatgctattttttattgttactgggatttggattgcaaaggggcctcgatatattccaaaaccagactgagatcaacaaaaaagcaaagcaaatataaaatttaggttcaaagcataattgtatagtctccaaaatttgcaaaaacaagtcatcctgagagagataaaagtgcaacaacatggaacctagaagatgataacagtaataataaaagcaaaaggcaatcaacggtaacgacgaaggctgagagagttgtttttcttccatgtagccctgcgagatggacggttcttgtggttgttgtgaccctttccgcggagacctctgttcttctttccctctgaggtaagtcctctgagctcacggtgcttgtgaactgggttgcagatccagttgattctcgggtcattacgcacagcattgtgtgctgggtcaaccaagatgatctcgtagtacttgtaggtcgaatcctattaaagaaaaatggacaagttaaaatatctaaccagaataatcacctaaacgaaagagtactgaaagaaggtagtaaatgtacctcattgagccagtaagagttgacaactctgagaccacccaatttcctgccagcacgctcctcagcaacagaacgcttgctacgctggaacttgagttgtgtcactccctggtttgttggcttaccatacacaatacccttaggcactggcctcttgcgtccaccacgtctcacacgtacacggtacacaacaaagccctgacatacatcaacatctcaactagatttgtaacagaatttgagactagattaaaaatgattcaatcatcaaacaacgcttccatatttctccactaacacagcaaaaacatcaaaatcaaacaacttaatctagatcatacacatatatcacagcaatatcaacaaaaacctcactatctacaacactccaagatctcattttcaccaataacaatcaacgtctacaaaactcattatacagctgaacagcagtgatcaccaatatgaaacaaaatcagctaaaactcaaatttagggtttaaagagtcacctgcttggccttgtaacccaaacgacgagccttatcaggacgagtaggcctgacgagacgaacaatcgaaggttgctgtctgtactcccagcacctaaccctctggaggaatctcatcacatcggactgtttcttcctccatagctcagatacatacttgtacgcacctatatcaatcaaatcattaagctaagtagtttgcaataacagatacgtaacagaaacatcatttgaacaaacaatggagaagctgaatcgatctaagaaacgagaggatttgatctagaagaagggatggagaagaaggatttacccattttcgaagattcgcagagccgcacaacactggcgcagtgaagggtttgttcctgatttaaagtggaagattagggttttatctccaatggacctttatattatacgaaattgggctacttgaattaataaataaaggcccataaaagacttccactattgggctttgaaattcggattaaggccctttaatttctttttcagacgaacagacacacacacaaaacaaaacttgtattgagtacaaaaaaatatttcatcatttgacaaaattagaaaaacattattatgtataaatagtaaactattttctgcacaaaaaggtaaactattttttcatatgatgatcgattaaaagttcactaattttatccttttttttagagtgatgcaaaaaatcattgtcaaaggaatgaaaggaaccaaagaagacacggggagagcccatcccagccggagagacttataagtttgatagacaaaaacgtcagaaatcgtttgactacgatgagtggtggtggtgttctgaagtataaggatggaatgagagtttggtttgcatctcgtgcttagaggagagaagtttctttttcataaaagtttcaatcagtttgcattttagtgtaaagaacgttttatttctttgaatataatttagcattaaattcaaaaaaaaaaaaaaaaaaaatcattgtcccaacgactatagttggtcgttggctttgacacaaacaagtataaatgaatacaacgatcactagcaaaaaagacatgtttattgtgaacaacgagagttaccgaaactaagacgtaagtaacaagtaacaactcgacaagtatgttttagacttttctagttgaatatgcaaaacagagtatacgctttttgttttttgtttttgtcatggagaatcaaataaatacgaaaccatctggttcaaacttcaaaggttgtaatcttaaaaagaatttggcccgtattttgtcatatttccgaatcatttatttttcgttttttgcattggtataatcatgaagtaattttgtccactgaagtcttaatcttcttaaaatcgttatccttcatagttattgtagtgaccaatcgaattcatatttggtgatggatgtgatgctttcagctattatcattggttaatggagatatactttgttttcttaattatatcgatttatgacctaattttcaatgttatatcaaacaaaataggcatgatcatgttttaaacgtgtctcaaattacagtgtatgtgtgtattttcttattaatatcattttcattgttaaatatgatgaacataaattttaatattgtttggccaaaaaaaatgaaaaaatagtaatatgttaaatatgatgaatacaaatgtaattaaccttattgtatacctcatgtgaggaaatcaacctttctaaaaaaacttaattagaaagtgagagatatctaaatcatttgttttatattagtaatttttaaaatcagaacaacaattgatttaaatggtataacttcttatcggcctctacgtctataaatatgtacatcaagtgtattgtttgacagagtgacaaaaaataagccaccaaagtgtttgtgttttatttatcagctccattaacctttacaaatatatggctgctcataatctatgcttcaattcagcttttgtttgcaacgttcatcatcaaaagactcagcattttccttgtaacgctgtctccaaaacgacctcgacccatgctgtcaccttccaccgccgttccgccaattatcgtccacctctatgggatcatcaatatctcctctcgctcgagaatatatatatgtggtaaattgtaatattacatatcatattatacgtgcacaattcatccaaacatgttatcaggacaatctaacgtttcaaagactcaacacatgacctaaaattataccacttctgatttttattttgtttgtgtgataattaaaatccaattttttttcccaaaaattggcgttacaagtctggtgccgaagctagaactttatttgtttttaacatatgctttaaatcgaacctgattagtatattatagtaactcttacaatgctctctcttgatacgtatatagaaagaagttgaaaccgcggagaaagctatattgtttaaagaagaggtgaggaagacattaaatgaaattgaaggttctattgagcagctagaaatgatcgattctctgcaaagactcggaatctcgtatcactataaacatgaaatccatgatattttgagaaaaattcatgaccaacacggcgaaattgagagggaaacacaagatcttcatgctacatcacttgaatttattctcttaaggcaacatggttttgatgtctcgcaaggttttttacatatcacctcattttatttaaacaaccatttttaattaacatagtgacaccaaacccgtattgcagcccgcgacactaaatcagctactttttttttattagtcacaactatgtgactaatcaagtaatttatcgtttctataccaaatagtaacttaaaggagttgagtagttcatattctttcgtataaataataaaattattcgtatttcctattgcagatgcttttgacgttttcataagtgagaccggagaattcagaaaaactttacacagcgatatcaaaggtttactctctctatacgaagcttcttatttttcaatggattcggagtttaaactcaaggagactagaatttatgcaaacaagcggttaagtgagtttgtcgcggaaagtagcaaaactatttgcagagaagatgaaacttatatattagagatggtgaaacgagcactagagacgccgtaccattggagcatacgaagattagaagcaagatggtacataaatgtgtacgaaaaaaagcatgaaatgaaccctctcttgctagagtttgcagcaattgatttcaacatgttacaagctaatcatcaagaagaacttaaacttatttctaggtaaatatgaactaaattctatacatgtgttatatctctcaaagtggattatatatgtttatatgatttaattaattatgtgattgtcaatttagttggtggaacagcacaggacttatgaaacaacttgatttcgtgagagaccgaatcacagagagttatttttggaccattggaatattttacgaaccagagtttaaatactgccgcaagatactcaccaaaatattcatgttaattgtgattatggatgatatctacgacatctatggtacattagaggagctcgagcttttcacaaatgtggtcgaaaagtaagtatatcgtataagtataagaaacttttaaataacaatatgtttgaaaactttttaagatgatttttggtataaaaagatcatattctgaattgtgtctcccatgataatttttatttttttcaacagtcataatatcagttaattataatccatataatatactcttttccagatgggatgtgaaccatgttgaaagacttcccaactacatgagaatgtgttttctttttctatacaatgagatcaaccaaataggatacgatgttctcagagacaaaggacttaacgttatcccttacctcaaacaagttgtaagtttttctacaaatcctttagtatatagaaaatgatgttacttagaaatttttaattttatttacgtagtggacggatctatttaaaacgttcctaactgaatccaagtggtacaaaactggacacaaaccaagtttcgaagaatacatgcaaaacggtgtgatctcgagttctgtcccaacgatactgctccaccttttctccgtcctatccgaccacatctccgaccaaaccctaaccgatgattccaaaaaccactctgtcgtccggagctgtgccaccattctccgtctcgctaatgatcttgccacctcaacggtacacaatttactcgttaattagtttcttttattcttctagcccaaaacatgttcaacatatccaaatattattagtgatgaatgatatataccatttatttatgtttcacgttttgaaaaatgtgattcctttatattatttaccattcagaacattaaataatttccacgttttagaatatgatttagctatttataatacatattttaaaatatataaattcatttatttacaatagtcagcttttcagtgttaatcttgagatatcattaggttttaacactaatttgttgacaaaaaaaaactactcatagtttcatgtataaatgattcaatttttccccacacaaaaaaaataaaaataaaatcatgaaaacactaaattataatgactcacaggaggagatggcaagaggagattccccaaagtcggtccaatgttacatgtatgagacaagagcaagtgaggaagaggcacgtagacacatgcaaagtatgatcagcgactcttgggacattataaactccgatttaaaaacggcacacacttcttctcttcctcgtggttttctggcagccgccgcaaatcttaaccgcgtggtacagtgtatctaccggcacggtgatggccacggaagcccagaaaagaccaagaccgttgattatatccaatcagtactcttcaatcccgttccgttataggattgtaaatttgtatttgccgcattatagatatgtttacataattaaaaggtatttggtttgccggaaaaatgatcattttattttccaaactatttgtaattaacacaattattttttaattatatgtgcgcaaaattgatttttaatttgtcgttaacttaacaatttggtccaaaatttgatcaatgtttactagttgatatagaaacgttaaattactcgattaaaacctaataaactcaaaaaatcctaaaatttctcccaaattgaaagctaagtcattacttcgaataaaaaaaaaaaatcttcatctattcatcgtacttcgccaaaatatgcgaattcgattttattatttagctgaaattcatttattactattttctgcatggcaatgtttcgttaattttttactttcaattttattgtaattttaattcaaattataatatatgtacataatttaacaatgtgtttgataactttctctaaaattgttgtcatttattatttatacatagatatcaggaccggtttagagtgtgtgccaagtgccaatggtgcatttgtactgtttaagcaatcatggtcctattttctcaaaaatatataataaatgtccaaatccatacataagatataaacatgttttttataattagatacagggttctatttttctctgagtcggccctgatagatacatactatcagattaggcagaggtatggactatggagtaatttatgggggcacatccatccgttggtatgatcaaaatttagtataagtcttcagaaagtattttttagatgggatgaatttgcctctctattatcccaagattgaatccccatttccttcagaagcagtaaatacaaattaaactactgagctacaaattcgcgtaaagctacatgtgtatttttaatctcaaagttgctgtaattatgaaatgtgaacgaaatagaagtgacaggagcttgagtgccccatgagataagaacttatagatgtatattaatttaaactgtactgtctaaacctagacaacgccgtgacgtctttgcccacatgtgattattcgttaccacctctcttagtgtggtccaacaaaattggcctctcagttttcattgaaggcagggatagagatatacaggtagtcacatggacaccgaatcgatatttattccttggaatttcattaaggtttttcgaaccaagacaagacaagctatgcatgaaaccatttgccatgccattaacgtggactaagggtggacactgatctatctcgtacttgttattaataaaaacaaccgatttgtttttgtttttgttattatatctcctactttttgttataccatgcatgtccacacgtttttttcaatttgttacatgtccacaactttcacaaatatttttaccaaaaaaacaaaaaaaagtttgacaaatatctttagattttttttttgggcaattagtgacaaagcaagggacgttgaaagcaagaaacgtaaatgtttggatatcacaccacaccaatatgttttagccattacttctccaagtttttttgttgtgtgggaataatacttctccaagatatttaagaaaacgcaaatgcatggtcattgaattatatagcgagaaaacgtcaaaaactaaactgattaaaacagatattcttttagtaaaacagaaaaaataaaaatatcttcatatatataacctgtggtccgagacccaaaccttaaatcagtataaaatatcatagcggagtctaaagaagagttcatccaattatttaactctttagtgtaatcattagcaacgcaaagaaatgcctaaacgacaggctcaacggcgtttcactcgcaagactgactcgaaaacaccatcccagcctctggtatcccgtcgctctgcaaactatcaaccgtctctttggcagcacgaatatctcctctcgctcggtaatacatatgtggtacgtataagaatgtacatgacgttgtattaaataaaattatgtgacatatattactatttaggaaattatatatagtgataatatttatatcatgcagaaagaggacaacgtcgagagagttacgttattgaagcaggaagtgagtaaaatgctcaatgaaacggaaggtttactcgaacagctagagctcatcgacactttacaaaggcttggagtttcttaccattttgaacaagaaatcaagaagacactaacgaatgtgcatgttaaaaatgtgcgagcacacaaaaaccggatagatcgaaaccgatggggagatttatacgcgaccgcccttgagttccgactcctaaggcaacatggtttcagtatcgcacaaggttgaaagcaaaaaaaaaaaaaaaaaaaaaaaatcaaaaagttattcacataaatccaaattttcagtttttagttcaaagtttcaaaaatgaattatataaagttggtcttcagttatatatgtctatatgatggttctgaatttaaccacattaatattgcaatctcttgctgttgttaataaccacattaatattgcaatctcttgcagatgtttttgacggaaatattggagttgatttggatgataaagacatcaagggtattctttcactatacgaagcttcatatctctcgaccagaatcgatactaaattgaaagagagcatatactatacaacaaaacgacttagaaaatttgtggaggtaaataagaatgagaccaaatcttacactcttcgaaggatggttatacatgcgttagagatgccgtaccaccggagagtgggaagactagaagcaagatggtacatagaagtgtacggagagagacacgacatgaaccctatcttgcttgaactcgcgaaacttgattttaatttcgtacaagctatccatcaagacgagctcaaatccctctctaggtaagttaacttaagtaactgatgattcgtggactttgagtaatcatacatgaaatttgaaaatcaaaaacatatagagaacatgttcgtcatatgttcttagagtactttagtaaacataaacatgtgtataaccgattcagaaggtttgtattccaactaaaaaggattgagcaaaaaaaaaccatcatctcaagagacgtgttaaaaatctcaaggtagaaatgaaaagagaattgcattactaattcataaacttatgactactctgttaaattgtttttagtttggaattttcatgatttaatttctcatcatttatatgttaaaactgtgacttgaccttcaagaaaaatcattatatcttaaaatttctatagataatttcaaaatgtaattctgtctacatagttcatctttttatatgtatgagacagttggtggagcaagacgggattaacaaaacacctcgatttcgttagagatcgaataacggagggttatttctcgagtgttggagtaatgtatgagcccgagtttgcatatcaccgacaaatgcttacaaaggttttcatgctcattacaactatcgacgatatatacgatatttatgggacacttgaggagctccaactattcacgaccatagttgaaaagttactattaataccttgcaaaataatatcaaactatttcactctatatctatttgcttatttcttcagtgaatcgatatatcatgcagatgggatgtgaatcgtcttgaagaacttcccaactacatgaagttatgttttctctgcctcgtcaacgaaatcaatcagattggatattttgtactcagagataaagggtttaatgtgattccttacctcaaagaatctgtacgtattctcatcattttatctatgtaacaatagattttgaaatattaatttgttggttcattcaaagttagctataaaaatgaatatacactataatatacatatattgtagtgtgcagcaatagattatcaaccggaaagtatattgtttaagtttaagatttttttcgaagatttcttaaaaaacataaatgaatttcgttttcttttctcatttttttgtcaccaagactttttattaataaatatgaatatttctaaactttttctctacatctcttgataacttagttttttctttttagtgggcagatatgtgtacaacgtttttgaaagaggcaaagtggtataaaagtggttacaaacctaacttcgaagaatacatgcaaaatggttggatctcaagctcagtccctacaatacttctacacttgttctgtctcttatccgaccaaaccttagacattcttggctcctacaatcactctgtagttcgaagctccgccaccatcctccgtctcgctaacgatctcgccacttcttcggtcagtcatggtttcacaacgtacaatactgtaaataatttattgacagatcaaaggcgattatatctaagcaaactttttcagactaaataaacaaagtcaaccaacatatggggactcacacatgtgtttcaaagttatgctcaaagcggtcctataaatatagttattttaacaggaggaattagcgagaggcgacactatgaaatccgtacaatgtcacatgcatgaaactggagcttcggaggcagagtcacgcgcgtacattcaaggaattatcggtgtggcttgggatgacttaaacatggagaaaaagagttgtaggctacatcaaggtttcctagaagctgcggctaatcttggacgtgtggctcagtgcgtttatcagtacggtgatggccatggctgtcctgacaaggctaagaccgtcaatcatgtccggtccttgctcgtccaccctcttccactcaattaattaattagtttctaataataagtcttaaatcacacaagtattggattagacgctcaaagagttgagagatgcatatgtattctctactcaaattatataatgcatgtaaacatttgttagtttttatcaacatcaagagcttgtaaaatcaagttagatgaatattttgtatatgagcaaataatattcacttgatcagtatatactagtgcttatataagaaaagaaaattcctatatacagttttaacatttcgagcaaaggaatcagcataaatgtaagctatgtgagataaagataatttgaaaagacgaaaactgattttggaggagtagacacaaaatttgatcggaaaatggagataaacagagcattgtctacaaacaaaactaattaatagcttagcgtggaaggccgacaaacaacgtcaagagcccttcaatcccatgtggtagcaaaatgtgggtagtgtctagaaggcaccatccaaagccattttgtcgtgtgcattgcttcctaggaaatgtcaactcaacgacatatggcagaagaatcttcgtttcacaatctctttaatacattacttaatttcgtttcaaataaactttttgttatcactatctcactaaaccaacaactcttctttttcttttccggcatttcaattctatgatgttttcaaacaagtgatggacaatttacaaaaataaaacttttttttttttgccaaacaaaaagaaaacttattcatggaaataaacaaaaaaagacaactggttgccattgaattacgccagaagggtttagactgacgtagtacacacgtcagcttacactaaaaaagatccgattctaattattcctaaaattggaataaattaagggaaaggttaattttaggcaacttaagctaataatacggagggaaaatacataacattaattaccgttaccatctacttaaccataacctccttccacatctctccctctggatcgagaaatctccgatccattcttctccgtctgccaaaatccccacttcacgaatcgcaaaagatcaaggtacgtacatacatgtccctttctagaattagggtttttgtttttgcagttagtactagaatctcaaatggatcttttttttttggatgatcaggtttattgatctattgcgaaattagggtttgtgaattcgaatcggagattaataatagattttgtgatggagtgttcatcacgcatagaagaatcttgatttcgatctcgatgaaattaggaatcgagggattttatttataattgagatggtgaatattaaaagccctttacggctattcatagaggagtcgattaaggaattaattaggggtttcaggagacaaaggatcaaatggagaaatgcgtttcttcttggttctataatgactaccattgttgttctgcttcatacaccaacgttttcagtcttctctgatgaagaagaaaccgagtcttcttcttcttcgcctatttacttgaatggttctctgcatttgaatatccatattgttagtagtgaagcaaaagttgaaaattttcatactcttagaacaagaactcctattgtgcaattgaatgcttctgaagcaagtgaagctgttctttcgagaaaaaggcgaaaaaggaagaaaagaaagaagacaaaagatgatctgattctcactgatcctccaccagcaccacgacatgttctatcttcctcagaggttaggttttatcagacttaagaggttttaagtttcttcatgttttctctaaactcactccaatggaactgagcagagacgtgctctttccttgccaccgaagaaagctcttacttatgcaaaactggagattcagcgtgccccggaggtcataaatgatacagatctgtttgccccattgtttcgaaatctctctgttttcaaaaggtatatacaatttcacaaggaccagagtgcatttaaacctaagttaacacttgttttttatcaccttattcaggagctatgagcttatggaactaatactaaaggtctacatatatcctgacggagacaaacccatcttccacgaaccgcatttaaatggtatatatgcttcagaaggttggtttatgaagctaatggagtcaaacaaacagtttgtcacaaagaaccctgagagggctcacttgttctacatgccatatagtgtgaaacagcttcagaaaagtatctttgttcctggatcacataacatcaaacctttatcgatctttcttagagactacgtcaacatgctctccatcaaataccccttctggaaccgcactcatgggtcagatcatttccttgtcgcttgccacgattgggtatcgaaaatgtttctatgttaaagaccaatgggtttacttccctcatttttatgttatgatctctatttcataaaccatctttgtgcagggtccttacacagtgaacgagcacccagagctaaaacgaaacgctattaaagctctctgcaatgcagacttatcagatggaatcttcgtcccggggaaagacgtttctctccctgaaacatccataagaaacgcaggtagaccactacgcaacataggaaacggaaacagagtttctcaacgtcccatcctcgctttcttcgctggaaacctccacggtcgtgtccgtccaaagcttctaaaacactggagaaacaaagacgaggacatgaaaatctacggtccgcttccacacaacgtagctaggaaaatgacttacgtacaacacatgaaatcaagcaagtactgtctttgtccaatgggttacgaagtgaacagtccacgtatcgttgaagctatatactatgaatgcgtccctgtagtgatcgctgataacttcatgttaccgttcagcgatgtgctagattggtcagcgttctcagtggttgtaccggagaaggagattccacggctgaaggagatactattggagattcctatgaggagatatttgaagatgcagagtaacgtgaagatggttcagagacatttcttgtggagccctaaacctagaaagtacgatgtgtttcatatgatacttcactccatttggtttaaccttctcaatcaaaaccaaacttcttttgatgatcatattcccgattcctgacatcatccttaattatgtctgtacattatatatattaagaaaactatttccattgacaaacgggcttatccttaacaggctccttttattagactcatattgaatatcaatgggcttaattaataaaatggcctagatgatcctctgctgagtgtacacaaaatactatttcgtgtttatgttataattagctccgctgattccactggatttattgagtcttgattggtaggcaagagctttaagtggatacaacaaattgtaaggattaaaccgtttgtgaaagagcgcattactattttaaagcttctccttcagcccgcggtttaccacgtttggaaaaagcgcaacgctaggatcttcaccagcattccatcttcggtctccactcagtgtttggcaattgataagaccttgaggaatcgtcttttgtcctttccttcctcagacatgcgctcttccactactcttcttcatttttacttctcttgtatctcttaactcaagtaacatttgtctgactgttcctatgttattgggtttacagtatgtaatttaggttgtaacctcacgtttcgtataaaatcttaacattagacccaaaaaaaaaaaaactgttcggcgacgggactgaggtaagtatatataatggccccataaaatttaaacaataggacaaattctagcgaccataacatagactgacatagtctggtggtcctctacgcagtattgtctgtgtctacgtgttggtataaccctacatttacgtatatatatttaaagtatatcgcaaaatttattgagttttttttttttttttcaatagacatttgagtaatcatatgttcaatccacccaactaatacgattcaagtttttttgttaacaatttaagttgaatctatgcaaacaaaaaaatcaattgaatcgtattagttgggtggattgggttaagataacgttaataattgtaaatgtgaatgagttggtattagttattcactaaattggataactttaaaatgtcaaataaagttgagaatgtgctttgaaactaggagacaaaatcaaaaccctttatcaaaaataaaataaaaaacaaactacgtgacaaatgaaaagaccatttagaacatcttatcctttaaaagtatcgtttgaaaaaaaaattgtaaatataaaagtttttgtcgtcaaacaaattttatttaatcaaggtttgttgttgtttgtctaattaatgggtatagtgaaataaatgtatacgtatgtatttgtgtacattaaaaaattgtgtggaagacaatgatgaaagtaaagtgtcgcaatcaacatggactcgctcaacgtgatatttctacatcactatgttgttttccccaataggatccttgtaagtgtcagaaccacactatttcgtacccatcttaataaaatttaagtttaattgtccacacacaattattatagagcgaattaaatactaacacatactgtaggcaattaggcgattagccttttacctagggacaatgtattcttgttacaaaataatcttctctttctttgtcattctattagtacaaaataatctacgtggctgtaaaatataaaataaagatggtttttaaaatctatatatacaaattattcacgtagctaaatgtctgaaattttgttttacccgttgtactgttttcatagccatagggttgagatgaacatgcttaaactataagttggatgatttagttcagttttgatcaaatttaagaacccattttgcacttgttttagcttattaatctcaaactatgtaggctgtggtggatgtattgatatataaatttgataaaaaaaaaaaaaaaaaagtattgatatacatgtcatgttacacaaaacaatctaccaaaaaaaaaaaaaaaaaaatagcaaaaggaactattctctctcttttctttttttaatgtcatgcatttatgtaatttagataatgtaaatagttatatatattgtatgtaatgtataaatattatatatatttcatcaacgaatgatattgtaaatatttctccaccaagtcaatttaaattgagtacatgcattaatgcttaatgttacaacaagtttaagtagtttagaaattaagacacacgttttcgcatctataaacgatttgaaaaatatgatggttatggctaactaaatatagatattaattcaagaatatcgaacaactcttcttacaaatatttggccgataatcaaaagataaattaatattatttctcatttgtagttcaccatttatcaaactgatcagaattgcttagaacatggcaaaacacacacttactaattgagagtcatatataaatattcaccaatttcatttatgttttttttttccaaatttgactatagatatttttaccaaaagtatatatatgtatgctcatcttcataatcaaccagactactttaggagaagggtgtcaatgaagcattatagggtaacacgacacgctcgaggcttgtttgtcccactcaacaatttattatcttaattttttttggttatattttcttatcaattaaattacctctggctttggtactcgtgttggagatcctagttctaaatatttgctatgagtgcttacatttgtagatgataatttttctactactttttttctttttttggatccacaacttttgtttttgttatcaaattttttttattgttctggtagaagacttctatttgtttgatattggaaggaaaaaatatatcttctccactttctttttctatttgtttaaccagtcatcagagccattataatacaaatgttatagttccttgatgtatattaattgactgtcaaattgatatatatggatcacaaaaatattgtcgaccatcttaaaagtttgaataaaaaagaacattttacaagataaatcaacaagtagatgaagacaggaaatggatccactaagtacaaacttactcattgttatttttggattagtctagttttctcgtcacaagatgactatcttctcgttttggcacaaatgactgcagaatgcagttataaagaagtaactaaaactctgttaggcaggaaaaaaaaaactcacattgattatgtaaattagtaattgtaaatgattcaaaatattgtattaagaaaaacacgaatgattaaggagaataaaagtggtcttcgaacctagaggcatgggattctctatctcgatctaatctcgtcgtcactctcaatatcatcacatcatcatgtttcagtttaattagtaattaaagagactaatatttttttggttaacaataatttaataataaaacgtgttcatagttttttaatagagtaagtagtagatacatatactcatgagggttctcccaacatgtttgactaatctctcgaaattgggcatacaatttagtaaaacgttttagtaaatagtataaccacaaagttacacaatgaaatcaatcatggaaatagtaatatagtgaatttatagttttatactcttaatgctacacctaataccaataacctcttaatagttaatacacagtttttattagacaatacacaaatttgatagaatttttttgtctctgataaaaaacaaaagcaaggatatggtacatatatagtgttttttttacacatgtggtgaaacataattcattcgatagtctaacctttacgaaagacaacaaatatttttttcaaccgtattttaactatttggtttatttgtatacatcggtaagaaaatagtttacgtaaggcttaaacacaatcatatctttgaaattaaggattaaacggtctgtttgagaatttaatatacgtaaatagggaaaacagagcaattaaaccaattgcttaaccaagaaaaattatcccaagtattgaaaattgctgtccaatccgacggacattgagccatcgatagcagttctaagcagtccatctcaaatgttcgacagcaatcgaaatcctctatgatcgaatacatgacatatcataggttaggcctataattttagaaaggaatccactagaatgagtccatcctgcaaacatattcttcctactccaaaagatagttatgagctctcaaaaatatttttataaacatcaactattaatagagaaaagtaaatatttaattaatttttaattcgtaagtagccacttaggtcgaacttaaaaatccacagccgacatgaatatgagattagtttctagacgcaatatattaatgatgacactttgtataatcaaatcaattaaataaataaattgaaaatcgttactgacatgacatccatagataaattacatatggaatgcaggcatgcagcatcaacgctcaatcatattcataactgttgctattatttaacaatgatttttttgtttggtctatgcaatacgtggttcacactctcccacataaaggatattttacacgaattttacgatattttaaataaaattaatcatctttaatacaggagtatttttcaaatattgttacgaaggaaggatggtgcttcgatatttgctgctcattacacaacatgatctacatcaagcgtccgtacaaaacccatagtaggcgtgttcgaatttgcgacacaaagtgtcttagtcatctttttgatttgaatgaaatgtttgaattaagttttatatatcagttagttaacaaaacaaataaccgttatcttatcaagaacacattactaaaaaatatctacatttctgctctccaacggtctatttaacaatactttaaaagcaatttgaaacaactaatgttttctaaaatgaataaattcaactgatgttttctataatgaataaattcaaccacgcaatatattttgaaattcgctttaaacaattatgtagcatttaacttcacattttactaaaaaaattttttttatgtctttaaggttttcaaaaatgtcttctagagataaatttgcttaactttataattgttcctatacactaaaaggacgaatttgattaactaaaaatcttcaaccatcacggtaaaagttgaatctttgtaaaagttaccaataaagacaatatttgaaaagtataaaaaaaagatatctaaactttaaaaatatctcgctagctacataaattattgtcctttgtgtaaatatgacttatgtttgtttgaaggtgttcgtatgtgataacaacactccgtataattaactagacatttttaaagtttgcatatatgactatgtgatggtatctctctctcgttggcaaacattttttcataaaaaatggtcatgacaaatacaaatgctcgtaaagtcgtaaacaaagtttttttcacaaacattcgtctattttagtaactatatgactgtatccgcttttaaccaaaaaataaaataaaatctcttacacaataatacagtatgtttttaatagtattataaacataaaagaatatctatgagtttttaagtcaacatgcaatatatttctttagtagagaaaacaatgcacatttgttttgtgtttttttttggtaagacaatgcacatgattaaagcaattatgcatctgcttaaataataagaagttttagttttctatattttttagtttgggtttcgatcagaaatctacgctgggtgtgtaaaaaaaaagggattatgcataaacacgcatactcatcaaaagatgatctaaaatgtttcataattcattccatagtttggacagttatgctacgtctaatatatagcagatataaataaatatacgagatgaatatgtacaaattaataatcaacattcaattttgttgaactaataacgaaaagtttgatgtgaaccttaaaagaaaagtataagacagagagaatataatattcagggaactgatttcaaagaattataaaaaccctctatctagattaaatttgctaaaagcaatataataagaatgattagagaaaaagtaaggacactaattgcacagaagaatgaaaatcagtactaactatacatacattaaatacaccatacatttaattgataaatgggccaataggtcctttaattttcaactttataagggccaataagatgatacgaaaaagggagaaaataaaagtggaaaatagagaatgacagaaaagaccatcaagtttgtctcttgtactaatttgccattttctctttgtattctacgtaccgtactgtgactttggctgctagatttctcaatatacaaacaatttgttttaacgaattccattttaatatatgcttttcaaatggtaaaatgcggccgagcttaatgttcatgagcatatactaagggaggatatatagttcggtttctaatttattataaagatattaaaaatccttatatcgactatcattataaatgtcacaataaaagatgtaatagaccatacagtcaagaaataaaaaaaaatatactccatgctatatttttcttatctgcaaataatgagaagtaaatgtcctgattttgagatgggttacataacgaataactatacaagtcataagtcatctatgttaaccatgaaaatactgatctttacatttacatgtcgaagatgtttacaaaaaaaaaaaagatttcgaagaaaccctaaatgtatatattctttgccggctctatgggagtaaagttagagtctttgtcagaactcaaagatgtgaaaataaagggtcaagacacacacttaatgaatttggaagataaaagcacaataaatgaaaactttttggtaatgacgtacgtatttgtacaaaaaaaagaaattaaataacctgtacttacttacacatcacacattcggaaacttttactcacacgtaaaaaaaaaagaaatttcccatcgtagacaaaaaaggtacaaaacgacatcgtcttcttatttaccgggaaaccaccggaaaatccgttcgccggcaagaatttgccttctagtaattttccaagaagaaaggatcttcgtacggaaacgagtcccagaatccatcgtttttgttgtgatcattcacgtcaagcaaaagatcaggaagatcggagaaagcgtcgtcggcgactggagatgacgtcacggtgctagacggagactccggtgctttccagtcaacggcagctgctgcggcggcggcttcttgaatgtctttagggtccgcgctagccggtctcggcaaatggtaagctagctccgggaaattaaggtgggcagagccacctttgatggctaaagccgccacgtcgtgtgcacgcgccgccatctccggcgtagagaaagtaccgagccatattcttgatttctttcttggttctctaatttcagacacccattttccccattgtctcattctgaccccacgaaaatttggttgtttagaaacacctttttgctcatttttagtcttagaactctttccggttttctccggcaccggtgaccggaggttacgttgcgattcgtgagaggaagagtcttgcatctaaagataatttaatgtaacgagagaaagagaaaaaaattggtgggaagattaaaaaaaatgttttgtttttggtattttggagtgtgagagtaggaatagttttgaggagaagagattggtttgcttctttctaatatatacatccaaatacgaagcaattattcttgtgtgtatgttttttcttttatgtataaatcaaatattaaaagctaaagagagacttgactacattaagatttttttcttttttctttttgtttttgcttgcaatgatatttactttactttataatattcattattttatacctgaattggacacttgttcgtttgtaaacattctagtgtactgttatcactcgtttctcctaaatcgtccaagttcttccaaattaaaaaaatacgtacttgaaacagcccgaaatcgatatttaaattaatttgttctgtttggttttgaaccaatttttagacaaatatattggttagaaaaaaacagaattttatctaaaattataatataatatttcttttaaagttctgacatatgctttggccatcgtttcattgaagtttgaaatatctattttcgagtagatccaccagttactacatgtggatataacttgagatcatttgtttttttctgtttgtgtagacattttcacagtacagtagattttagaaaaaattagattcaattgtaacttgtgggcccgaatttacttttagtttactttacaatttttctaatttccgtcttttgtttttttcccaaaaatgtcatattttcgtttgcccgaccatgacccatgtctgcctacaaagctaacccacgtttttcactcggattaagtttgacaaagacaaggttaatattaatacatcttaaatctcattattaatttagcagtatacgcctctacactatttcgaaaatcggaagctccagcctccagggactacttcagctatggtttcagtcgagacgcaactcctagttcgttagctttgtgtgctctgtttcataagtttctctggttttggttctgatattattgctctgtttcttttcttgaccaaacacttttgtaaatatctttttttattaattaatttaattcacatttcgacaaataaaactaatttagcaataaaataaaattcgtcttaagagttaactcattaaaaaatgcctcaggtaataatagtagtatttacgtttatatatataatctatatatttttatatattgtatcacgttattgaatatctgaattcttgtcattttagcaggggttaaaccgttaaagtatgtcctatatactccattttgatgcgaaaatgttaaatattgacataaaataacatagacttattaataaaagtgaaagaattggaatgaacccactagccatttattagtaacgataatttttttttaaaatatattatttaacaactgtcagtcaatgttttttacttggacgtttgcttaatagacggattaggttatgcacatttgcggatatacgttcctaaataattgtagaagtttttttgatatattatagaatttaaagattaagcatttttagtaaagaatttgagtgaagattgctgtggacgacacacgtacgcaaaacgacgtaaacacatgtagtgtatatcagtatatgtacaaagtatgatgttgaaaatgtatacattatcatatagagggagcaagttacgtattagttttatcgtggggtccatttgacgattaagactaagataaaaataaaaataaacgttttacataaaagtgaaaagactatagagatatgttgattattcagtagtaaacaaattgagtgatttttttatgaaatcaagaatttttttactgtaatttttttttggcaagtactgtaaattgtttggagtgttttctgttcagatttcataaaaatatctcgaccaataatatttatttaagataaatatcataatatatagattaatggatttatatacagacacactcttaaaagttaaaactgtacgtaagtttaaataagggaataaataagtagaaagtcagattagctagctagcttggtgaagaaaatatattagaaaaagtaaaatttaattcgggtcgatgtcttaattccctaaacactttaactactaaccattagaaaatgaaagataaatgccacttttgaaactcttttttagtttttttaaaacagttggttgataaaggtgattacaaccaaaacattagtttgctctattttaatttacctaccaaattcggttattaaatgcttaattaatataaaggtctggaagtcttctgtcggaaaatgatgctaattgaaacaaagcacaatcctgaaaactccatatgcatgtttcattttaagcaaacttctctttcatattgatgttgcaaacaaatttttcttcttcctacgacgcattacattgaaatcgtgggttaactcccaaactttgtttttggtgaaaatttaatggaaggatatatgaaaaacaggtttcttttgtttacaaaccactgtttcttacagcttaattacatttttaaaaattatacttcttctgttttaaattacatgtcgtttaaagttttgcacaaaaattaagaaaacaattaattttttactttatgctcaatatattctctaactttttaattagttaagacattaaaagtttgaagataaaactaaaatttttaccaaaatatctgcattgaaaatccaaaacattatttataaaacaaaacttaagtgataaaacaacaactaaattaaaacggagtgaacagttatttaaaatatcagcgtatgagtaaaaaaaatttctacaatggaagttgcataatttctgaaataactttgcctaagtaaccctaaccctatatattacataatacaatcttaacgaaagcaatagagaaatgtcaatatatgtgattggactatatacgaagattacaaatatcccacatatccttctcagagtagaaacgatcaattgtattaatgttgcattgaaaacgaaaaatagtactaaaattccgccatatgacgatcgtacattaactattacattgctacatataaataagggcatcgccagtttttaaactgcgaaattattcaaagcgagaagaagaagaagacgaagaagaaggacgaagcaagtctaatgtgattaaccatatcgagtatcaagcaaagaaaactcttcagagcctagcggtacgaagttgctgctgaagcacaggtcgaaggtattcttgtacccatcaggaaccaccgagtcgttcaatggatccttcaacgcttcctcaaagagctttgggtacacattaccgtcgtaacggccaagaaccgagttcaagtaatggtcggtgtaattgaaggcgtccacaagtgcaaccgcattaggccggacctaaaagaagcaacaaaaacgtgttaaaacttagcttaaaaaggaatcaaatgcagagatggagagagagaggaagaaagaacctgagtgtataaggaacggagctggtcgttagcaagagaggcttgtttgggagtgatgcagttagtggagaggaaatcgccgagatgtttgtggaggagataaagagcataaatgtaacacagattattcagctgtttcttcactcctttgccacctatgtcttgctccagtttcgctatgaacctaaccaagacaaagatcacaaaattcaggaactgacattgagagggagaatcattaacttgtttgatacgtgtaaacggtgaagaagaagattacttggaaacaacaatcaattggcaatgagcaatagcggcctcaaccaaatcagccaagagctcttggaatcctgcagacaggaagaatttgtgagagtttggtcctttggcttatgagctgacatggcaaccaattgttctggattcatggagttagaagagtaccttgttcctgattctcaaacttgctgagatttttggcacacgtaacagccattctgagagccctagcttcgaaagcttccagtacaacatcagggtttaaccaatcctcagctacatgcccaaaaaaaaaaaccaactttatcattaactcgggaattatattgagacaagatcattagtttgtagttgtagcaggacgaagaaaaagacatttaaacttgaaaactcacccttttgaacaccagaacgacattgcaaaagatgtgctgcccggcccatataagcagttgtgccaacaggaacctttccagatcccagctgggcgactgtcttcatgaggaatcgagcaacctaaacaatagcgtgaattgaattgtcggaaacattggggaaacaacaatgaaccaaacacttcaaaagcggttaaatgtggtttgcatatcaaccagaaaaaaaacaaaaaaaaacaaattgcaggtgacaaaaagccaaaataaaatatgaaacagaagaaattgacataaacctgcaattaaccatatctaagaaagtacaaagctcacaatacgaaagcaatttgagctgacagaagtccagagagacataagataacgagccacatgctaagaaatctatttgagctgacagatttattctagtaagtgagaatagctcgcagttgatgacaaatacctgtaattgcagcacaacattgtctccttcgtatgtgcaggcaggaacatatacagcaaacagctcggggagcccactgcaccacaagtatccatgtccaccacataacttacgacattcttcaatgccatcctgcacccaatagtacccttaagctgaattttcaactctaaatacacctccaaacaatgtcaaggagggaacaaacttccaacatgtgagcagttggatcctcagagaaacgaaaccaatcaatctagtctagtgagtataaaggatcagctctggaacttaccgcagtggctgtggtggtgagagacttcaatcctgcagtgcatgcatgagcctcaggcaaagttgcgaaatcactagccgccagtctttcagttacatccgtgtacagccattttagccactctccaacaaatcgaaatgcatatgcagatgctagcagaggaaatagcctgttctgctgagttttataatcaatcacctgtgataacaacaagcataaatatatcacattcccttttctagccaacataatagtcagcagacgttgatgagagttttaaaaagctatgcaaaaccaagccgaagaaaaacagttcaccagaaacttacagacaaatttggctaaatatgcaaaatattcttacaagcaaagtttttcaaggtaaaatagactttgaaatttgttatgatccaacatcaatgggtgtaaacaaccatgcgtatccttgatttttgaataagtacctgtgtctcaatgccaccattatgtgcgccaaattgcctccgcactgcactgtatcttgtagctatgcaaactgctcgagatagtgcattggaagcatcagccacaattgtttgtctcacatacaccatagtaccatataccagctgctttggaacatccgatggaacatattctccttctcttgtaacttttgacagcctgaaacgttttgaaagaggagaaaaatgtagaaccataagcccgagtttatgcacaagcaatttcctctagaactatcattacatcgtgaatgctaattaaaatcagacccgaaaggcaaagagagaggacctcatgagcatttgatctctaggaatgcgaacatgatcaaacataagaaacccgttgtccattgaattatatgctccatttcccatctttgtcccgatatcaccaacagttatattcggaagaggagaatgatcttctaagcttcgcagttgcacgatgaatcctggaagagaaagtttaagaaagcaatacccaagcaagaaaaattgaacaaaaaaaaaatactggaaacttttcccggtacataccatggataccgtagtcttttccgttagttatgagacgagcgtaaacaacagcatgagtagaaacttttcccaaaccaccaggccaccactattcaaacaatcaagacagatgaaaatcttacacaaccaagagaaactgtgcataatactcaatcaaaggcttcttggtatacttactttggatgcagtctgagttggagtgtgaattacaaactcatcagtcttgggatcaaatgtggcagttgtctcaagtccttgaacatttgagccatgaccaagctcagtctgtgcataacacccaataatctgcatcttattggccagcgacaaccacttcttctgctgctcctctgtaccctgccccttaatagcaggcacaaacattccctatagagcagagatacaaaaacaatgaatcaaagaatcaaaatcctgtctccagaagataaatgagacgcaggtagtacccagtgcagatccacataggcaggctggtcgataaagtgcctcaatcttcctgcttcttcctctgtaacaaacaaaaaatgaaagagcacaataataagacgcaatcaaaaaaccttgataacaatacgtgtgtgagaacaatccataccattgagacgaagctcgataatccttttaaacgcatgggcacattttctcaacgtactcttaaacagctccttcctactcaaccgagctcgattgcttttctcaaatacctatataaacaagattgagaaattcacaaatctaagagagacctaatcatattccctcgccgcaaaaacatttcccggaatccaaacgaaaccagaacaaaaatcaacgagaatcgcgaagaaattcaccggatcgctggcgacaaggcgggcaattcgatcggaaacctcaaaagcgtggcgggaaccagcccagacgatcttcatatcctcaacgtcgaactctgctttgtttctctcatcggcgaggtgatcaattccttccatgattcgtaattcagaatctagtagctaaacactcaaaagtttctcgagaaaactctcagagatgataggaaaaaaaaaaaaaaaaaacagagggagaaaaagaaggacaatgcctcactctaccgatttaattgcagagtagttggaagaacaattaagctttttatttcggagataaaagaagagaaagacaaattgatttaaatatagactcttttttttcttctttctataattaatatattttgggtttatctttttctcagatccactctccgacatagataaaacccacgtggaaaataataaattttggattatatattcctaatataagttaattagtcaacgaatgttgaaaacaaattaagttgtttgcaaataaaacctcgcaagtatggaataatgtgattttttccccctcatatatatatttgactaagaaaaaaaggatatctacgtatagaaaattttatatgctgtataacaaaggataattgacagacaaaaagtggttgtatttcagtatttgtgtactaaaataaaatttaaaatatcgttaaatcagatgtgtggataatttttttttctttttcccatatgtgtttccatatgaattagtaaatgcatgcatctgaagaacatgttgataaaaagaagataaaatagttagattgaagataagataatgttttgttatcttgtgtttaaaatagtattttgttccaactttgcaggtatagtagcgttatgcacatttcgaagaaaataaaaataagatttaagggcccgaatggtgactgcgttttgcaggttcaaataataacgaaaatacataaatatatatatatatatatatagattttgatattgaaatgtgattttgggtatggtctatgtcaacattcatttgtgtttttgtgtctgtcaaatgcatttgcttgtcaactgtatggtaaaacttgattaatatttgtgtttccttcaaagtatagttaagtaattacacttgtatacaaccgtattattctcgtaaatattaaaatgtttgtcttttgaattgaaacagtaatgtccctataaaccacagaaaattcgccatgtgtatgagtatggtccaaacacgtaaacgcccattcaagttccacggcttttaaacgtgtctatctttgagactttgactgactaatcattttcaagttccataagtttcactaattaaacattatggtacgtagaagtttgaacactatttttttcttacatttcgtcacaaacataagactaggaagtggcgtatgttagcctgaaacgctccttgatatagtcgccggcgagaataggcgggaatctgcaccgatggaactaaatctttatgagagaaggactaaacttttattcttttacacttgaagaccaaatgatttaacaaacgtgtaacgtgcctctcctcacacccttaaattggattaagattcaagaagaaataccttgggggacaagtttcgctgcaacaactctccaagcatttcacattacaatctggattgggatctaagaagaacaccacctacaaaaaacttttcctttaaataactcaaaactttatcaatttgtatagaaattagaaagaaagaaacaagacaaagctaccgagtaacgttcttttcccaccggcatcactctgtgcaatgtagacctaaacccattacaagaaaatacgaaatgtgaagaacgcataaaaaccgcactcacgactaggtaaactggtttaagtttaccgaaacaatccattggtccatctctccatcatatcaccaatgttgactataaacgccctgcggttacagaaagtccccggatttcaacaatcatttctcatcataaactagtagctaagaaaagctagacttaccctttaattccagggacatcttcccaaatgtgtggttgtttcgatttgtctctacaaacctaagagttcagttcaaagacagtgtaagaacataaggttactaatagaagattatgacgagaaattcagagatattgacctgaagtcctggaactccatcagtcaaaagaagagtgaccattccataatctgagtgagctgaggcaccatacgtttcaacatctgacgaaatcacttcacctataatcataacaagtgcagagatcaaaacctgactcaaactcccggaatgtggcttaagtttccactgattacatatgttacgatctaactctgaccaaagttcattaagattaatatcaagccaaccagaactttttgatgtacatagacacacctggatatcgtaagaggcgaacaactgctgtaggatcattcaaggctccaactttttcgaagaagtcctcatctaaatccaatgctaaggcaatcaagccaagcaattttctacccacggaccttaaagcaggaatgcaaacacacaactagcaagttgatccaggaaagtaatatggaaattgcaaataaaagagaggaaatactcatgaaacagcctaatctacttacaatttatgacctgaaaagaatttttcatttgtactaccgatgtacttggctaaaatagactatatttattcctaccatcaaggtttaaatctaactgttgaaatgaacttgaaacctattctcaactgagaatataggtatgaagttttagtttgagattcactttgaagaagaacgacaagagagcaactgcttacaggacattcttgtagtaagtttccatggtttgcctccatgatggcaagatacctttaacatacacataatccgtgaccgtgagagattgaaattaaaacagattaatgaaacagttaggaagaaattaccttcagaaggccattggttagggtaacgttgagctagaacaccttccaaagagccaaaatagaagctttccttggaatcacctaacaaggaaatatcaactttatagactagctcagcaaacaaaaaacaagccacatatgcaaaaaatgcaaacctatggagctcaaggacgggtcaagtttctcagcatacaacggagtataaccgagcaaatcacggcggagtaaagccatcttttcctctaatgggagattaaagaagcctttgctctccttaaaaaccccttccaattaattcttccggatcatgatcctgacatagaagaatccatgttcaagactgccttacatacgtaacaaaagcaaacagttcaccagcaatcatagagacatatctcaaacaaagattgtctatacacaaagacctcctccaaataaataacacagaccataaattgagatactcaaaatcttaaaacgccaattagagcgattcaacaaaaaaaaaaaagataaaccaatcttcgtcaattgatgctacaggtactagttctatcatcatcgtcacttacctatcggcgaaaaaacaagtgaaaatgaaaattgaattccctaaaatcctatcactagtagaagcaggagaagcaatgtttctacactagtagaagcaggagacgaacctgacgaatcaattgagtagtggagattttttccggcgaagaaagatcgatgatcggaagaagaagcgacgtatccatttcgcttctcgtaatagtcactgtttcgaaattgaatttgctctgcctctgatcgttctgactgatatgtgttgaaattctccttgcccgcttaagcctttttaacttccttactttccttaattgataagatcattacatcggaatatatatactacttcagttttgacctaattaagacacaactcaagtccacttaaaacattaactaaactttaccttaactaccgaaacccactgtaattgggctttagacaatttatggcccaatgtcctttttccttctttcttttcgtcttcatcctcttcgttacttcttcttcttcttctctctttgattctcttcttcgttacatccttctgcaactactaaccctctttatactctcacttatttctcttgtgccaggattgatcaaagatgagattccaacaatatggaccatacgacggtgcttgcaattatgaatttggtggaaattaaaatataaaatatttgccaatttagaagtggggtttaatgggctcattcaatctcacatcacagattaagcccacattggtcataagcaataaggcatgaccaaaagctaatcaataaccgtgatttccgattttaatcggacagtttctcaaccgtaaccatataaactggtaaaattttgtaacttttaactataaaaacagttaactgtaaaaataaattagttcggttaaaaaattttttttgtaaatgtatcaaaaccgttagttaactatatggtaaccgaacagttaaccgcactatcaatcgcagttaaaaactttaacaatatcattgtaactgcatataatgcaaaaatatatattgaatgttcagacagagattttcagaaaaataattgataccgtcaatgaaaaaatctacattagaaaacaggtattttctccactaaatatgttgtaatgtatactgctcgaaatgaagaaaattggtttataacatactttttcattttaataaaagtagtattaaaagtaaggtaatttgtaagatctcgcctctaatattaaccgtattgtaatcatcaaataattattatcgtaattaacagtaattattttaccctatatgtagtggtaaggttacgattaaaaattataatcgtaaccgatggttaagcaacagtaactgtaataaacgtaacgtggcaaccctaaataaggtgaatatcatccatatcatcatacgaacaaaatactaaaattgtctggagaactcatatctttgtatatatgtattttcttttgacttttgttacagaaactttttcggagaaaagtgaaatagatgaactaatatctcggcgacaagtgaaaactcaaacctatttacgaacgaacaaaaataatataagataggattgtcgcttaaaatccgcacctcgaaatatgatgtggggagagatgctgctgaatgagcaactcattccaagctacatcgagtactagaccaccaacaatgattactaaaactgcaacaatcaaccccaccaccataataatctgcccaagtttgatcaaagagtcttttaactttgtgtaaatgcatcccaaacctcttcttcttaatgaacattaccatttccataacgtttgcttccctcgcctccagtaatttcaaaggttctttcaacttcttttgtctaatcgactttactatttgctcaacctttaatcccatgccaaaaatcaaccccccttatagagatcaaacgttcttttatcttcttaaaatgcatctcatacctcttctttctaacagactttaccatttggtgaatcttcatttccatgccttcagcaaactcggtatgctcatatccagctttggtccttccggtttccactcttcatatatcttctctgctccttgtacatcatccagcttcaacaaagagtaatcattgttcgatatccattatcaattagctgggaatgttcatacattgatagtggcatttcatcacacttgaggaattcttatgaaaagcaagacaagtcatgaacacactatttgaaatttatacgggatcatagtctacaattaatacatttatcaatcgaaaatacacctaattacattatactgttttaagtgttttatcaccttttggtttataatagctatttcatgtccacgcaaaagtgaaactcaaacatttgacacatgtcttatttagaaaacctggagcttctcagttctcatatattttagtcggaaccggagtacgaggcgagggtttgactgaatcgctcgtggaaataatctctggcccggaccggtggaaacctgaggcaagaaattgacaaatcatctttttttgtttttccaataaaagacaaaaactttctagttatcacaaatcacccccagcatgatggatgaaaacagtcaaactcaaaagtttataacatgagacaaccaaaataacgagtgattacatacttgggaggagatgtctcactacaacagctctccaagcactctacaacgcagtttgggtctggatcgacaaatacagccaccttcaaagtaatcaaaccaataagttaatgtcacgataataaagaggattagtaaaacagagactaattcaaacaaattgtaccgtaccgaaaaacgttcctttcccactgacaccactctatgcaatgttgatcttaaatcaagaagcgatcttgaatcaaaatatcaccttatatatgaaatgtaaactaaaagtaaggaatatttttttcggtaccggaaaagaccattagtccatctttccataaggtcgccgatgttgacaacaaaagtccttacacaaaatttctcaccaagttttaagactttaattaccaatagtgttcaatccacaaagccataatgttttaagcaatttatataaagtatataacttacccctttaataccagcgacatcttcccaaacttttggttctttatctttatctctacaaacctttttagtatacgtaaacattgttataagaagtagaagaaaacaaaagaagacattctcagtttaaaaaagattatgagatgaatacttgaagccctgcaactccatcagttgcaagaagagttatcattccaaaatctgaatgagcagaggcaccacatgtttcttctccagatgaatttgattctcctttaataatgtgacaaagagtaaagtaaacaaactagcagtgggtttttcttttagaacagttttagaacagttgctaaaatgtctctaatcaatccccaaaatgctacaaggtttggtaaaagacctgaataacgtaagagacgaacaaccgctgcttgatcattgaaagctcccacttgttcaaagtagttttcctctaaattcaatgccaaagccactaggccaaacaatttcttaccaacatccctattaagaagcaacaatgacatctttagccttagaagtatctaaggtgctagagtgaccatttagacttaagcatgggggtatgcataagcagaatttcctgctacttacatgacatttttatagtagcattccatggttggcctccaaagcggcaaaagctctgtaaacatccataacacataagttatatatatataatcaacataaacaaaagaaagaactataatttgaaagaaacaatgggtttagaggcctaaatggttttgttactatttgctaaatagggtttatcaccattttcatatatctcactattttcttcaacttcattaagattttgtgattaatttatatgctcttcaattttttcttatatgtcgagtttggttttagttatggggaaatacggttaaaaatttatagctttaataaacttatcatctaaatatatagttttttattttatttcttatatttttgttttttcagtgttatagttcataactttcgagaagtcgttagaattttctaatgttagttttgaatttaaaatgttttggattcaagatagctcataattattttaaaatttttaaaaaattgttgttaatttaacatgagtaagttctttatcttttaaaaattatgatttactgactagatgatcacagaattcctgtttgctctcatctagtccacatagtagagttggcaaagagtttaccttcaagaggccacttgttagggtaaagttgacccaaaactccttctgaagatccaaaagtgaacatctccttggaatcacctgtttgtatgaaaactcaaatgacacattccactttttggaaccaaaacgcaaataattgaaacacatgaatccagtcattggacaaatcaaagcaatttcatgagctattatactatcaagaacctatggaggtggaagatgattcaagtttctcgtcgtataacggtgagtaaccacgaaaaccatgacgagccatcaccatcttctcatcaagaggaagggagaatagtttcttgctctctattaacactccttccatcaactcttccgaaacgccatggttcgtaagatagaagaatccatgatccaagcaagcctaaacaattggatatttaagcatcacaatatcattctaaaacactattatcgacaaccgacatttctacagtaatataagaaccatttactgtttagagtataaataatacaatcaatatcttcgttttgttaccatgaaaaaaaagacaagggggagaagaagaagaacctgacgaatcaatcgggaagtagagagcttctccggcgaagaaagatcgatgatcggaagtttcagagctgttcccattttgttctttttatccctattatatttcatttggatttctctcatctcgcttgtgttttatatttaagccgctgtctgaacttgtcagattatgtgagtacgacgtgttctaatttcatatcttaactttgggcccggattttgatatactgggctttaggcccataaaacttagataatcgtccaagtccacgtcgttatcgttttagctcaaacaatccaatgtgatcaatcctacagtaattaaagataatagttaataataaaaattagacatatataaagcgatttattaacaaaataatgataatagttaatgaataaaatattagaaactcaagacctatgtaaagcagtttaattaggtttcaggacacatattttataagatataataatacgaacttatactcatttaacttgccaaaagaaaaaaaaagtgatcctacattaattaatttagttaagagtcgagacatcatgagtctacaccgttgataactcatgttaaaaaaaaaacagatgtatatttttacttgttactttttaaaaaaaaacattatcttgacgtgttatttggaaaaagaaatactagttaacctaataaattaacttttcgaaaaaaaaaaaaaaaaagagccaaacataccaactggtgtgtcatgtgtgtgtagttttaactagaacgttactatacaagtatgtatagacataaatattcttgtggaattccgactatatattttgatcgatatcatcattgcaataggttttgtttgtccactagtgcgatggacctgatttaaaaaggtttgtacataaatacatattgcgtacgatttcaaattaaacaatgtttagaaaaggaaaaagatcttaggacagtgattccttaattaatggaagatttacataacaaatgcaggtggaccatatatctaattttgatgattccaaggccacagtccacagaagacattgcccaaacacgttttctctttagctttttgcttcatcaacatggtctccatcattggacctctcctccttctatcacattattaagtattagtacattcaatactacatcttaattaatccaatcatttccatttcaaagatttgaaaagaaaaaactttaatagaaatcaccatttcataaaattttgtataagagggtacgattcattataaatttacaatataagagggtacactattagttcttctcttttaatgatcgtaccgatcacgcattgtctctgtccgtgcaattttatttaaacactaacagattacctttttatacacactagtgattattgtatatgtagagtactatatactgatttttgccctactcatactaattttaatttagccactgattccaaaagatgggggaaaaatagcttaaaagactctagaaaaattactttcagaatataatataaatttcatatagtttatacagtatgtgtgtatttttctatatattatgagcaatcagtatataagtttgtgggggacaacttccatcattttaagtaaaagacaacttccatcatttgattcattgcaaatctcgactgattattgaattggtcgcaccaccttatataacatactcctacataaatcaactaatcccaccatattatttgggaaatacattttaaatgtaaccttattttttataagtaattacataggtatgccattagaaataaaatttaaatagtaaattaattcatctctttaaaaattaaaaagtcaaatactaatttaattaaaaaacgaaatacattattaattccaaaaaagtaaccaattaaaatccacaaattagatttgatatctaaattatcatatttaattttttattaattattatagttcagctctcatctttatatgattctatttttgcgaaaaaataatatcatcgttataaaagaataattagagtttttttgcatatgccataatttgaatttttaaaaacgaatataaattgttcaattcatgaaaaaatattataacgagtcaaaaatagatttaagaaaagtttctactaagtagtgggtcataatttgaatatttgtattcaatttcatatatattattttaaaaatttataatcttatatactacaataattaataacacattagatttttttatgtgtatgatgtgattcaatttttaatacaagctggaaaatcctaggattgacgggtttaaatcgatattaatacaagatggtatattacaggtgaaactctaaaattaacaatcaaaatacaattgtataattttaaacactaaacaatataaataatatcaaaaaaaacacatacaactcgcagtttactatacatttaaaattaaataaaataatatcatatatttataatcatctttacaataaaagtttttagtttaactaaaatataagcctacatgcggtatgatttactacccaatagtataattctaaatattcgggtctggttcgggtaggatccagttgggtttgtattagtttggataaaaagtttcagaccctaaaaataccccaaaaaaatagagacgggaattttatatgtagatagcggatctccaaacaaaaaaaacttttaaatttgttaagttttaataaatttaattatatttgaatatattttactaaattttgacaaacataacaaataatttttgaatagtttagttgttttggatatttaggtccaaaattaattgacatatttagatttataattataatcttagataattagataatattacgattaaatataattaatattttagatattaaattaatgtttgggtttttgaatactctttttgggtaacgggtaatttccggaccaatcggatatccacgggtttactaaaactctacccaataaggaaatttcctaaaattttaacccgccctaacctggttttttggttcggatattgggttggttatcgggtccgttttttcgtcagccctatcaaagataatctaatatatgccccaattagatctacaaatataaccaaaatactatacaaagactaattctaagttaggccaaaaattagatcctctaatacaaaggaaacatgtttcttaccaaaacaatttgtatacaaattttacacattaacttaaaactacatatgttgtatttattataaaaataacattttttaaacaaagtctaatcccaatacagtattatatgcaaatagtaaaaatatttaaaaaatatttatgacatttatattttatactatactatttcttatgtaattcaaacacaatatacaatttaatttatacacaatatttatatacggattatgatctagcaaatgtttatttggctaacactcaataattgaggtatttataaaaagagggcatgtaaaggcatataataaagtaaagagatcctctttagtatttcatgaacgagggttgcacgtgtgggacagcttttagcatagattaagaacaagtgattgtgggatctaatgaagccaatgattattgccgtttttgatttagcggttaagcgccagtgccagctcagctagtcacatggcggagacacgagggaccagtccccgaaccagaacccattccctaagcacgctttgtttattaaatttaggatttttttgttttggaaatacacgtagccacacgtgcgagggattctgtcatcaatggacgatgtcacggtggtggttctccagctttcgttggacggctatgactctaggggactttcagtgatcatcgtataatccaaccaaacaaaattgttaaatttaaagtgggaatataaatattttattttggctcatcaaaatatataagtactacttaatttatatcaccaactaaaataattgttattaaatatgacgttaaacgaactaaaatatgttaaataagaaattgaatttatttttaccatattttaaatactacatatatttgttttcatattgatgtaagaaatataagattgcattaatttgctcaagaaagtactatcacaaaacatataaatatcaaaatcttcaaaatatgtccacggtatttcaaaaactattttcagtaaaaaatgaaaataaaaagctaaaaaataacagtaaatttgctgatcaaaatcttatttttaggatgtgttggcagaaacatgaaaattacgatatatttttatttaatccacacgaaaaagttatttactataaagttaaaaacaatttttaaaacttcttccttcaatttatttgtactctagaaaataaaatttgttgcaaaataagtaatgttcacattatttaatgcaaaaacttattacttttatttcttttgactatttatttgtattctgtattggttgcatatattattttaaaatagaaattatgttttaatataaaaaagataaataattgacaaactctatgtaattttttaatgtgtgtacaaaacccttaaaccacaattaaattgaaacaggtgggatagtaaattgtatgcatattacatgacataaatggcagtgatatatcaatcaattttaaaaaattctataaaagctcgaaaaaattaaatgaagtgaaaaaagaatctccaaactttttttgtcgaaaatataaaaaggatatttaacattaacatatagcgcactgcgcaccatgtgtagacatgcgataacaagtattttgctacttgtgagttgtaaccggtaaaaacaatcactatagatcaataccaatgatctgataaagtccgaaatgggaagtcgtcgaatttttgggagattttgacagttgaggaggtgaagccttatggagcaaacaaggacacacgtgtgcttcgctgtcttatgattctgaatcgagtatggaacttcgagctccacgtcccttccacgtgaagatggtaatggtcgaaccaacttgcctttagttttcgatcccttcctgtctttttcacaataatgtcttttcttatgcatatgatttaacgttgtttgtctttttaaagttgtcgtggtttgcacatatgattatttataaaaggaataatattatattagcaatacccgttttaaattattccaaatttccaatactcttctttttgggtccaacattcgaataccctagctatgcaaaaacaaattatttcacgtatcccacaacttgttttccggagatcaataaagaaccgaccgatggaaaagagaaaacatttttgtgatagaagaaccactcgaagttacattaaaacactaaatataacttaaagtatctagggtttggcacattttgtggtcttttgcaagattctaagtgactcgtaggttcatcgtgattagcatctttattgacgagatggggtgtcaaatgctctcatgtcgattggcttggggacatcctagaggtgtcgtaattaataagttaaaatcaatatgtgtgtgtgttttttcctgtttaaccacttttaattttcctaactcactttattttgacaaaactattaaacatacattttgtttttgtcttttgtacctagatgttaaaattttatttcacatattccatagtgtgtagaagtagattttgaagtagattttgttaatatataaataactgtactcaacaaatcacagtatcaagtaaatagcaaagctacttctacactctacggcatatgtgattttttttttttttttttttggcatatgtgatttaatattactgtattaagtaaataactattttccagtgcaagtcttggtgtcgtatgagatctataatgtaatcgttaacaaagaggggatatttgatcataataatggtccgtcgatgtcctcctaagttggtaaatcgtaactgccagttttcaccagactctctattctttagaaaacagaaaaaagtaaatgatttaggaggttactctcttttttactatgtacttattatcttgggttcttttggcgtcgtcgttatttacttttctatggagtactaccgagtacaaataattggagaggagtcatgcatgattattgattagagaatgaagaaattaaaacccaaaactggaagtccaaatcagacaaaagcacctgtggcccacaaaacaattgaggacgatattacgtgaaggacaaatggtcatttgacggacacacctttcttttgttagacgcagtcccgttcgtggtagggtcagatccacgtgaagttcacatgctttccatgcaccgtttgggtcatcctgttggtcccgctttattaactagtctatttcctctattaggaaaattcaattttcgaaacaaaaatcaatcaaaacatgtataaacaaactgataaaaaaccacacaaaaaatatggtgcttttctgagggtatatatattttttgttttcgtctgatcttatattttaaatttggattttatattcaaattttttgtatattttgtggtcataaattgtccaagataacaattcgtgaccaaaaaaaatatatgtgattattttacagaaaacaaataattaccaaaaaaaaaatcatatcttccaaataaaatgtaagagaaaataagaagattatatatgtgagaactttatgagctaaataaaatgaagaaaagtcatagtttagccgcgtaggaaatcattcagaattcagaaatatggctcctcgctaatatttttcttttaaaggtaattgtttttcaacctaatttgagagcaatgtatatcgataggtttcacattagcttatttcgctcacatacatgattgtgcaaaaaaacagaaacgatcgttaactaattatctaagaaagtgacatttcaaaaaggctcatttcaatatagagttgccttcttcatgacatgaccttgatatgataaattccctaatgtaatgaatcaataaaacgaacttatagaacggtagaaattacgtacgtgaggatttatatcatctattaattaattaattgacaacaaaaacagaaggggtagtgttcacgtgcatgtcacgcgggtaatggtgtggacacacgagcctcgtacggtgtaaagaaggagaacagagagagtcgcacgagccgcacgtgggatgttgacttgtcgattagcttaaggggtatgtccatatactaatgattaagtacagtcgaatgaaaacatgccacgagccctagatctacatgtttattgtggttttttttttactcagtcacatccacatgattaatattggtccctgatattcatcttatatatttcacaagtataacaatcacccaaacattagtttttcttaaattgttttacggtgaaatgtttcactgtttcctctatgaataattaactagtggagtggaatttattcatttatcatatccacataattcatctttattttcatttgtgcatataatatatatcctttaactttctcatgcttaccatttaggctttttgtcttcctcaaccttcttaaactttaatatcccccttaaaaacagatgaaaatagtctttcctcctatgaattttcccaatcactttacaaattattaaaggtcttccaattaacctggtttcctaataatgttgagtgtaatcctttcacaagcttttcttaagaaaatgaaaaacaatcatatatgtacaatactagagatatataatgagtcatgactcatattaatcgcggtttttgtaatatcataaagctttctactttaggcttgacagtgatttaatacagtaacatatcacataaatatgagaaatggaggctctttaattaggcctttacaatatacatatatattagaaatagaaagaaaagaaaaaaatcgaccgacaacaagattggtgaagaaacgcaataattgaaccattaagtacagtctaatacccgcagaaaatattacaccacctactcttagtggcaatgctgtactttaacatattgtcgagacaaggagaccaggttgcgtgaaatcatgtagatgatgatgcataaacaatcaccaaagttcaccctatgaatccaagcccttctagcttagtggctatgatcatagccgacatctcatacagtcacattccatttcggagtaaatcatgcgatgaacaaaatttagcttgttctcattacaagataacaaattggatactatatatcaaaaaattgtgagtgttaggatttggatcaaatctaactattagagaacgataatataaaaaacatacatgatttgaagtagtttactataattttgatagatttagaatttggaaatagagaacgattatagattttgctagtagaatttggaaaaagaaatgctattaaaaaacagaatatattctttttgtttaacattttattaatataacaaaccaaaatatagtttccgatattggccagaatatcgtcgggctacaaaaccggaaatagacattacggataaagcttaatccgtattttcactctatttcgcgtttaatactttgtttgtttactattaagatcaccatactatataacaaacaaacaaaaaaggtcacacaactacaataaaatgctaacaagccgaaagtgtacggcagcagtgtgtaatcgaataagtatcattaaagaaggccatgctcgattcattactctataccattccttaatatattagtattacatgggcaacaacgaaacaggataaaaaagagagagtgatcagtgatgatggatggtcatggagtttgctgtttttagggaagaacaagaagtatcgtatgattgtcaagacttcttctgtcggcgcgtgacccgacaaatcgacacgcgcgtgtgtgtgagtcacgtggttcgacgtctctcactggctcataatatcatattgggtccacgtgagtttcttctttacctttttttcttttcttttttttctctcctttttttttcaaagaacccaaaaaatcagtatattactacttgatatcttatgttttatatttataaagttttacccttggtcataaaatgtctcaataattttctgcatcctcacgtgaagtccacttctatttaaaaaaaatatagacaaaagtttttaaagtaaatttaagtaaactaataagatctacgaattgtgaaggtttatagaattaaatctcaaaattaatttataatcttttggataatttatactttatttaatagagttacatcggagttttcttcgaatatgatataaaacttctaacaatatttctatataaattttgcaattttaaactaccaacttcataataataaagtatcggaagatacatcttttcctaataatttaacaaaacaaagtttactcaaatctcaactacacacgttttcgaatttaacattgcgtatcaaattcgtcgaatcgtcaactaattctagagtaaacaagatcattggcaatactcttaaggaaaaatggatccatttgattatgttacaagtgataagagttttgaactcgttttgtgtcaaatgttccggtctccaatatgtaaaagtggaaggtttctcatgcttctcttttgtttgttccaatcttcttcctagtattgccatggaaaacatcaaccatatcgtcaaaatgacccgttaaataactaaatattgtaaaaactatttttaagttttcctttcatttcatggtaacaaatatatattttccagttatttctgtttaaagaaagtttcatttgagatctgattggtgggaaatagaagaaaaaaaactcaatctgattttaaacctttaaaagcataattcggttgatttttattttattttattctgattgatagaaactggaaagtaagatgaattggacattaaaaaaaaaaaaaatccctttaaatttgagctaattatagcaactagtcagatccttcttttttttctttgaacagaaaaagaatcgccaaaaaaagaaaaagatgtacttatttagcgaaaatatttttcgtagtaaaaaaacttctttcaatatctttgcttgaatgtgaccatttctattgcacatacaaaaaaacgactataaaaaggacccacagtgattatgaaaatcagattgacgaaaagtttgtgtgtctgattccaatcatattgatccaattcattcatcatattcgatggttgtcaaagcatatagctggattaagtggggcacaacactgaaaacgtttctcaaccgtatgatgtcatttcagcctttggttttctcaacgtttaatcggtgaccgtcaatttcttttcaatctctataatcatttcttcttttggcgtgtcactgggaccttcactgtcaatgctgaattaatctcctttaaggatttgaaggcaagaaaaatcttgttgcaactaataaaaggaatcgattttgatgctcattaatcgacctttatgaccaaaatgggtctatatgaaataattatatgatttgacaagtaaccatttgatttacaaattattcaacgatttagcattacaaaaacatctaaccatgcttaatgtatgatgttattcattttaaaaagtcgaatgaaacccatgtttatctcaatgcatgatttaataattttattatacatgcacataattctacatttttaattaattttattagtttaataataataattaattttctttttttacacttgttataggtgagaaatgaaagttatcataatacaaaacatcagtttttataaaaccaaataaaactcaaaaatcattcagacaaataagtttatggacttatggtatatgatgatactctctcaacatcctcattaacatcatcactattaagttaacaaaaagaaaaagaaaacatcattataagttattaataagtttaaatagtagtattttatattctggtacaatgtactgtttttggtcattaagtggttcaacgacaaaagtaaaactcatgcggtcgacccatgcgttagaagaagaaaatctgaaaagaagtttgaattctttaattttttcataaaaagaagtttgaattcaattcaaccgtttttgtttagttcttctttaattaactttatcactaatgtttaaaagtaaaaggtttttaaagtgtgcaacaagcgtgactctttggcctttagagtcatcaagaagggtaatcattttttttactctttctcgacaatagcaatcaaattatcattcccacttttaataatctcataaaataaagtcaatcatagttaaaatttgataaattccatggaaatgataaaaatttgattttactattgttggatgtgcaattgttcatggtaacttactaatttatatgctttattagttgcagatagtgatatatatcgaaaaatgaaagatctaattccaataattgtcaaagaggatttctaaatttctgtttgactaggtcatatattctcacgactcaacgatctaaccaatcacctacaacagaaaatttggttgaaataaaacgaaaagtgataagtccaaatgtttaaaacaaaaaaaaagtaaacaaaaggcaaaataagataactacgattagattttgttctcgccttatgaatatcctaaaaattatctattagtgatagtttgataatcatctttgactgagaaaattgatgtcacataaacattaatatagtatcaacattaatcattaatgatgcgactataattattattttatcacaatttcttagatttgataatttgtttaggtttgagagagttatatagagggggacaaagaagcaaagtttgtgattataaaattatttccattgaactaaagttttcaatagtttattcttgactttaataataataactattttgcccccagctagtcacatactcatgattgcaaaatctctctctctctctgcctctctatatattaacctttcttcttcctttactttctcatcttctatctctcaaaagaaaagcagacaactttatttgcaaaaacagagtttttttttcttatcttgagaaagttcaacagaag

SEQ ID NO: 587 - DNA, 201471 bp, Arabidopsis thaliana
tttgttctttttatccctattatatttcatttggatttctctcatctcgcttgtgttttatatttaagccgctgtctgaacttgtcagattatgtgagtacgacgtgttctaatttcatatcttaactttgggcccggattttgatatactgggctttaggcccataaaacttagataatcgtccaagtccacgtcgttatcgttttagctcaaacaatccaatgtgatcaatcctacagtaattaaagataatagttaataataaaaattagacatatataaagcgatttattaacaaaataatgataatagttaatgaataaaatattagaaactcaagacctatgtaaagcagtttaattaggtttcaggacacatattttataagatataataatacgaacttatactcatttaacttgccaaaagaaaaaaaaagtgatcctacattaattaatttagttaagagtcgagacatcatgagtctacaccgttgataactcatgttaaaaaaaaaacagatgtatatttttacttgttactttttaaaaaaaaacattatcttgacgtgttatttggaaaaagaaatactagttaacctaataaattaacttttcgaaaaaaaaaaaaaaaaagagccaaacataccaactggtgtgtcatgtgtgtgtagttttaactagaacgttactatacaagtatgtatagacataaatattcttgtggaattccgactatatattttgatcgatatcatcattgcaataggttttgtttgtccactagtgcgatggacctgatttaaaaaggtttgtacataaatacatattgcgtacgatttcaaattaaacaatgtttagaaaaggaaaaagatcttaggacagtgattccttaattaatggaagatttacataacaaatgcaggtggaccatatatctaattttgatgattccaaggccacagtccacagaagacattgcccaaacacgttttctctttagctttttgcttcatcaacatggtctccatcattggacctctcctccttctatcacattattaagtattagtacattcaatactacatcttaattaatccaatcatttccatttcaaagatttgaaaagaaaaaactttaatagaaatcaccatttcataaaattttgtataagagggtacgattcattataaatttacaatataagagggtacactattagttcttctcttttaatgatcgtaccgatcacgcattgtctctgtccgtgcaattttatttaaacactaacagattacctttttatacacactagtgattattgtatatgtagagtactatatactgatttttgccctactcatactaattttaatttagccactgattccaaaagatgggggaaaaatagcttaaaagactctagaaaaattactttcagaatataatataaatttcatatagtttatacagtatgtgtgtatttttctatatattatgagcaatcagtatataagtttgtgggggacaacttccatcattttaagtaaaagacaacttccatcatttgattcattgcaaatctcgactgattattgaattggtcgcaccaccttatataacatactcctacataaatcaactaatcccaccatattatttgggaaatacattttaaatgtaaccttattttttataagtaattacataggtatgccattagaaataaaatttaaatagtaaattaattcatctctttaaaaattaaaaagtcaaatactaatttaattaaaaaacgaaatacattattaattccaaaaaagtaaccaattaaaatccacaaattagatttgatatctaaattatcatatttaattttttattaattattatagttcagctctcatctttatatgattctatttttgcgaaaaaataatatcatcgttataaaagaataattagagtttttttgcatatgccataatttgaatttttaaaaacgaatataaattgttcaattcatgaaaaaatattataacgagtcaaaaatagatttaagaaaagtttctactaagtagtgggtcataatttgaatatttgtattcaatttcatatatattattttaaaaatttataatcttatatactacaataattaataacacattagatttttttatgtgtatgatgtgattcaatttttaatacaagctggaaaatcctaggattgacgggtttaaatcgatattaatacaagatggtatattacaggtgaaactctaaaattaacaatcaaaatacaattgtataattttaaacactaaacaatataaataatatcaaaaaaaacacatacaactcgcagtttactatacatttaaaattaaataaaataatatcatatatttataatcatctttacaataaaagtttttagtttaactaaaatataagcctacatgcggtatgatttactacccaatagtataattctaaatattcgggtctggttcgggtaggatccagttgggtttgtattagtttggataaaaagtttcagaccctaaaaataccccaaaaaaatagagacgggaattttatatgtagatagcggatctccaaacaaaaaaaacttttaaatttgttaagttttaataaatttaattatatttgaatatattttactaaattttgacaaacataacaaataatttttgaatagtttagttgttttggatatttaggtccaaaattaattgacatatttagatttataattataatcttagataattagataatattacgattaaatataattaatattttagatattaaattaatgtttgggtttttgaatactctttttgggtaacgggtaatttccggaccaatcggatatccacgggtttactaaaactctacccaataaggaaatttcctaaaattttaacccgccctaacctggttttttggttcggatattgggttggttatcgggtccgttttttcgtcagccctatcaaagataatctaatatatgccccaattagatctacaaatataaccaaaatactatacaaagactaattctaagttaggccaaaaattagatcctctaatacaaaggaaacatgtttcttaccaaaacaatttgtatacaaattttacacattaacttaaaactacatatgttgtatttattataaaaataacattttttaaacaaagtctaatcccaatacagtattatatgcaaatagtaaaaatatttaaaaaatatttatgacatttatattttatactatactatttcttatgtaattcaaacacaatatacaatttaatttatacacaatatttatatacggattatgatctagcaaatgtttatttggctaacactcaataattgaggtatttataaaaagagggcatgtaaaggcatataataaagtaaagagatcctctttagtatttcatgaacgagggttgcacgtgtgggacagcttttagcatagattaagaacaagtgattgtgggatctaatgaagccaatgattattgccgtttttgatttagcggttaagcgccagtgccagctcagctagtcacatggcggagacacgagggaccagtccccgaaccagaacccattccctaagcacgctttgtttattaaatttaggatttttttgttttggaaatacacgtagccacacgtgcgagggattctgtcatcaatggacgatgtcacggtggtggttctccagctttcgttggacggctatgactctaggggactttcagtgatcatcgtataatccaaccaaacaaaattgttaaatttaaagtgggaatataaatattttattttggctcatcaaaatatataagtactacttaatttatatcaccaactaaaataattgttattaaatatgacgttaaacgaactaaaatatgttaaataagaaattgaatttatttttaccatattttaaatactacatatatttgttttcatattgatgtaagaaatataagattgcattaatttgctcaagaaagtactatcacaaaacatataaatatcaaaatcttcaaaatatgtccacggtatttcaaaaactattttcagtaaaaaatgaaaataaaaagctaaaaaataacagtaaatttgctgatcaaaatcttatttttaggatgtgttggcagaaacatgaaaattacgatatatttttatttaatccacacgaaaaagttatttactataaagttaaaaacaatttttaaaacttcttccttcaatttatttgtactctagaaaataaaatttgttgcaaaataagtaatgttcacattatttaatgcaaaaacttattacttttatttcttttgactatttatttgtattctgtattggttgcatatattattttaaaatagaaattatgttttaatataaaaaagataaataattgacaaactctatgtaattttttaatgtgtgtacaaaacccttaaaccacaattaaattgaaacaggtgggatagtaaattgtatgcatattacatgacataaatggcagtgatatatcaatcaattttaaaaaattctataaaagctcgaaaaaattaaatgaagtgaaaaaagaatctccaaactttttttgtcgaaaatataaaaaggatatttaacattaacatatagcgcactgcgcaccatgtgtagacatgcgataacaagtattttgctacttgtgagttgtaaccggtaaaaacaatcactatagatcaataccaatgatctgataaagtccgaaatgggaagtcgtcgaatttttgggagattttgacagttgaggaggtgaagccttatggagcaaacaaggacacacgtgtgcttcgctgtcttatgattctgaatcgagtatggaacttcgagctccacgtcccttccacgtgaagatggtaatggtcgaaccaacttgcctttagttttcgatcccttcctgtctttttcacaataatgtcttttcttatgcatatgatttaacgttgtttgtctttttaaagttgtcgtggtttgcacatatgattatttataaaaggaataatattatattagcaatacccgttttaaattattccaaatttccaatactcttctttttgggtccaacattcgaataccctagctatgcaaaaacaaattatttcacgtatcccacaacttgttttccggagatcaataaagaaccgaccgatggaaaagagaaaacatttttgtgatagaagaaccactcgaagttacattaaaacactaaatataacttaaagtatctagggtttggcacattttgtggtcttttgcaagattctaagtgactcgtaggttcatcgtgattagcatctttattgacgagatggggtgtcaaatgctctcatgtcgattggcttggggacatcctagaggtgtcgtaattaataagttaaaatcaatatgtgtgtgtgttttttcctgtttaaccacttttaattttcctaactcactttattttgacaaaactattaaacatacattttgtttttgtcttttgtacctagatgttaaaattttatttcacatattccatagtgtgtagaagtagattttgaagtagattttgttaatatataaataactgtactcaacaaatcacagtatcaagtaaatagcaaagctacttctacactctacggcatatgtgattttttttttttttttttttggcatatgtgatttaatattactgtattaagtaaataactattttccagtgcaagtcttggtgtcgtatgagatctataatgtaatcgttaacaaagaggggatatttgatcataataatggtccgtcgatgtcctcctaagttggtaaatcgtaactgccagttttcaccagactctctattctttagaaaacagaaaaaagtaaatgatttaggaggttactctcttttttactatgtacttattatcttgggttcttttggcgtcgtcgttatttacttttctatggagtactaccgagtacaaataattggagaggagtcatgcatgattattgattagagaatgaagaaattaaaacccaaaactggaagtccaaatcagacaaaagcacctgtggcccacaaaacaattgaggacgatattacgtgaaggacaaatggtcatttgacggacacacctttcttttgttagacgcagtcccgttcgtggtagggtcagatccacgtgaagttcacatgctttccatgcaccgtttgggtcatcctgttggtcccgctttattaactagtctatttcctctattaggaaaattcaattttcgaaacaaaaatcaatcaaaacatgtataaacaaactgataaaaaaccacacaaaaaatatggtgcttttctgagggtatatatattttttgttttcgtctgatcttatattttaaatttggattttatattcaaattttttgtatattttgtggtcataaattgtccaagataacaattcgtgaccaaaaaaaatatatgtgattattttacagaaaacaaataattaccaaaaaaaaaatcatatcttccaaataaaatgtaagagaaaataagaagattatatatgtgagaactttatgagctaaataaaatgaagaaaagtcatagtttagccgcgtaggaaatcattcagaattcagaaatatggctcctcgctaatatttttcttttaaaggtaattgtttttcaacctaatttgagagcaatgtatatcgataggtttcacattagcttatttcgctcacatacatgattgtgcaaaaaaacagaaacgatcgttaactaattatctaagaaagtgacatttcaaaaaggctcatttcaatatagagttgccttcttcatgacatgaccttgatatgataaattccctaatgtaatgaatcaataaaacgaacttatagaacggtagaaattacgtacgtgaggatttatatcatctattaattaattaattgacaacaaaaacagaaggggtagtgttcacgtgcatgtcacgcgggtaatggtgtggacacacgagcctcgtacggtgtaaagaaggagaacagagagagtcgcacgagccgcacgtgggatgttgacttgtcgattagcttaaggggtatgtccatatactaatgattaagtacagtcgaatgaaaacatgccacgagccctagatctacatgtttattgtggttttttttttactcagtcacatccacatgattaatattggtccctgatattcatcttatatatttcacaagtataacaatcacccaaacattagtttttcttaaattgttttacggtgaaatgtttcactgtttcctctatgaataattaactagtggagtggaatttattcatttatcatatccacataattcatctttattttcatttgtgcatataatatatatcctttaactttctcatgcttaccatttaggctttttgtcttcctcaaccttcttaaactttaatatcccccttaaaaacagatgaaaatagtctttcctcctatgaattttcccaatcactttacaaattattaaaggtcttccaattaacctggtttcctaataatgttgagtgtaatcctttcacaagcttttcttaagaaaatgaaaaacaatcatatatgtacaatactagagatatataatgagtcatgactcatattaatcgcggtttttgtaatatcataaagctttctactttaggcttgacagtgatttaatacagtaacatatcacataaatatgagaaatggaggctctttaattaggcctttacaatatacatatatattagaaatagaaagaaaagaaaaaaatcgaccgacaacaagattggtgaagaaacgcaataattgaaccattaagtacagtctaatacccgcagaaaatattacaccacctactcttagtggcaatgctgtactttaacatattgtcgagacaaggagaccaggttgcgtgaaatcatgtagatgatgatgcataaacaatcaccaaagttcaccctatgaatccaagcccttctagcttagtggctatgatcatagccgacatctcatacagtcacattccatttcggagtaaatcatgcgatgaacaaaatttagcttgttctcattacaagataacaaattggatactatatatcaaaaaattgtgagtgttaggatttggatcaaatctaactattagagaacgataatataaaaaacatacatgatttgaagtagtttactataattttgatagatttagaatttggaaatagagaacgattatagattttgctagtagaatttggaaaaagaaatgctattaaaaaacagaatatattctttttgtttaacattttattaatataacaaaccaaaatatagtttccgatattggccagaatatcgtcgggctacaaaaccggaaatagacattacggataaagcttaatccgtattttcactctatttcgcgtttaatactttgtttgtttactattaagatcaccatactatataacaaacaaacaaaaaaggtcacacaactacaataaaatgctaacaagccgaaagtgtacggcagcagtgtgtaatcgaataagtatcattaaagaaggccatgctcgattcattactctataccattccttaatatattagtattacatgggcaacaacgaaacaggataaaaaagagagagtgatcagtgatgatggatggtcatggagtttgctgtttttagggaagaacaagaagtatcgtatgattgtcaagacttcttctgtcggcgcgtgacccgacaaatcgacacgcgcgtgtgtgtgagtcacgtggttcgacgtctctcactggctcataatatcatattgggtccacgtgagtttcttctttacctttttttcttttcttttttttctctcctttttttttcaaagaacccaaaaaatcagtatattactacttgatatcttatgttttatatttataaagttttacccttggtcataaaatgtctcaataattttctgcatcctcacgtgaagtccacttctatttaaaaaaaatatagacaaaagtttttaaagtaaatttaagtaaactaataagatctacgaattgtgaaggtttatagaattaaatctcaaaattaatttataatcttttggataatttatactttatttaatagagttacatcggagttttcttcgaatatgatataaaacttctaacaatatttctatataaattttgcaattttaaactaccaacttcataataataaagtatcggaagatacatcttttcctaataatttaacaaaacaaagtttactcaaatctcaactacacacgttttcgaatttaacattgcgtatcaaattcgtcgaatcgtcaactaattctagagtaaacaagatcattggcaatactcttaaggaaaaatggatccatttgattatgttacaagtgataagagttttgaactcgttttgtgtcaaatgttccggtctccaatatgtaaaagtggaaggtttctcatgcttctcttttgtttgttccaatcttcttcctagtattgccatggaaaacatcaaccatatcgtcaaaatgacccgttaaataactaaatattgtaaaaactatttttaagttttcctttcatttcatggtaacaaatatatattttccagttatttctgtttaaagaaagtttcatttgagatctgattggtgggaaatagaagaaaaaaaactcaatctgattttaaacctttaaaagcataattcggttgatttttattttattttattctgattgatagaaactggaaagtaagatgaattggacattaaaaaaaaaaaaaatccctttaaatttgagctaattatagcaactagtcagatccttcttttttttctttgaacagaaaaagaatcgccaaaaaaagaaaaagatgtacttatttagcgaaaatatttttcgtagtaaaaaaacttctttcaatatctttgcttgaatgtgaccatttctattgcacatacaaaaaaacgactataaaaaggacccacagtgattatgaaaatcagattgacgaaaagtttgtgtgtctgattccaatcatattgatccaattcattcatcatattcgatggttgtcaaagcatatagctggattaagtggggcacaacactgaaaacgtttctcaaccgtatgatgtcatttcagcctttggttttctcaacgtttaatcggtgaccgtcaatttcttttcaatctctataatcatttcttcttttggcgtgtcactgggaccttcactgtcaatgctgaattaatctcctttaaggatttgaaggcaagaaaaatcttgttgcaactaataaaaggaatcgattttgatgctcattaatcgacctttatgaccaaaatgggtctatatgaaataattatatgatttgacaagtaaccatttgatttacaaattattcaacgatttagcattacaaaaacatctaaccatgcttaatgtatgatgttattcattttaaaaagtcgaatgaaacccatgtttatctcaatgcatgatttaataattttattatacatgcacataattctacatttttaattaattttattagtttaataataataattaattttctttttttacacttgttataggtgagaaatgaaagttatcataatacaaaacatcagtttttataaaaccaaataaaactcaaaaatcattcagacaaataagtttatggacttatggtatatgatgatactctctcaacatcctcattaacatcatcactattaagttaacaaaaagaaaaagaaaacatcattataagttattaataagtttaaatagtagtattttatattctggtacaatgtactgtttttggtcattaagtggttcaacgacaaaagtaaaactcatgcggtcgacccatgcgttagaagaagaaaatctgaaaagaagtttgaattctttaattttttcataaaaagaagtttgaattcaattcaaccgtttttgtttagttcttctttaattaactttatcactaatgtttaaaagtaaaaggtttttaaagtgtgcaacaagcgtgactctttggcctttagagtcatcaagaagggtaatcattttttttactctttctcgacaatagcaatcaaattatcattcccacttttaataatctcataaaataaagtcaatcatagttaaaatttgataaattccatggaaatgataaaaatttgattttactattgttggatgtgcaattgttcatggtaacttactaatttatatgctttattagttgcagatagtgatatatatcgaaaaatgaaagatctaattccaataattgtcaaagaggatttctaaatttctgtttgactaggtcatatattctcacgactcaacgatctaaccaatcacctacaacagaaaatttggttgaaataaaacgaaaagtgataagtccaaatgtttaaaacaaaaaaaaagtaaacaaaaggcaaaataagataactacgattagattttgttctcgccttatgaatatcctaaaaattatctattagtgatagtttgataatcatctttgactgagaaaattgatgtcacataaacattaatatagtatcaacattaatcattaatgatgcgactataattattattttatcacaatttcttagatttgataatttgtttaggtttgagagagttatatagagggggacaaagaagcaaagtttgtgattataaaattatttccattgaactaaagttttcaatagtttattcttgactttaataataataactattttgcccccagctagtcacatactcatgattgcaaaatctctctctctctctgcctctctatatattaacctttcttcttcctttactttctcatcttctatctctcaaaagaaaagcagacaactttatttgcaaaaacagagtttttttttcttatcttgagaaagttcaacagaagatgatgttcgagaaagacgatctgggtctaagcttaggcttgaattttccaaagaaacagatcaatctcaaatcaaatccatctgtttctgttactccttcttcttcttcttttggattattcagaagatcttcatggaacgagagttttacttcttcaggtacttcatcgctttcttcgttcctctgtttttttttatttttccccggaaaaaaccttaaaggtctcaccttttactctacttttcaatcttatgcatgcagttccaaactcagattcgtcacaaaaagaaacaagaactttcatccgaggaatcgacgtgaacagaccaccgtctacagcggaatacggcgacgaagacgctggagtatcttcacctaacagtacagtctcaagctctacagggaaaagaagcgagagagaagaagacacagatccacaaggctcaagaggaatcagtgacgatgaagatggtgataactccaggaaaaagcttagactttccaaagatcaatctgctattcttgaagagaccttcaaagatcacagtactctcaatccggtaatttttttcttcttttacttattgtttcacccgagaaagtttggttttactgggaaaattaatggctatgataaattgtggaaacgaaaaaagaacgcgttaatgaaatattcacattaaaatgactattgttacatgttgaccaaagaaaaaacattactactactatttgtttcggtctctcataaatgcagatattaatttataaatggcattttggtaaatgtagactgatatcaaggtttttttcaactttttttcacagaagcagaagcaagcattggctaaacaattagggttacgagcaagacaagtggaagtttggtttcagaacagacgagcaaggtaaataaaacacacacaaacaaaagatctctctatttgcctgatttatctattttcttataagggtattttggtaaatgtttaacagaacaaagctgaagcaaacggaggtagactgcgagttcttacggagatgctgcgagaatctaacggaagagaaccgtcggctacaaaaagaagtaacggaattgagagcacttaagctctctcctcagttctacatgcacatgagcccacccactactttgaccatgtgcccttcatgtgaacacgtgtcggtcccgccaccacaacctcaggctgctacgtcagcgcaccaccggtcgttgccggtcaatgcgtgggctcctgcgacgaggatatctcacggcttgacttttgacgctcttcgtcctaggtcctaagtctttttacttgcaaccaaagggcattttggtcgttttttaagtttcatggaccagatatgcatgtagttgttaacatgtatgtattttcttagaaagaaagaaaaacagattaatatttttctagcttaaaccaacatatatgtgtcatgctaacaagtaacaacaaatatttagagccaatgctatcagatattatgactttgaaatcattttgttttgttttgttgcaataaatattttggacaaaactatcacaagaaactttattgcaataatatttatagtgtctagcgagtagccacaaaccaagaagtacaattgatgtaggaaatgcaaaagaaaattaaatggtccaaattgtttcatgtggctatgtgaaaaatattaaatagtgggctaaaaatagttgaaatttctaaaagtttttccaggattttttttttttttttttttgttaaacttaaaaacttaaaacttatactttgggcccaagtgttcctggcattaccattacaactataagtgagaaagagattaccatatgtcatacatgagtatgggcaaagtttaggccttattgaacatgtaggttaggctatgggccacttcttgggtttgaaaggttaacgcaagtgcttatccccactacatgttaaatttaaaactctgatttttcaatggtgttgaattggactgctctgagatgttgaaaatgctagatgatcaataggattggatacgtttaacgtatttaggatatactaggccatgaagtagtaatatttgtactaattgtcttgctaaaaaggtaagagcatgagggttcatgttttcctatgtaagcagcttggtgtcggatttactctctttggagagtagcctcttctcatcggagcattgatctataacgttttagccgcaaagaacaaaaaccccgaaaaagatgatctcatgatcatgttcaaatctagaaacataaagaggggtatcaatctgtttatacttcacatagatctccattcctgtttttgtgggtgaataaatgtaacaaaaatatttgttccccttaatattacaaccttatgatgattaccaaaacatacttaaaatgtatacctattattaataaataatgagttctacctcgaagaatttgcagagatcttattagtagatctcttgatagactcgattctttgtaacctaatctgttctctgaactttgcaatgaactcatctgccttcttgtccacgtcacttccattgttgatctcactaactccttcttcctctactatcttcttctcaacctcgtcgtggatttcattttctcctcttctctgttctccattctcggattcttccactgccttgcttcccaagttacttctttgatcattcttctctgtgtcttgttccttcgattccacgattggatcggaccaccaaacctttttaggagcgtttcttttcatcttttgctccgaggactttctccgttcgttgcttagtctgaattttgtcggaggtgacttataatactccaccggaggtggtggaggaggaggcggcggaggatgaaactcacctcctgcaaatttcgtcttgtgaactgatgattctctcctctcaaccctgtaaattccgggatgatcttttctcgacgaggagttataaaacgccggtagtggtggcggcggcggaggaggcggtggcggagatggatggaactcagatgcgagattaggtataggattcgactttcttggagaagagaaagaagaaggtggtgtcagattcttgatcaacggctgtgattcaactgtagtcagattcttaacggacggtagagattcaacctcctttgatgatgatgatgatgatgaagatgatcttgacctccatggaatcggagaaggaagcacatcactattatcatcaccaagagtcttcagaagttctctcttagatctcactttctcccatcgaccggaattatcgccggaagaatcagaaacacgagaataattcaagctccgaaccggcaaaagcagaggcttctctctgttttctgaactaactcgatcaacgaaacgagtctcaacctcggggattttcatgtggtacttgttcttccatgtctgaaacttacgttgatcaccggaggaatcatcggacggttcagattcactctcgtgacccacgttaaaaacagaggatacttcaagaatcttaggcacatatgaatgcgaattattattactatgatcagctttgttgtgatcactattgcttgttcctccacctcctcctccgtcgtagttcctgcggctgaagagaccgtaagagactgcgataccgacgaaaacaaggtggagaagctcgaggagtcttgtttggttagcaagctctggtgtctgagaaaggaagacaggtacgacggcgcagagcacggtgaggataagagctttaaagatgaatcgagagtagaattttctagggttttgatcttctttattacccaattggattggtttcttcaagcttcttgcttccaccattagagagaaaaagtgagtgttgtagagaagttgtcaaggttctttattttggtgatgaaagaagagagagataagtaataagttagtggaaatgctagacttagaggttaagttctgtttttttttttttttttttttttgttgttgtaagaagaaaaatgagattgaagagaacaaaatctggaattgaagttgatgtgtgaattcattcctaactttatttttttggtttcaaatactattctaacgttattttgattatttgacagcgactacagaatcgctacttcaaactgtctagaaaatccaaatgttacataggtttgttttagttttctgttatttattagattattatttttgtagtgcatgaattacacaaaatggaaaacgggatactataagaaaaaaatataactatgttcaaaaactataaaatgtcacaacatgggtttaaattgaggagtatgtgagttatagaggacgttaagtgatcataacgattgacgctctctgtgggtaatcaaaaaatctttaagctttgagctttttgaattagcaaagttttttgaattcccacagacggcgccaaattgttaaactcgtatttcaactacgaccataacaccagccggtaaccttggtcggctaatgcaataaagggtgcaaattataaaagctgttaaatgtaaaaaggtgtagaataaatatagcaattagttgataatacgtttagagaatatcacagagtaggtcgcgtaggcatatgagtccggaggaatctgtattctcttcttttggtctatttacgctaagatccatctaacacaattatcactggactggagaagattaaaagatagtcacgattctttttcttttacttagcgtaaacttgtcgataaggtatctatacttctgaatataataaacttcaaaaatcgagaaaaggaatttatcttattgtgttttgttgttgatctgataaggtttaaagtttagtatctaaaatcactgtatagactcaacggtagacgtgtaaaactgttatttgaatccgagactattcaatttaagacgttcgagataattgcccaaatatatggaaagtaagaaaatcaaaaaatatttaataaatctctatttatcaatatcctaatttaaaaatatttacatttagatttgtatttatcttatataaaaaagagattaacacaaaagagtgtattttgtataattattcagtctaatataattttttcaaacactttatgttctttattctcgtcaattaatcaaaaattacttaaatcattttgacaggtcaagctgaaaaagtgtctactaatcaacacatcattttagcaccactttggtggggcggtggatcacactggtcggttacttttgtcgactctttaagatttcttttgacaaacttatttctttttataaaacaaacttcacataagaagcatttgttttcaaccattagcttaaaacatacgcataaagtataaccactgattttttaagtttttaaccaatgcgattctagcttctgctcttcctctttccttatttcctttttgattagagagtcacataatttgacatcaagactatgaacgcacaaacacaaacagtgacatttagatgtttttttttccttgcttagaccattccggttattaatatccaactcaatatttattgaaactaaattgataggacactaatgattctttctcttataaggttttcaattgccagtgtacagaggcttacgcttctcagcaaaagcagctaatccttcaagacgatcttgagtattaagaagcttctgataacacatctcttctacttccaaacctgaagccatatttgtttcaattccttcatcaatcgctttcttcgccatctttatagctaatggacctttttcgtttatctgctgtgccatttcaattgctttctcatgagcctcacctgccgtaacacaaatgttcacaagccctgtaccacacaaataaaaaaaagagtatatgaatcaatccttctttgggtacattgccaaaacaaaatcacaaggaatgaaacttaaatagtcacagacctttatttgcagcttctattgcatcaatctttcgacctgtaaatataagttcctttgataccgatctcccaaccagccttgagagcctctgtgtcccaccagctctaaatagaagcaaaagagaaataaaacatcagaagaatgatgaaaaggggtaataagataaatcatttgacaagagtgatgaagcttattatatacccagggattatagcgagtcctgtttcaggcaagccaaataccgcattttcgcctgagaatttccaagtattaaccataactgcttatctaggccagtagattataataagaaaatgaccaggtatgtaaataccacagattcgaagatcacaagctagagccatttcgagtccacctcccagtgctgcaccttctattgcagcaatagttgggatacttagtgcctagaaacacaagtcttcaaagtcactatagcatgcaaatctaactgagatccaaaatctagagctttaacatagcaataaagaagctgaaaaaaagaaacaagtccttaaaacaattttatatcaatagaaccactatacattccttcttcactctaagtttgaagactattaaattctgaatcttgataaagatagagctacaaatgtagtaggtcattaatgccaaacatactttaggttgaccattaacttttcctggataacaatagcagctaatctatgaaaaccaataaggatatattagtatatacctcaatgaacgagaacatgtagcgcaacgagttgacatatgtgtgaacctcagatggactcatagttctacgttcctgacatccaagcaaattaaaacaaaacacaaatattcaagcatggctaacaaatcggatttgaacattccgggaggtatgacagtgacacaactaccttaagatctgcacctgcacagaaaactcctggaaccagacttctgatcatcacaaccctagcggaattatcttgatgtatggactcaaatgcgttctggagacttttcaacatctccttattaatagcatttttggtgacaggcctatctagattgacctcgattatacctttaaatcataaacacaagcagcattattgtaacgttcccttagcatcggtttgttcaaacacgttgataacagatgttgatgtacattcaaaaagcttcaaaacattaaaagatcataaattgatcagatgatactgttttgagtttgagtcattagtaaacaagcaagtatattaagaaccacggtgacacattttcaaatcccctgataaaaaaaactcatgttcttaaacaaaatgtgcaaaacacttcaagatcagaacaaatttaaagccatgcaagtaactaaagaaaagagaaaaatgacatgactgagagaagcaaatccagtgaaaaaaaaactaacaaatcatcagtaaagcaagaatcagtttgcaaagtcgaacacaattaaacaacaaaatcaaggtataaacgaccctaagagactgagcgaactgctatagatcactcttaaggaaatgtgaaattaccggaatcggaaccagatagacgattaagcttgacaaattcaggtggagaggtttcaatgatgagagtccgacaggtctggagtatgtaatttcggctaagagatggttttccagctaactggagcaaattgtctcggcggagatacttgacgaagctcatcttcaccgtctctgacccaagtttcgattattaaaaataaaaagcgttcctttttgctttaaaagatttgctctgtccgaaaaaactcttctttgttatctgaaacataaatgctgtaccgggacataaccggttccaaatctaggctcattttcaattccggttccatttagtgaacacggggtttcttcactctaaaaaatatcggtttagatatcagctcaacttcattattcattaacatgtagatgatatacaaaagagaggggaaagaatgcaaattacattgttggtgaagagtagactactcaaagactcagactttgtgtatccatgcgtcaagtcgaagctgcttcaatggtggaactatcttccttttgttcttttgcgggcagcgccattttcctgcgatctctttagcaacggaggacagttgatttgacatttctcccaaaactcttctctttttctctctttcttctgtgttatcctccccagcttttgtcttcaactctttactactcgaacacttcaccagaacttctgtatttggtttcttcagggaacattggtctcttgcttctctgaaacttgcctttttcatcgtcacaaatccagtttgattgctttgtccgtgaacattttccttgtcatatgattcttgttctattggaggagacttttgtctgttggagttcatggagatggattcttgaatatgtattggtctcaactcatgtaaagaagtgtcgttcttcgaaggtgatttgagttttgggttgtatctggaaactctggggctaaaccttgcttcttcttgtagttcacataataatggttcctgcttgaagcttgattcttgtttcacatctttctttgaggcatttaacaatctaactgatgacctcttttccattttttggtctgaaactgcattgtctaaagaaacctccttggcctaaaatgtagaatcgagaaagagtcagtgggaactaacagaatctaaagtcaacacaaaattgtgccattgaaaataactgaaaagtgaaaactggatttcatctcatttaatagtgatccacacaagtttctttctttagactacggatgttgtggcaagcttgtagactttaaagtgcagtaatgacaagaacataacttactgtgtctgtggctatgttttccttgtagtcatttgaatctaacctgccaagaccaacagtctcttgcctgctcttaatttttcgaaatataccggaactaattccctcctcagtgtcactctcctcaatgattaactcatctttctcagaatataaaaatccaaattcttgaatgtctgaaagctgaggagattgatactcatagcttgaaaaccagtttctgagatcaggaggctctgatagaacaagaaacaaaacatgtaagattcagctctggccgttctaactataaacctgagtcactttaataacacattaaaagaaagcaaacatcactaacatatacaaacaagtgccttttactcacccgaaagaacagactgcgactcagagaaatctgtaacctgcaaggagactaattcatgagcaggcataagagttaagaaaatttactgatgtaactacggcataggaagcaatacctttgtagaagagacaagttcttgctctaataacctcggacaaacatcatttccttcaatttttggtgactcattttctgtttgggtctcctttacacattcactttctccaggaacagacaattcaagtccatcacttgtatccagcaacggcgattcatagacatagctcgaaaaccatttacctaaatcaggaggttctgagaaggaaatggaccaaaccagattaaagttacaaacaaatccatcaatagcacatacattcacaataatcatccaaaagagagtctaccagaaggaagtgattcatcaataacaccaccaggatttgctttgttgaccacatctacttcgatttcaatttcattgattgaagaagacaatggtaacgattcatatacataactgggaaaccaattcgtaatatctggtggttctgtaacaaatacccaaaataaaaaatgttagaaaaaacctagaaactgcaacaaaaggccgcttaagagagatattaactaaacctagttattaatgactcaccggaaatgggagatgttgaatcggagtatccatcttcctgctacagaatattaagagagaaattcaaactcaaaaccctagctaaatgtccagaaatttcagcaacaaattcacaaaaacgcgaacaattataacagaattaaaaatctcaccactgagatgaattccggcattagagctctccacttcgtctctctctcttttgctcaaagtttttgattctgcaatctgagagatgtttgtttttgattttcgatttttttttttttatggtttcgcgcgctaatttcacctaaaattatgggggagcggaaacaaaatttgatgttggaccttataatattaatgggcctataatttaaaacccaaactaatgaaggctttttgcgctatatgttattcaattaagggtccaaaatagtgcattgagagaaatttaatgaataaggataaacttaattagggaaaataaattagatttatttcttctttttattagatgtgtttttttttctatctgatttcttccttttattaggggccattttttttctttctaaataaattagatttaacacaagattcttttgcagattaagtctgctctatttgtttgtttgctttgtggaatcatcgaaaatgtgaaaagtggacaagtggcttcataaaggagggcaaaaaaccataattaaaagtatattcaaattaaaatgataagcaactgttacatggctatgactttttgggtcatgctacatgttgaaatagtattttatagataaaagtgattaagcatacacttaatctagatgtgaaaaaacaacataagcatgaaaaagagaatgggaagagagaatgaagaactaccccggcccaccggagatcactagatgaggtttccactaccgcttgcgcttccgccttcacgaccacgaccacctcggcctcggcgaccacgacctctacgaccaccgcttctgcgaccaccaacactactccattgccactctatcatctttggagttggtacgatcggccttttcccaaagcttctctgagtagatgtggaccatgtggcatcttgcgaagattctgtaacagtagctgactccatttgctcgcataatgtcgacccgttattaccttgttctcccacatctattccatcttgttccccatgtgtagtagcttcagttgcaactggggcagtctcagtagtttctgtgttccccctagccaaaaaaataaaatccaattaataaaaaagttatatatctttgtgctcctaaacaataaaaacaatataaaaatttgcaatcgaaaatcttcatattacttgtctctgtttatgtcatcgtcgacaacatccatattatcagtcgtccttgtgttgttattgtttatgtcatcgttggtagttgagatattatggtagatgatggtattgcatttgttcatggtgactctgtcaagaagtccataatcccattgtttgatcatgaattgtctccagcacctggaattttttttttttccaataaacaaaacaaaattctatatgtgtatgtgtataagttggtgtattgatatagttttgaagagataattacaagtcgagtgataagttactgcgcagctcttgcaggtgtaatcttgagaatgcttcacatgcccaaggaatatgagcatctgcaacaatcctgaaacataaaatcataatttgagttatgctaatgttttataagcctaacaaacgtatggaatgtaagacatatataaaaggtctttaatcgtatggatgttagcgtaagaaatatcgttagttacctttgctgtttaacaaaggagttccaaagttttatgaatctctctgctacgatttcattctcatccatggaaccattaagcatctacagttttttagaaaaattgatgtcattagcaagaataatcgtataccacttttgttgtttatttagtaaaagcataaataattcatggaatatatatatacctggctttcttcgagatgtgcagcatcatcatttttgtcgacgtcattttcgctatctcggtcagacataacttgctcaagtgacaatggctttgtaacaacaaaaacatgcagtttttggttagtgacaataaaaaattcacgtggatatacaaaccgaagcagaaatacgaatttaaatgagaagaatcagaccagagaggtacgtgaattgggaccaagtatactttgataatacataataacgtgaaattcaaagactatgcaaaagaaggagcatgaatcacctgaccggttcgggaatgatagaactggcgtttatgaagaggcaagtagtggctggaaacaaatttacccagtaatggtagattaaatacacaaaaatggtaaattaaaataacagcctgtcatgatgaaaaaaaacacagggctttgggcgagattcggaaatgtggacccttaaatagttttgagaatttgtttaaagaaagaaatatacaaatagagatatgtgaaaatttgataaaatatagtatataatagtgttatcaagaggtagatatagaatttttggtttgaatacaaactatacaatgtactatatataccaaaaataaaataatatatagacattttcattaagattgtattagtagtatctataaaagatttgtttattttaatacattgaatctaaaagtaaagttaaaaatctagaaaatataaaatcaaatgaattaagtaaactgtgtaataaaattaaaacgagatttttaaaagaagaaacatccactaagaaacaaagtaaaaaacaaaatttagaaaatcattcttcgacttcatatttatttttcttggtcgaaaaatcattactcaaaagaaaccaataatatacaaaattttgacattagaaacatatgaaattgggaccctaaaattcagtttcagaagtggggagttttcaaatactataaccacatttatcaacaaaccttgtagcctttgatcgcttagcagggaccttagcttctgttgtcagcttaatcggatccattataacaaaaaggacgttgaatctataagataaattataataattattattattattgtatcttcgattgagaaatgtaagaggaaaacttagaaaatggatatataatgaaatgtaaaaagagaacgaaaaaatgaaaagaactcatgcgacggtaatatggaagctatattcgctaacatggaattttggatagctgtggagattaagttgagacctggtcggaaagagtagattcaccggagaagagagataatcaccggaaaacgaggaggaggaggaggtgttgaaactcttgttttttttttgttactcaccaacttttgttatctacatcaaaacatatctcaccttatatatacaaattatttgaagtcttgttagggaatataaaaaaaaaaaaatacataaaaataagttatataaggtagggaattttttaaaagttaaaaataatcctatataagtaaataatttttaatttatattgactaacacttatttgttggtaaagaataaagataaggtagattcgtcgaacgatgagtagtatgtcttggatatgaatggactttatgtttatattgactaatatttattttttggcaatgataaaattagattcgtcgaacggctgagtcgtatgtgttggatctgaattgatcatgttcttagaaagaaaaaaacatacggaaagcacacacttgatccttattgatggggaggcaaagtgaggtcctaaaacaacaaaatcatgaaagtttttagaaagacaaatgagagtttttttttttttgaagattcttatggtttgagtaaaattaaaatagagtgtaagatgttaggcgattgaatatttttgaaaagcacatatgaacatgagtcatgccacaaattatggacatggatgaacgaaacaaggagagtgaatctcaaatgtaaggtttgaatctagttagacatcgtaggtgcatgtgtgtggaagctagacacaaatgtaggaaatataaatacttgatcgaattgtacgttggatagtcgatcggatagagttgtcttaggtattggatcgtgggcaagtgactacataaaagtatttctggcgaacgagacatgactagtggctctggcatttctagttagcttatgtaatacgtcatatctatcgagatctcgattagcattggtgaccgacgagtacatatttttgtacaattgtgtttgatgtttggtcagttcaacataaagaatcatataagttattaaaaaccctagtttgtgtcaatgataaattataaataaattaataatgcttaacaactaaactatctttgtaaatattttcctattttaatgtgtacatatatttaggtcttgaatggagaaagtgcgaggcggcagtggtccgaatagtgataatatatactccttcccaatgttcgttacaaaattcgtttttataaaaaaaatcacacatattaaacataatcaatgtttatactatttgaaccatctaaaatatcaatttataaggaacggggagtatagttttgttattatttgaactatcttgcatgtttttcgctatgttgtgcatcattttattcggagtctatttacagtttatttgtcctcaatgttagatgtcagtctaccatttcttttaataacattactaaataaaacattttacaaaaatagactaggacatttaaaggtttttttttgctgactcaacatttaatgttataattagacaaaatgggatttaaatatattattccagtttgatgaatattgagaaacggaaattaaattattttaaaaacatttattatcctttgaattacatatatagaaatatttattgaccaaccaaaagacaaatatttaaattacactaatatatatcataagtctttcatttggtcaacaaatatttatatatatagaagaaaatcagaagataataaaagtgcagaagaaaatgtagtagaaaattacagagtttctttaatttgtgtaaaatatgtcaaaatgaagtttttttgaaacaattggagtataatttgttttgatacatatgaaaaaatcaaactgttattgatgacatctagaaatgggtttcagtaaacaggctttattgttatagatcattataggcccattaaatggctgcgattccgtatattcagaagtcagaacagtacaagtttagtcaaaatgctgaatcgacgggttagacttttccacgtgtcattaagacagttgaggagcaacggcaaccatctataacggttcaacacgcttcgttgagacttgagaatttagttcttcagatagttcatcatcaggagtatgtttgtttagactactactgatgccaggctgttatagttgtgagttgtgacatttcccaggtggagacttgttcaagtttccgtacgggatactattgtttgtttttgataaacttgttaaataaagttcggatccattatattataccttcagtttttctaaatatataatcgatgaactcgaatttgagtttgagttgatgttttgcatttgtaagtacaataattaaattactttttctaataatagttgaccaatacatatacttttaaactttcacgctcgtgtgtatgatttagacattagaaataaacaaattaagtaccggaaatcataattctacgacgtaaagttctcgtctgttgaacggttgtgaagtttggatgaaagatgtcatttctatgatttttcggtgtaatactgtaatgcaagaaaaattcatgaaagttgtttctgtcaaacgtttgaattggttagacaaacgtacagcttgtaaacaaaaagttgtctttgaattggttagacaaaagtatatgtttgcagttgtttttatataatagctaggttttatacggttgaatatttacaaagttaaacacaaattatacgaatatggaaacttcaaataatctattttttaaaacaataatgtactgcagatttataaaaataattaaacacttaaacactaaatggagagagaataaaaccgcacaaaacaaacaaactaaaacactccaactactatacattctatacataccagaagaactatttgtttgacgtgaaactgttgtatttgtagaatctatataaatctctatatatatatatatatataaatatatataaataaccatttaaatgtgttttccaaataggtatacaaatttagatttcaaactaaacaaaatacagtaatatatatatgttcgatatgaattttgcacatgattttggagcccgtgactaggctcaactgcagaagtattcatatacatgttgtagaggaaaattaaagtccaatgacacttatgggaaaggaaaacgaacagattaaaataaatacaggaaaatgttgtagataaaatataatatgatctactatatatttaatttaaatatgtttgacacagctgtgtgaaatgcaataattttgaagtcatacttggaccgcacggtaagttggtaaaagattgtcaacagtactgcaaaatcactttcacacctaaagctcgtacgtacatagcgacaatcggtttggtacgaacataaaatataaattgaaactgattgaccaactcatacattctatatcacaaccgacacaaagtccttttgtttattgtgttgttaaagagaaataaagtccttttagttcatcaaagttaatagaattcatccaacgctatttgatttacgcgatatcttgaattcggagtttggatattttctcttttaaacgttaagaagcgtaaagtattttcctggttagcaaatgtacatccatctcattttctgttataagacaaaaataatgtgcatccaccatggaccttagaccatagtccatagtaacagcttgtgaccttgtgttgctgttttttcttctggtacatgtgtagtaaataagtaaataactttacctgtgtgtaaaataatcttcttcttttaaaatacagtaagaaataattttcttcttttttttgcaaaataaccctggattgactcatttatgagaggtaaaactatttaacaaatatagtaatcctttttcttggaaatatcaagtgattttgccataatatctgttgatgtacgtaatcgatcgatcatttacatcaattgatcaaatgatttttatagcaaaaatattatgacaaaaccaaaagttgagactaaaaaaataaaatccatgtatttggttaagtctaattgtttatgtaatctttataagaaattttttaatcaaggtcgaaacgatttaatatctaaaacccatcagttttctttaaaatttttgtttgggactttcatttttttactgttatttggagactaacatgcaagaccacattatcataacataaatctaaagaaatcagtcttacaaagttgatagatctggttggattaattaatcttaacgtccctttaatttagaaactaaaattgggtgcatgtattgtgtttacactgttcaaactttcgagcacacagccaaaaaatcaagtgacttttacaaacccttttctcttttatggagtaatattaaaaagagggttcgcttgtggttttttttctactacagcgactgtacctttataagacaatccgaccatcctggtatagtagtatctaggaagacggcttaatagaccaaaacttatctactatctatctaactcacataaagattatcaaatcaaactcgtccattctgaccgaaactaaaataaaaatcaaactcgtccatcaaaaaaggcaaaaaatccatcatcgaaaaacgatttagtcctcaaattagttttgagtatttattgagaatacatgactaataaatgtttacacgtactagtttactactaccattgcatgtgcaaaggaaactgtaaggacttttcttgaaaacacacggaacttttaaagacttacatggaaacggtccaaaaacatcctaaaaaatagccagccaatacggtccttaagatttcaatattccttaaacacagaaaggataaatcaaataaaaacaaagtcaagtcaaacaaacgagggtcgaaatggtaataacattctaactccatgaccatgctaattccaaattacgtcacagccaccttcgacgtttttcatttaaataccaatcttagtttcattctatcttttgttcttgtcccatcaaacttgagccatctctcattccctctctctcgttaatagctcacatgcagacacttacgcctaacgccgacatattccatgcaaaacgccgtcgtttcacttgcaacactcacacatcgactttgattccgacgaagccgctctcagtttctcccgcgagaaaaaccaacaaagaacatctcagaaaccttgagaacgttcttagaacttcgtcaaactctatagatcatatcgaaaatgtaacttctcgtcaagagaagacgacgaagaatacatcgacgtcatcacttctcggaggtttgaatttggcgcgaatatggcctcagatgaaagcagccgtcgacgaaatgtcgccaaagaatctgaaacggctccaaaggcttctctcaaagtcatccgaggaacgttcgccgaagagtaaactcgggtctaaatggcgggagctacacgggttaaacaactgggccgggttgttggatccgttagacgagaatctccggcgagagcttgtccgctacggagagtttgtacaagcggcttatcacgcgtttcactcagacccggaaggttcgccgagacacgtggcgttacctgatgggtcatttaaagtgaccaagagtctttacgccacgtcatccgttcgtttacctaaatggatcgatgacgttgcaccggatctccggtggatgactaaacagacgagctgggttggttacgtggcggtgtgtgatgatccgagagagatccgacggatgggaaggagggagatcgtcatcgccctccgtggaaccgccacgttgctcgaatggtcagagaatttcaggcccaatctcgtttcaatgcctgagcccaaacccgatcaatccgacccgactcgacccaaagtggaatgcggatttaatagcctctacacgacgggtgaccaacacgcaccaagcctcgccgagtctttggtcggcgaaatcagccggctcgtcgagctctatgcaggagaggagctgagtatcagcgtaaccggccacagcctcggcgccgcaatcgcgcttctcgccgccgacgacatcgccgagcgtgttccacacgcgcctccggttgcggtgttttcctttggtgggcctcgagtcgggaaccgtgagttcgcggatcgtttggattcgaaaggagtgaaagtcctccgcgtggttaacagccaagatgtggtcacgaaagtccccggaatattcgccgataacgataaacaggggcaaagtcgtaataacgggagaagtccagggggtattatggaaatggtggagaggaacaatccatgggcttactcgcatgtgggagcagagctccgtgtagacatgaagatgtctccgtacttgaaaccaaacgctgacgtggcgtgttgccatgaccttgaggcgtacttgcacttagtcgacgggtttttggcatctaactgtccgtttcgggcaaacgcgaaacggagtttaaggaaactgttggatgagcaacggtcaaacgtcaaggttttgtacacaggaaagtctttaagacttaaccgtacttttcatgataacggagatgttttgcctagtccgtcgtcttcatgagctttgatttattaaagaaaaaagatttgttctcttttaatactttttaagtatttgtttattttttctaattaccaaaaaaagtatttgtttattttgctataattattatttactttttctaagattaagatattcattattggtggggggaattatttatttatttgtttgttatgatttctttgtcgccattggtgataataaaagattaaaaagttgtgcaatttagactttcgcgtttgttttagcaaatgtgatttttgcacaaaaaattgtaaatagaataaaatgaaataaatgtcattggttaaactattagataaaaaataagttttgctagagaaaaaaacagaaaataacataatctatgtgtttaaaccttaaatttcaattaaaatggtactgattaattattttcatatatacataggaacacttgaatatatgaactgcaaaactatgtttttttaaagtgggactaaatgaccaaattttattaaaacgacatatggaagactagtatgttgtaaccaacaatgaacaataaccaatactgaaataagttattgtttgtttgattttagaattgttacatccggtacgacgaagtctgaatcatcataagagtctggatcatcatctgagtctcatcacacaattgtttgcaatgcggttctaacatttatccacttcatattttttttatataaaaattgtttatacgtttccaacacgtaaacacttctcattgtacattttcttttttttttttgctataatgactgaaaccatgcatgaaaagtcttctaaatagaatcgaactaaaagaaaaattacacttaaaaaaacaaattgcaatattttttggttttatttggtttaaaactatgtatgatctagaaaaaaaatattatgagcctaaagtgaattattctgattctatataaatacaaacggtaagtattaagttagaaaactaaatagtcttatgtatacaaatctcttcataattcattaaatatattgtaaattgtaatgagtattttcatatacatagactgatagaagcactttatcgttaaaattgcaaaataaaagtagttataagtgggcataaatgaccaaaatttgctaaaatagattgtttttttttttttttttttggtaggggacactggacagggagataatccaataatgaaatataaacttttgtttagatatgccgtcggtttaagtattctgataatcaccaccgtttttttgcctattccaaatttccacacattttattttcatttcttaatatttatttccttatcatttctttctctcaccaaccaacaagttctcctttctacccatttcgtctccttcattttgacgttttctttagatctgttaataatcccatccatggcttggtctagtcactagtggtgttatctctctgtgtggaataaaaagcaaggttttttaatcacttggattgttttaagatatggcaactttgaacccttttgatttgttggatgatgatgctgaggatccaagccagctcgctgttgccatcgagaagattgataagtccaagaaatctggacaggtttcgagcttgcctgctaagtcagctcctaagcttccatcgaagccacttcctcctgctcaagccggtgaggtttcttctcataaatcaatatttaatcagaaaaattcgatctttattactggagtaagctgtctgtgttattgtttggattctcttgattattcatggagttgtgttttgtcggttgaatgattgagattagtgtatgattagttttgatgctgttgactagtgagagaggcaaggagtgatgctccacgtggtggtggaggccgtggaggatttaaccgtggtcgtggtggttacaaccgtgatgatggtaacaatggatattcagggggatacactaaaccctcaggtgaaggagatgtttcaaagtcttcttacgagaggcgtggcggtggtggtgctcctcgtggttccttccgtggtgaaggtggtggacctggtggtggtcgtcgtggtggattcagcaatgagggtggtgatggggaacgtcctcgaagggcctttgagcgtcgtagtggaactggcagagggtcagtcttattctgttgttgcataatctgccattgaaatgactgtgtcaatctcataagttggagtttatcttttggataggagtgacttcaagcgtgacggatctggtcgtgggaattggggaactccaggggaagagatagctgcgtatgtaattgtttatggtttattgcatttgtttaaaaaagtatgtattaatgtgattgtgattgggaatttggactaaaagaagttttctctggattttaagtgagactgaagcagtagctggtgttgagactgagaaggatgttggagagaagccagctgttgatgatgtagctgctgatgctaacaaggaggatactgttgttgaggagaaagagcctgaggataaggtaaacagagaatagaatagaaatgctaggctcctctttactatactggtatcagttttttttattttcacttattgtttattgacttgtgtttctacaggaaatgactcttgatgagtatgagaaaatactcgaggagaagaaaaaggcacttcaatcattaactacctctgagaggaaagttgatacgaaagtgtttgaatcaatgcaacaactgtcaaacaagaagtctaatgatgaaatcttcatcaagctggtaagacatatcatgtatcatttcttcattgtcgtctattaacttgcgtcaatgattctaaacctttcctttgacctatttcccagggttctgataaggacaaacgcaaagatgacaaagaagagaaggctaagaaggtttaaatcattgtctgaattgaaacatattgtagaaatcaataagtttgcttattgatgtgtgttcctgattgtaaacaggctgtgagcatcaatgagtttctgaagccagcagagggtgggaactactaccgaggaggtcgtggtggccgtggacgtggtggtcgtggccgtggaggtgtttctagtggcgaatctggtggttaccgtaatgaagctgcaccggcaattggagatgctgctcagttcccatctcttgggggcaagtaagatccatccatgataacgtccacactcgtgcatcctcctttaggattttgtgcgaggatttactgtttactggtctctcgttgtcagatgtaaataattaggtgtcgtcgtcagtttttagattttatgcaaaactttacacttgttggtgttctttacttttgaaacagtacactcttcttaattttaccattttactcgttttgtgtttgttgttttcttatttatgaaacatgttttgagacggacatatctaatgttatcgggtttgagtctttactctgtctcctcttttctcattcgtgatcgtgttcatagatgttttagaatcagtaataatttgacatgagttatgacttatgaatgattgtcgaataacgtggttgctattacatataccaatgattctgtaggatttaaacatttttttgtgttctgtcgtaaaccatgtaaaatgctttctcgcttcaacattcatcagccatttaaacgctgtaaatttcgattctttttgcgttccattggaaacccagataccattttggtggaatcatgttcgtcttcctcttgttcatcgccagagccatctctggttcgttccgattacttgactaaaccttctgatcaagaccagatttttccgttgaacaagataatagctaggtgtgtacgttcaggagatatagatggagctcttagagtgtttcacggaatgagagctaagaacaccattacctggaattctctgctcattgggatttctaaagatccaagcagaatgatggaagcacaccaactgttcgacgaaatccctgaaccagatactttctcttataacattatgttgtcttgctacgttcgtaatgttaacttcgagaaggcacagagcttcttcgatcggatgccattcaaggatgcggcgtcatggaacacgatgatcacagggtatgcacgaagaggtgaaatggagaaagcgcgggaattgttctactccatgatggagaagaatgaagtttcttggaatgccatgatctctggatacattgaatgcggagatttggaaaaggcatcacatttcttcaaagtggctccagttagaggcgtcgtggcttggacggcgatgatcacagggtacatgaaagccaagaaggttgaattagctgaggcaatgttcaaagacatgacagtgaataaaaatcttgtaacttggaatgctatgatctctggttatgttgaaaattctaggccagaagatggattgaagcttttcagagctatgcttgaggaaggaattaggcctaactcgtctggactaagcagcgcattgctcggatgcagtgaattatcggcgttacaattagggaggcaaatacatcagatagtgagtaaatctacattgtgtaatgatgtaacagcattgacgtctctgatcagtatgtactgcaaatgtggagaacttggtgatgcttggaagctctttgaggtgatgaagaagaaagatgttgtggcgtggaacgcaatgatttccgggtatgctcagcacggtaatgcggataaggctctgtgtttgttccgtgagatgatagataacaagatcagaccggattggataacgtttgttgcggttttactggcctgtaaccatgctggactagtgaatattgggatggcatatttcgaatcgatggtgagagattataaggtagaaccgcagcctgatcattacacgtgtatggttgatcttttgggtcgggctgggaagctggaggaggcattgaaactgataagatcaatgccgtttagacctcatgctgcggtctttgggacgctcttaggggcttgtagagtgcacaagaatgtggaattggctgaatttgcagctgagaaactgcttcagctaaactcgcaaaatgcagccgggtatgtgcagcttgcgaatatctacgcatcgaagaatcgttgggaagacgttgcaagggttcgcaagagaatgaaagagagcaatgttgtgaaggtagagcgagtcaaagttcgattctttattcgagttacaagactctaatgtatttacttgactgtttcaggtacctggatacagttggatcgaaatacgaaacaaagttcaccatttcagatcaagtgatcggattcaccctgaactagactcaatacacaagaaactgaaggagttggagaagaagatgaaactagctggatacaaaccggaactagagtttgctttacacaatgtagaggaagagcaaaaagagaagctattgttatggcacagcgagaagttagctgttgcatttggttgcataaaactccctcaaggttcacagatacaagtgttcaagaacttgagaatctgtggtgattgtcataaagcaatcaaatttatctcggagatagagaaacgagagatcattgtaagagacaccacaaggtttcaccatttcaaagatgggtcttgctcttgtggcgattactggtgaaaagagaagagctttgactctctcattggtcaaacctgactgtatttatatgcgttattgtgtggtaaagtttcgacctttgacttgacaagttgccgttaagaagagagatgcgtagatcagcgagtggttctagagttttggatcattttccggcgacttcaaggtctccgcctcgatctcagagtgttacagcaatggaagatgatgtggagctgcttttgcctaggtacgatccgaattctcaagcggggaagagagagaaatcaagattcagattttcagaaaacgtcatccatttgattcctctcattcttcttctctgtgtcgcaatcctctggctctcctcttactcaggtaagccgagaaattgtttcaatctctatgaatccataattgatctgtgaaacttaattagggattttacaaagactcatatggatatgaggatcgagatgtctctgcaacgttagaatcttgtgttgaattatggtttcaatttgttcatataatactaaatcggtgatggatttggaatttgtcagcagcgttaaggagttgagttccaaaagcaacatgttgtcttgtctccatgggaactcatattcagttttgggaaaggaaacaattcttttaccgccggtgattttgtgccgcaaaccattcgtatttgtaatttttggttctgtagacacacaaaaggatctctcgttttcatgaaatgtatgtttaatatttcagtgatatacatcacacaactcaagtagaaaacactgatggttatccattaatcattctattggtcgaaaaaaagattagtttcaacttaatgccaccttaggattatatgttcctgtgagtttcagctagccaactcaactagagttaaacaatggaatcaaaatacatattcagtaatttattttaaactctgactatttatgtaaaacacaaatggaaatcaaaattgaaggtcatgaagattctattcttagtgtgaaaagtatagatcaatgattcttaatttcttcatcctccacgcatagatcaatggtgaatatggttttaaatcctctaatactcactgtactgccatggtagagttaaaaaaacaattttagaaatattagtggattaaggcattaagctgtccaagttgcttgtattttcttttcattttattaattaaaaaaaaagttcaactatttattgactaataataatacgtgttaaatggttatcggtttaaaatatgggccataggcccagacttgaagaaaaacttgaaacccaaagttttatttttacttgttttctttctcagtgaatatctcccaatcaagcttcttcaattttgcttgctctctctcttacacggccaatcggtgttttcgcagctttcaggtttgtctcaatctcaaattaaatcggagtcaagtaataacaattgataaccctaattgtttcaattatattgtaagatttgaaattttgcagtagatccggaatcgtattctagttctggaatcgttgatctcgatggaattttttttaagatttcttcatacacatttggttcaaaagatcacataattttattttaatttgataagtatgatgattctgctaagtggcattggataaagttttcatttttgcaatacgtctaaacttgtctatgtcttgaatgaactctctgagttgcttaaaaagtcttgtgctttctttattacacaggcctcaatacaagacattctatataagcatattgcagaagaggcggttctaattgttgcatggagttgaacaatatgacgtagggaaattctaatttaggggaggcctcagagtttgcactaacttcataatcagctctggacgttgttgattgtatttgaacaagaatgtgtaggcagaattgtcgcgcgaaatcctcaccggaggaagtgatttcaactgatgagaatctcttgatatattgtaaacctgttcgactatataacatctttcaccttcgctctctaggcaacgtatgatttggccttcctctctcatcattttagcttagtaatctttcatctcctgtgtagatcacccactaatagtttgagtttgctaagctgattatggtctgactcatggcgagtgtgtgcttcttttgtctcctaatgttatttgaacttgttgtttgttgttgcagccatcgtttctgccaagatgcttgaactacaaaattggggcaaagcgcaaaagaaagtatgcgtttcttcttgaatgtagttgccacagtgatatgttatttatcttacttctaatatggaagctgatgaactatttatctttgttgagtagatatggacataatgaatggtttcttctttgttcatgctatacacttatattttacaaaattgtgttttgcttaggtcaagatctactgggatggtagttttcaactataaggattgtaataatacattacaaagaactgaaggttagtctttttctgttcttcgacaaaattcgatgtcaatgtctatgtttctctagatgatttgttatttactatttttttctgtattgtcacgcagttagggaggattgttcttgtccattttgctctatgctatgtggtagcttcaaggtgggcaactattacaactgaggtttcttccggggcctttcatatctaacactgtgaaatgctactgccgtttaatgctatatactttcactgtttggttacatatttttgtgtttgttgtttgtcttcttgctctttttaaactgctgagtgtgtgcttatctgagaaaacatgttccagttcgagcttacaatccattgtcttgtgtctatgcaggggctgcaatttcatttgaattcatctcatgatttatttgaatttgagttcaaggtatgtggttttatggaatttcttgttttgcctatgccgttagtaatgaggttatagttaaaaaagggtctttcctattgtagcttttggaagaataccagacagttaatgtttctgtaaaacttaattccttcatatttgaggtcagttactttaaacttggttaattgggaaatcctatagctggtgaaaatttggtttatattccatccttatttgtactaggaagaaggaagtgatgatgataaatttgagcccttctctctctggtaactctcagaaccccttgattaaataccttaatagcagtaactccttgcttttcttgtcagtacttctctataaatccaaccacaatgttttgcagctcgaaacctcgtaagcgtagacaaagaggtggcagaaataacaccaggagacttaaagtatgctttttaccgttggattcacccagtttagctaatggcacagaaaatggaattgccctgctgaatgatggtaaaatcacatcttcttctgtggtattcgttgtggcttagaacttcattttacagaagaagatacaatgtcctgattgtttagtttttgtacttctcctcgcattcttcttgtgagggtaatgttaccagaactgatgtacaaaattaatggcatgctacaggaaaccgtggtttaggatatcccgaggcaacagagcttgctggacaatttgagatgactagcaacattccaccagccatagcccactcttctctggacgctggtgctaaagttatattaacaaccgaagctgtggtccctgctactaagacaagaaagttatctgctgagcgatcagaggctagaaggtttgttcatcatgacaccccgtcatcataattaccatacctgttgttacaaatgttcttcctattatggataagtgtttactgtactgccatattaaccgagaaaatttcttccagccacctacttcttcagaaacgccaattctatcattctcacagagtccaggtgatccaagttccttcacctacttcttaggcattttctttaaattgctcatgatgatatcttatcaaagcatacttggtttgttctcatctaaatttgtattttgattctgtatgtatcaacgcaaaaaaattatgtccatgttgtctccgttttattgccactaaccaaaaactgcatgtttcttgtgacaagccaatggcgcttgagcaagtaatgtctgatcgggatagcgaggatgaagtcgatgacgatgttgcagattttgaagatcgccaggtattccatgatttctttctgcgttcattaagtaggcaacagaaaatggtatacgatgtaacttgctaatggcttttgaaacttaaaaaagctgcagatgcttgatgactttgtggatgtgaataaagatgaaaagcaattcatgcatctttggaactcgtttgtaagaaaacaaaggtaactacttctcttacacttgaacacacacaaaaagaccttatgtcttacattccatacctgtctaaatgattctgcttatggaactttgagctcaaattatgattgatgtttgcagggttatagcagatggtcatatctcttgggcatgtgaagtattttcaagattttacgagaaagagttgcactgttactcatcactcttctggtaatataagtacaccaaacatatacagacacataactacactatcaattttgtttcgtttttctgaaagaaaaataaaaaattccaggtgttggagattgtttttgattaaactatggaaccatggacttgtcgactcagccaccatcaacaactgcaataccatcctcgagaattgccgtaatacctcagtcactaacaacaacaacaacagtgtggatcatcccagtgactcaaacaccaacaacaataacattgtggatcatccgaatgacataaaaaacaagaacaatgttgacaacaaggacaataacagcagagacaagtaattaaataggaaacactccggtttagatgataccgatctatcggattgtaacttattcttctttcttaaaaaaattgtttaggagcaaacaaagattttatttgttagtgtattcaactgattacatttttagttaaaaaaatggattctccttaataactaaagactgaaaaataagataagtttccttaatttttctttttgacttgagaaaaagctcctctagacctctagtaaataggagttatatattaatcaagtacataacataaaaatatatatattaagtgcaaatagattgaaaacaaatcaagaaattaattaagacacagtgattaagcttaaaaccccattttgacttgttctttctcaatgaatccctcacaagcagcaagcttcttcgattttgctttgacaccaccaatcagtgttttcgaatctttcaggtttgtctcgatttcaaactagatcggagtcaagtgataaaattgactaacataattattcccgttctctcgtaagagttgggatttagcagtagatcggaaatcggaatttacgtttttgttaaaagattgatggtttaggtaataaaacatagttctggattcattgcttctagttgattctcgaattgtttgatttcgcaatgcacatttttggttcaaaggatcacataatttgctttaaaatttgacaaaacataccatcaaatttctcatatttcttcaagtaactcgaacttgttggaaatctatatactctgggctatgtagataaagtcttaacattttggtcaacattgtttgttctctaaactagtttgggttctctgttttaaagtttggtgctttcactattacacaggtcttatacaagactacagtctctagaagcataatatcgtcgactctgttttgagtttcccaacagtggttgaagcttaaggaggttcttatgtgccttttgaaatcatgattgaggtaaagcgacctggttcttccacgcggatcaccacaacactccttgattctttcatgattcttttcagaaacaaacacatcttattaccaatctttgctttcatagcgatccctctcgcagccttacacctctccttaactcttacctcctttcgccttaaaaaccatgtctttcgtttagaagccttagctaacgttgtgcatacacggtttgaagctagacagatttggcaagagtctagagaagatgctgtctcgcttttacatctcaaattccggtatttcgtcccatcctttatcctctcctgtatggcctccataactgtcatcacatcaacttccttctcacaccaaggcataaacccatctctgaagtcgtcatttgcttcagtcaagtcttcgtggatgcgagtaacagcaacttccatcatcgtctacggtctgctcttcctctactcaccaatttccatgtttctatcagctctcgttggttatacacctacattgcgttatctaatcacgatcctctttctcggagttgaggtatacataatggctataacagggcttgggtttgtcgtctctgtattggaagaaagatacggttttgatgcgattaaggaaggaaccgctctgatgaaagggaggaggataacagggttggccttggcgggtgtatttgtgtttctatcgagtttcattggtcatgggatggagaagttggcgaaggagctagatatggacttgagctcagggtcgtggtggaggtcggtggttgtggccggtgggtgggacgggtggaagctggtttgtatgtatggggctgaggttgtgctgagttatgttgtaatcactgttttttactgtgagtgtaggaaacgccatggtaacagttatgcaattgttgctgatgaggaaggtcttgctatttaaaattagttccaacacttttttgttgttgataattctcttgtgaatctgtgaaatacatttttgtttaccaagattatgatttattcattgctttaaagagagaaaaataacattttgtagagagagatatgtgtttcaaaagacaagactgttatatttacatcttttcaggaaagcgaatttttcaaagaagcaaaacagagagaagtaagaacagagtggttctgctgttctggacatggagccataaaaggtttctagttctcagtaagttctccatcatctgcagaagaaaatggcttgtgtgaaaaacaaataaatcgtcttgtttggtcgatcccacgttcattacaaaacagagttgtaatacgtttcaggttaccttaacaatgtgataagctgtggagacggctaaggatccaggaaaggaatttaacaatgtgatggtgtgaattcagtcaaggcagatcttaactgatcagggtcagcagtgaaaggtgtcgtccccatcagaccacacgtctattttaggcccttgatgcaaagatctgaagcaaaccaattcagtcaagaacagccccagagaattagcttcccatcctagatgttctagtgagtagtttaggcctacaactttaactctttacgatataaataaagaatgcagcggcatgggggaacagcagcgacatgttttctcatcgacgtaggatagctggatgatacttcatggtttggaagtggaccagacaatgtctcctgcagaaagtttataagctcgttccttcacctgaaggattcttccttatgctggtcatatctttggccgaagttaggccaaaaacgcttctgtcttttggctattgaatcagcaatgcaaatattgttgatgacgaggatcttgctatttaaaattagttccaacacattctcttgtgaatttgcgatatacatttttgtttacccaaagtctgatttctttattaattgctaataaagagaaaaacaacctgtgctaacatacacattgagatctattgtatgtttcaaaaaaaaggcagacaaaatgttcaaaggaaacacaagagtgtttctgcattcagataaagaagaaattacaaacattttcaggctccggagttggttgattaaacggattttggttctccacatatcattctgcagaaaaaaatgatctccttactctatctgcagaaaaaatggcttgtgtcaaaagtcaaaacctatgaaatcgtcttctcattgtcaaattataaatttataattatggtcgatcccaagttatcctaaaacagaccaaaaaagaatgataagatgcttcagttaccaggaacaggatacatttatcttgttcttcagttatcatgtaatcaacacacaaagcttccccctctagagatgtcgatgatgatggttctccctgccctaacgaaagctccaaatttagagcggccaatcctgtgtcggctacaatttggtcaccggctaagttgatatattcttcagatgttcccgatgtcatctgcattataaatcaaacgatcgattctattaaatagtctgtctctatggtatttcgatcctggaaaatcaaaccaaaagtcaaaagatagctttataattttcagctctaatcaaaagtcaaaagatacccgcatccgcttcttgcttctcgtagtctgttggttgtactctgtttcttgagagacatacaagagtcgtacaccgcattctttgatcctattggagcaacaaaacttaaactccacatcgttgaaagtcaatttagatggaaggtcttcaggctggaacttgaaggaacagaaaaacagatgatccgtcttacaaaactgcaggtctgcatcaaaaaatgattcctcatactgtttgccgccgacgtttaccttcaaggatggataaaaatccttgcccttggagagaggttcaaccacgacacaagccttaaatcgcaagaattcttgagaaagaaagctctgaggtaaagtgacagttagggaatctccagaagctcgatacgtgaaatacttagggatttctccacctggtaaggccacaggcttgaagcatgatcgtaggatgagttctcgcgcatctctttccaatttgaagcaattacagaagctaaaatagtcccaatctaccaagtattcaactatggaaggagaatgtattgactttattaagaatgtaatgtacatatttatactaagatacagacatatgattagggattgattaattacaaacatgtcctttaagacattatgacatatattctctatacgctccctcaagatggagggagttgacgaactccaatcttgaaacgtgcggactgaaagtgagctcgagagagaggtttggtgagggcatccgctagttgatctcgtgttgatacatgtgagactcgaagagcaccggactgaatcatgttgcgaacgaaatggtagtcgatggctatgtgcttcatacgagagtggaaaaccggattagcacacaagtaggtagctccaatgttgtcacagaatatagaagggcgaattggtaaccggatgtgtaacttagagagaagtgagcaaagccacttaacttcagatgcagcgtttgcaacagctcgatattcggattctgtggaggagcgggcaacaccacgctgcttcttagaggaccaagagatcggattcttgcccagatagatgacatatgcattggtagaaacataatcatcggaatccccggcccaatctgcatccgaaaaggcatggagattcaatggtgaggtagtgtctaggaaaataccatgcgttgatgtgccggcaagatatcgaagaactcttttagctgcttgccaatgatcttctgtgggttgaggcatgagctgagataatcggttgacggcatacgcaatgtcaggacgtgtaaacgctaagtattgcaagctacccaccaccgatcgatattcagatgcatcgttgagttttgtaccaccatggagagtgagctttggtgaggtgggtaaaggtgttaacaccggttttgcgtcagccatgttgtgctttgcgagaagatccttgatatacttcctttgcataaggtgcaaaccttgttttgttcgggttgcttctataccaaggaagtagtgaagatctgtgggatctttgatggagaaacgttccgcaagggaagtcagcaccgcatcgatggatgacttgtcgctccctgtgacaataatatcatcaacatagacaagtacatagacgaaagtggtgccatgacagtagataaataaagacgcatcggagagtgagttgacgaagccgatgttgaataggtgttgcttcagctccatataccacgctcggggggcctgtttcagtccatatatagctttgcgaaggcgacaaacatgagtgggacgatctttgtcgatgaaacccgggggctgagccatatatacttcttcggtgagagttccttgtaagaaagcattgttgacatctagttgtttaatctcccaatctttcttaactgcgacatcaagaacaagccgaattgttgtagatttaatgactggactaaacgtttccgcatagtcgacaccatattgttgattgaaccccttggccactaagcgtgctttgtatttgtcaatggcaccatttgggagatacttgagtttgaagacccacttgcaaccgacaagaagctgagattcatggggaacgagatcccatgtatgatttcgttgttgggcgtcaaactcatcggacatggcaaaacgccactttttgtctttaagggcttgagtgacattggtcggctcggatggagaacgatttgggagagtagcagtgaggctaaattttgtgtttggctttttgatattgtttttagctcgggttttcatgttgtgttgattttgttgtggtgcagttggttggtgagaggcgtcggagacggtggttcgatttggagtggtagtggtggttgtgggtttgaccggtttagggtgaggcgcaggtgttggttcaatttcattggttgggtttcggtttgggtttgggagtggaccaataaaggcttcatgggttggattcgacagtgggcctataggtggtgactgggcctcaggttcaggcccattttcatttggagcagtgggctcagaatttaaagatgaagaagaagataataagggtgacgaagagcgtacctgtgggacttgaaagtccattgtggttgaccggtgaggagacagaggagccggtgaggttgtcggctgtgatgaatgtggtgagttcggcgtagtcaccggcggttgttgttggtgaaggaccgtacacggggaagacaaacaagatgggagaaccgacgatgatgagagtatgggcgtaactaacggcgaggagctctgttcaaaggttacggtggggagagaattttgggatgtgaggttggagaagggaaaggaggcttcatcaaacacgacatggcgagatgtgtaaagtcgcttatgttcaacatcgaaacagaggtaggctgtttgagttaaagagtaaccgaggaacacacaccgtctcgatcgttcttctaatttgttgtgagtgtaaggtctgagccatggaaagcacagacaaccgaatactcgtagacgctcataattcggcttggatccgaacagcttctgaaacggtgactccatggatagcaccggagtcggcattcggttaatgagataaacagctgcggcgaatgcgtatggccagtattctcgtggaaccgaagcttgagtgagtaaggtgagtcctgtttcaacgatgtgcctgtgcttgcgttcggataggccattgtgctcgggagtgtgtggtggagaggtgagatgagagataccattggaaacgagaaactctcgtagtgcgataaattctccgccattgtccgagtaaagtgttcggatttttgcttgaaacctgttctcgaccaacgctttaaacgcaataaaagtggattttacttgagacttttgctgcaaagggtaaagccatgtatatcgtgtgtgatgatcaacaagaacaaggtaatatttgtagttatctggtgacaatatgggagacatccagacatcagaaaatatatattcaagcggtgaggtggatttaatggatgagatagaaaatgggagtttatggctcttattaatgaaacaatccgaacaagcaagtttatttgaagcagaaactgaaacgggaagtgaaaactttgaaattaaagtgtttagaatagaagaagaaggatggcctaggcgagaatgccaggaagaaagagtggtctttggacttggtgttgtgaacagagctgtagctttaggattagtcactggccattcatagagctcgtctttagttctcccttggagcaacagggtccccgtgttgaggtccttcacctgaaaagaggcagggaaaaattcaacggacacttgattagtattgcataggcggtacactgagaccaaattcttctgtatatcgggtacatataacactttattcaaagtaaggtcacgggcattagaaggtaagaaagtggaaccagtttttgtaatcttaagacttgtgccatcagcgatcatgacatcatcaccattgtagggctggtgaagggcaagagcgttcagatcggacgtgatatgatgggtagctccactatcgagaagccagttatttgctgtgtatggcgctcccatcgctaagttagctcgtggctgccatggtgtgaacgtggaggccgaggagctcgaagacggttgcattgcctgcagctgtgggcatcgacgcgcactgtgtccttgaacattgcaaatctggcatttccccaagtaaggtttgaaagggcgctgacctgacttgttatttgcagagggctgccaattgttggtgtaggtgttgccttgagtccgattcttgttttggttattgttacgattgttgttgtgatggcgttgttgagcaacgttagctgacatgggaagcgacgaggatgacagagcagcagtggacaaaagcttggcctcatgattaatgagtcgttcatgaatctccgtaatagagggagtgttgtctttgccttcgatctgatcaacaacagttttgtagtcttcaggaagaccttcaaggatacgttccacctgttcttcgtgttccattggtttgccgagaatagccaattgatcaaggagagttgtgtgactcagaacgtattcgtcaatggttttggttcccttcttgagttgcttaatttgagtccggagctgtttgatgtggtcgtagctagacttagcatacgtgttggttaaggttttccagatttgagaggctttggttgcacgagacactaatggttgcaccggtggagagatggcgccaatcaaggcactgaagatgagcctgtcttgtctcttccacaacgtgtattgtggattagcggagacaacattgtttgtagtgagtgttggagcaggagtctcgatagaaccatcaagatgtcctgcgagttcatatccatcaagcaaggcgtggatctgaaggctccacatgaggtaattgttggaggtgagtttcgtgacattagacgtgttaatgttgaagattgtttgcggagtgaagacaattgcttcatcagtggtggctgggagaccgtttgcggaggagcccatgttaggcggctaggtttgtgttttgaaaaaaaaaattagggtatcgtttgctctgataccatatggaaggagaatgtattgactttattaagaatgtaatgtacatatttatactaagatacagacatatgattagggattgattaattacaaacatgtcctttaagacattatgacatatattctctatatcaacatcagcatcatcattaagtcccaatttacccaatatacgtcgccatcctcatctttatagctaaagatagatctggaatttctttcatacaactcatcccagaaacgttcacatgtatattcaatgttttcagataatggtacacaagaaacatgatcttccattgtcgctaccacagttgcatcactcaacgccttgatgacacctctacagtctgtaaagtcggcgaccattagacttgtcagtctgaaaatgtttggggagatgtttttcaacctctggcaacaatacatcagtagtacactgagcctcgttaaatcctcaatgcagcagggaacttcttcaatggcggtgttttctagatagagacattcgattctagttgaaatcagaggaaaagttctcagacttgagcaaccactgagatcgaggatgataagagatgacaagttgacatcggttggaagaagctccagccctgtgcattctttcatttccaacctcaccaatctatgaagattcccaattgtagaaggaagtgtcaccaaacttttgcacccgttgagatataaacgcttcagattggtggccttcgaaagatctggaatttctgtcaggttttcagattctgacagatccatcctcttgagacttccaagcgactgaaattatttttttcaatcattatggatcacaagccataattttttttttgggtatagttaatcagttatataacagaaggtaaacaaaaatcaggatatcattaacaatgtacctggatgccttcccatagcttctcatgcttgcagccgctcacatcgagaaaagtgagatattctgggcgaaattcacaaggcatacacctcataaggcagtcgagataatctagtccagcagggagattcttgttccagaaacaatcttctacctcgatctcatttctatcttgcagaatttcaaagtatgaacatcccattttgattgctgggaaatttctcaaattcgggcatccagtgagattgaggtactcgagagattccaagttgagatcggttggaaaactctctagctttttgcaatctctcatatctaaattgatcaatttagtggcattctgaatcgaggaaggaagtgtcaccaaagattcgcatccaaaaagatatagtctctccaggtttatggctaaagaaagatctggaatttctttcaaatatttggaaccatgcagatacatctccttgaggcttccaagtggctgataacaaaataggggaaaagagagtacacgcgttaatgaatattttaaacagattcatttttgtttttctaacatatttatgtttagaaattgatcactaatagaattagtacctgagttccatcccacagcttctcaaggtcactattctccattctgagttcaactagatactcagccttaaaattagaaggcaaacgcttcactggacaataatcccaccatagccttttgagtttacgtggcaagtaaatgaggccttgagtgccttccatacttgaccaatcaactgatagatattcgagattacacatgccttctaatgattttaaatctattaatagcacccccgaacaatataacgtcctcagtttaatggcattctgaatcgaggaaggaagtgtcaccaaagattcgcatttagaaagatttaattcctcgaggtttatggctaaagaaagatctggaatttctttcaaattgttggaacaccccaaatccatcttcttgagacttccaaggggctgaaaacaaaatatggaaaaagagaatacacacgttcacaaatataccacaattttctgttctaaaaactgacaactaataaaaatttagaattcgtaccagagttccttcccacagtttctcaagcttactatacttcattatgaggttaactagatattccgccttaaaagtagatggcaaagacttcaatggacaataattccattttagcaatttgagtttaaggggcaaataaacgaggccctgaggtagatctatttttgaccaaagaccaatttctgaccaaagaccaatttctgaccaatgaccaatttctagatattggagattacgcatgcctttgaacgattcttcgtttattactaataacggccttgtcgaaaataataccgtgggtggcacacgtattccaagaacagtttctgtcccctgaaaaaaaatccaaagaaaactaatataatcttaacaatcgcaaccctttttatttttctgacacatcaaaactacgttttaattacgcatgaggcaacaattgcttaagtttatcaatccccaaattacgattatattaatataaagtcatgcattcaaacggagctgcgaaaaacttacagttttctcggtcactacttcttgaatatcctcaaaattcgtcagaaattgacgttttgcaggattacccttggactttgcacgatcaatttctctacccaatttctctagcaaattgtgcatctctatatctccatccggtgtaatacgtatgagggacttatcagccaacattgtaagcccaacatcatcttcaagtaattctttgacgttactgactttaaaaccattgaaaaaacatgcaatgcacttaaataactctctattttttttatttaacctatcgtagccgactcttagtgtttcctcaattttatcatctgaatcatttcgaagcctaggcatcatcttcacccactcatctttgtcccttccttttaaagatgaacccaagacactgagacccaaaggaagactaccgacaagctcggcaacttcaaatgctagttccttaaaatcatcaggtggagagtctttcccaaaagcatattgggatatcatcttaagagcaagaccttgagatggcagctccacctcatatacaaggtcaatctcatgagccttgagaagttgcttatcttgagtgatcacaattattctgcttccagaaccaaaccattcagcttttcccaccaaggtcttaagaaactctagattatccacatcatcaagaaggataagaactttcttgtgctttaacctttgctccaccacaccaaaatgatctatctttatgtccttttgacctaagatttccgagagaagttctttttcccaactcaacttcatgccagagacgtcactaccactggtgcttttataagttatgaaagcgcgatggtggaactggctagagagttgactgaaaagagctcttcctatggtactcttaccaatccctgactgtccccaaatcccgaccattattctagcttccttggattccaagcaaagtattgattttattgcctttatatgatcttcaattccgacgaagtcaccaaaaccctttggcagaggaaaaagtttattcgaaacatcattggctatctttttaaccataaacgcttcagtaggcctaataacaatagtcaattgtgtcaatagagaggcacccttaaaagcacaatcgaagattcgaagtcaacgcaagaaaaaaaaacccagtcttatataataaagtaaggttttctcgaagtcatgctctgagaatttgataagtcgcactctattctttcgatatgtgtaatttttttaatttttattgcttccaaaactgaaatataccataatcattttgcattaaatttaattataaaatattttgtttttgaaaaaatataagtaagaaattttaaatttatttctaaattaattttgttttactttcaatcattaaaagcaaatatcaaagattattttcatgatatataacatattttcctacagtttattcaaaaaatgaatttagcataaacaatgaataaataatttattctaattttcaaaacaatgaaaatagaataaatattaattctaattttattatttgatgatgtatcatttatcaatatataaataatacagatgcattaaaatatgatttgtctttttattttctctcattttataatataatatttacacatgcttttattaaattatttactataaatattatcatacctatcttactttgggattgtcttttaataatttttaatatttaaatatttaaataatagaattgcttttaaaaatatgatttcataagaaaataaatttgaaataaatgtaaaactaacctcattaaaaaagactcaaatgactaaaatcaatgaaatgtaaagtaaacaccaatgagaaaaagaaaattagggtgattgagtgtctcatgtaacgttttaaaaaaaaaaaaattgttactcatgtaacgtttgtgttgcaaacgtttttgaaccaattattaacatttatgctggaaataaacacatgaattagttataccctaaatatctacttttctgatataaatagcaaatatatatactattttttatcacacacaagtatttttatttcctttaacaattgacgaaaaatggaagatggcttgcggtattaacaacgtttacggcaagagtccctgtctttcaatttctctccttcatttaaggtttggactcgtattagctctcagatttcgttttctttttaagtttttgtgaatgatttcatattgtttaatgtttctaaaatggttatattgaatcttacttacatgtgtttttttcctgtttttttttgttctgaatttaattcaagatatttttgcatcttttagaaaaagtttttttttttgttttgtaggcatcaaatgcactttaaaccatttaaatggatataagataagaagctagcagactatggatagcatagtcaattgcaagagaaagtaaggatcaaggttttgatcattcataaaatacaaaatttgatgcaagtgatttagttaatctcgattaatggtggagcgataacaataggtatgaccatactaattatataactatttatttctctttccaacttaaatatttcgagttaaattttagtataatattttttatttttgttaataaaattaaattctaattatatgtagtttctgtttataatgttttgaattttaaaatgagaattataatttgttcacccaatatttctataaatagttaccaaattttgttgacatatatgttctttaaaacaacatttcagtaattttgttcaatctcatcttactctacatcaatttgcgttggcatccaaattgacaaaaaaaaaaacttaaaattgtgttcattttttagcataaggaagctcaattctcagcctctaaagaaaacatgatcaacattagttcactcatatgaggaaaattgtttaatctttttctatcattacttatatttaatgacttttccaataattgttttcaaacctataagtcaaaatattgaaagactcataatacaaataacaaaaatctatgcctataatacacattaaaagttatatttaggaccaaataattcataataaaagactctattatatataatgaagcaaaacaaaattaaattcttttatatgagtgacatattgaaatgatttaggatttttatttttcaagtttatcttttcttaaattttaagattttttatatgagagtatttgagaagccatcatgtgcgaccttttatctatatccttaattatatttgaaatttaggtttaattatatattatatcaagacaaaataaaatgtgtcttacgaaatatgagacaaaatgttttatatattttgggtaaactgttaatttcagtaaagcaagatttataaaaaggataatgatgtttaaaaaaataactttttatacaatagcgcattagatcaatgtcgagtggtgtgcttgaaatacggtttattatacctaggacgaatttgttgagtctcttaaaaagggcattggtttgtttgtaaagaaagtgtaatagcttgataaaatcttgcatttctctcaaacaatagatgatgatgatgatgtgaaacaatgaaagtgtgtaatttagaagttaggagatcattttagttttttcaataacataaaggtcgtcagttgattttgaaaatcaggacttaccaatatatcaattttgtcgattaaaaaaccaaatcttgagtagatattatttattgtgaaagtaaaaatgtaatatgtcatattgacatgctaattgaaactttaattatatatttattaataaattattttacaccacatgaattcatataaattataacaaaagaaaaacaaatttaatgagttcaaaatcaacaaaacatataacacttatttcaagctacccatattgtagatgctaatataattatattccataatgaaattgaaatttttattcaaaacaaaattaatttgctctctttaactgagagtaattccaaatattttttgaaagctttataaacaactaatttatgtaatatgatatacacaataaaaaatttgtttttaaatagctaaaaatatttcattatgtaaattttaaaattatttcatattttatattaattttaaacccacgcacattttctagttttgcaataattataaacactcatagaaatagtggaataaataaaacatacccgttccgaagatcctccccggctaaatttgatatatctgtgagagctttaacccatctttgtttctgatcctctggtttgtcctcgcatgtctttttaaagacatcgccaaagccaccgatctgttttctaacatgagaaggatcaacgccgtagaaaaccggaatcaccatttgttcccctttcttgtaacacttgtggatctccaccaattcattcaagcaccacgttgaagaagcatagttctcagagaagatgactattgagatcctcgcttctctaatggccgttataagcgcatcggcgattatgcagcttctcacgatgccgtgatccatgaatgtattgattgatctgcggtcgagcgcctcgattagatggctgaggaacgttttgcgaacatctaccccactgaagcttgggaaaacgtcgtatctccggctactaggagaagaagaagaagaagccatgggagacgatagagggaactcagagaagagacgaagatttttaagagaagtaaatcagcaagacatagtgtgagaaagagaggagaaacttcgtcttccttccctccaagacttgcatagaagacttactgtacaagatattcttttaagtggctaaaatcaaatctcctaacaagacaattgagacgtaaataataaagaaactcggcccttcctttcctcgaaagcttttttacactacatacaaagatatttttgaagattgaatttttgtggttgtcactgaattatgataagtcttagtctttgtacaagacagaaataatatttcaatttctaggcaagtagacagaaacttacattcgtttcctctacaaagatattttgaaaacacaaattttgtggttatcagttgtccttgtatataatgaaagaatatgcggaattgtagcaaagagtaagagaattatgaagaacaagagagttggtatatgagtgagaatgaccaaatcatattgatagaattagttagtaacctttgtgtgtttacaatgtatttaaagacacacaaagggaatatgaccgtttacaattaacgtaagactgaaagagacatgagagaagaggttccttggtcttgatggtgagagcgactggtccttggttgaccatgtcgctaaagacactcgtgagtcctcttcaacggctacaagagatatttgtgcgccttcactctttctagaagctctccatagacttctcatgtgttcggcccaactccttgtagcacatacccaatactaggcctttctccttatttgtacggatgaatctcttattgaatcttgatcaatatataatatacgtatgaattacctggacgccttcccatagcttctcaagcttgttgttacatctcactgtgaggtctttgagatgttctgggcgaaatttacttggattacatctcctaaggcaatcaagataaccgagtccagggagattcttgttccataaacaatctgctacctcgatgtcaatttctcctctgaaactgtgcataataatctcagggaaatttctcaacttggggcatcgtaggagattgaggtactcaagagattccgagttgagaggagttggaaaactttctagcacttcgcatttacaaagatctagtctctcgaggtttgtggctaaagaaagatctggaatttctttcaaatatttggaattacgcagaatcatcttctttaggcttccaagtaactgaaaacaaggaaagagagaataacagacgttcgtaaacatttcaaaaaattcatttaattttttgaacaaataaatcaataaacataacacatttctgttttcaaattgacaacaaaaacaataaaaaattagtacctgagttccattccacagcttctcaaggtcactatcctccattatgagttcaaccagatactcagccttaaaattagaaggcaaacgcttcaatggacaataacgccaccataggcatatgatgttacttgaaatctgagggaaaaatctcaaacttgagcttccatcactataatcctgagatggagacacattcaagagatatttttgaagattgaatttttgtggttgtcactgaattatgataagtctttgtacaagacagaaataatatttcaagttctaggcaattagacagaaacttacgttattcgtttcctctacacagatattttgaaacacacaaattttgtggttgtcagttgtccttgtacaagacagtttatcgtaagaatgtacttatgattgtttaatatcaaagtcttgtttcccaatacatacatgcacatggattaggagaataagtatatcgattatgaggattttaattcaaataatacagtgaaaatactaattaacactaactctctagtttgctaaattactcttttagttttcaataattgtattattagtttaaagtttggcttactgcgtcagcaaccactgtaggctgcgattgcatttgctgtattgtttaaggagcatttggtttctaagggtttcatgtactggatggaagaactcgtgtctgagaacatcctctgcgctggttcgttgcctcgggttaacggtcaaacatctatccacgaagtcaaggagcggccgtgggattgcgtctagaaactctctgcgtttgtgttgagttcacaccattttctcaactccagccccttcaacgtacaattcttgaaacaacaacacaaaaatctatgtgcattcaattcatctctcacgatcatctatcaaatcactttatcagtaatttacattttaaagttatatcatgttctggactaacaatgaaaaccattttatttgaatccatatgctggcggcaaagaagaacagagcatttgtattatgtcacacaaattcagcaatcaagtgaatggagagtttataagggaggtaagatgagattttacctcaggcaaagaggtttcactattgtgcagcttggctacttcccataagtcttcactgcttcgtagttactcaatgtccttcacgttcctaggaatcacaaggtcgttgtaagacggcaagaaagaaaaaagagtggaatcgactgatggtgtattatgtttttattattattattaggtcattggtgcaatatctgaagcaaacctgcacaaaccaattcagctaaaagaagcaccagagaaattagctttcacatcctaaatgtgacaatgactagctcacttgagctcagggtcgtggtggaggtcggtgagtgggacgggtggaagctggtttgtatgtatggggctgtggtggtggtgcgttatgttttaatcactgtttttttactgtgagtgtaggaaacgccacggtagcagtgatgcaattgttgctgatgaggttgctatttaaaaatttagttccaacacttttttgctgttgataattctcttgtgaaatacatttttctttaccaaatttattcattgatttaaagagagaaaaataacctttggtaacatacacgtagagagatatgtgtgtttcaaaagacaagtgtggagaaagtttgaacctttaacttgtttcttgcggaatctctcactatcactcaaagaaatttggatctctcgtgtgttgacttagaaaaacgaatgaagaagaaatagaaagagcacacacacaccatttaacgagttcacgtttccaaaccggaaacgctacatctcgccgagattgtactcggaaatccactagaaagcttggtttcggttacataaaccctagaggcgaactggacactcccagccgcctcacctaaacccccatctagctctcttcttgttgtcttttagggttcagcttgcctcctcttttatatgcagggttctcctctttttcttcaccctcgcatgctctgttttcccgtacaggggaagaagacaaacaaagcttatgactgaagcagaagttaattactcttctgtcccttgtctatttatgagaaacacaacagctgtttctagtgtgttctcaacttcccttaggtgaaaccttctttgtagactagagtctttggaagcttctcttccctgtagagtatcttaacacttaaggcaaaactcaacaacaagactgttaaatttacatcttttcaggaaagcgaatttttcaaagaagcaaaacagagagaagtaagaacagagtggttctgctgttctggacatggaaccataaaatttttctagttgtcagtactccatcatctgcaggagaaaatggcttgtgtgaaaaactaagaaatagtcttgtcattaccagtatagtcatggtcgatcccacgttcattacaaaacagagttgtaatacgtttcaggttgccttaacaatgtgataagctgtggagacggctaaggatccaggaaaggaatgttaacaatgtgagttcagtcaaggcagatctttaactgttcagggtcagcagtgaaaggtgtcgtccccatcagaccacacgtctatgttaggcccttgatgcaaagatctgaagcaaatcaattcagtcaagaacagccccagagaattagctttccatcctagatgttctagtgagtagttcaggcctacaactttaactctttacgatacaattaaagagtgcagcggcatgggggaacagcagcgacatgtattctcatcgacgtaggatagctggatgatacttcatggtttggaagtggaccagacaatgtctcctgtagaaagtttaaaagctctttccttcacccgaaggattgttccttatgctggttacatctttggccgaagttaggccaaaaacgcttctgccttttggctattgaatcagcggatatgcaaatgttgctgattcttgttgttttctgtacccaaagtctgatttattcattgctaataaagagaaaaacaacctttactaacataaaccttgacatctatgttttaaaaaaggcaagactattttgggtagtacctgagttcaagtaggtacgctcccaaattcaatgtggaaatagatagatgtatggtacaatacaaaaccatgcgaaagatgtttttccagaatatgctaaagtgtggctttctgaaacatttattctttcaggaaaagcgaaatgttcaaaacaaacgcagagttggataatgtaattaattatcattatcattatcattatagtcatagtcgatcccaagttatcctaaaacagagcaaaacagaatgataagatgtttcagttaccagaaacaggaaacaagataggaattcctttatcttgttcttcagttatcatgtaatcaacacacaaagcttccccctctagagatgttgatgatgatggttctccctgccctaacgaaagctccatatttagagcggccaatcctgtgtccgctacaattaggccatagggtaagttgatatcttcttcagatgtccccgatgtcatctgcattataaatcaaacgatagattctattaaatagtctgtccctatggtatttcgatcctggaaaatcaaatcaaaagtcaaaagatacccgcatccgcttctcgcttctcgtagtctgttggttgttctcttcttgagagacatacatgagtcgtacaccgcattctttgatcctattggagcaacaaaacttaaactccacatcgttgaaattcaatttagatggaagatcttcagaccggaacttgaaggaacagaaaaacagatgatccgtcttacaaagctccagttctgcatctttagaaaatgatttctgatactgtttgccattgaagccaacgtttaccttcaagaatggataaaaacccttgcccttggagagaggttcaaccacgacgcaagccttaaatcgcaagaaattttgagaaagagagctctgaggtacaatgacagttagggaatctccataagctcgatacgtgaaatacttagggatttcttcacctggtaaggccacaggcttgaagcatgatcgtaggatgagctctcgcgcatctctatccaatttgaagcaattacggaagctaaaatgttcctggaggtatgcaacacgatacaacttatcccagatatattcaatgttttcagataatggtacacaagaaacgtggtcttccattgtcgctaccacagttgcatcactcaacgccttgatgacacctctacagtctgtaaagtcggcgagctcaagtcttgtaagtctgaaaatgtttggggagatggttttcaacctctggcaacaatacatcataagtacagtgagcctcgtgaaatcctcaatgcagcagggaacttcttcaatggcggtgttttgcagatagagacattcgattctagttgaaatcagaggaaaagttctcagacttgagcaaccactgagatcgaggatcataagagatgacaagttgacatcggtcggaagaacctccagccctgtgcattctttcatttctaacttcaccaatctatgaagattcccaattgtagaagggatttcttcaatggcggtgttttccagatagagccatacaatattagttgaaatcagaggaaaagttctcagacttgagcaaccactgagatcgaggatcataagagatgacaagttgacatcgatcggaagaacctccagccctgtgcattctttcatttcaaagctcaccaatttttggagatttcctatagtagtaggaagtgtcaccaaacttttgcaattgttgagtttcaaattcttcagattagtggcctttgaaagatctggaatttcttcaatggcggtgttttccagatagagccatttgatactctctgaaatcagaggaaaacttctcaaacttgagcaaccactgagatcgagggtttcgagagatgacaagttgacatcggtcggaagaacctccagccctgtgcattttttcatttctaacctcaccaatctatgaagattcccaattgtagaaggaatttcttcaatggcggtgttttccagatagagccatacaatattagttgaaatcagaggaaaacttctcaaacttgagcaaccactgagatcgagggtttcgagagatgacaagttgacatcggtcggaagaacctccagccctgtgcattctttcatttccaacctcaccaatctatgaagattcccaattgtagaaggaagtgtcaccaaacttttgcagttgttgagtatcaaagactcgagcttggtggcctttgaaagatctggaatttctgtcaggttttcagattctgacagatccatcccttcgagacttccaagcgactgaaaaaaacattggtatgcttcaatcattatcgatgataatcattttaattttatactgtatatgtttaaaattataattaaacattattataagacataaccgtggtaagacataaccgtggatcacaagccataataacaaatttgggtatagttaattagttatataacagaaggtaaacaaaaatcagcatagcattaacaatgtacctggatgccttcccatagcttctcatgcttgtagcccctcacattgagaaaagcgagttgttctgggcgaaattcacaaggcatacatctcgtaaggcagtcgagataatctagtccagcagggagattcttgttccagaaacaatcttctaccacgatctcatttctcccttccggaaagtcaacgtctgaacatcccattttgattgctggaaagtttctcaaattcgggcatccagtgagattgaggtactcgagagattccaagttgagatcggttggaaaactctctagctttttgcaatcactcatatctaaatagatcagtttagtggcattctgaatcgaggaaggaagtgtcaccaaagatttgcatccaacaagatctaattcctcgaggtttatggctaaagaaagatctggaatttctttcaaattgttggaatacctcaaattcatctccttgagacttccaaggggctgaaaacaaaatatggaaaaagagaatacacacgttcacaaatataccacagttctgttctaaaaactgacaactaataaaatttagaattcgtaccagagttccttcccacagtttctcaagcttactatacttcattatgaggttaactagatattccgccttaaaagtagatggcaaagacttcaatggacaatcatcccagtctagcaatctgagtttaaggggcaaataaacgaggctctgaggtagatccccgtaataaccaatttctagatattgcagattacgcatgcctttgaacgattctttatctattaataacggccttgtcgaaaaatattcctcgaatggcaaacgtattccaagaagagtttctgtcccctgaaaaaaaatccgaagaaaactaatataatcttaacaatcgcaaccctttttaattttctgacacatcaaagctacattttaattacgcatgaggcaacaattgcttaagtttatcaatccccaaattacgattatattaatataaagtcatgcattcaaacggagctgcgaaaaaaacttacagttttctcggtcactacttcatgaatatcttcaaaattcgtcagaaatcgacgttttccaggattacccttggactttgcacgatcaatttctctacccaatttctctagcaaattgtgcatctctatatatccatccggtgtaatacgtatgagggacttctcagtcaacattgtaaacccaacattatctttaagtaaatctttgacgtaactgacttcaaaaccattgaataaacacgcgatgtaaaggaacatatcttgatctttttgatgtaatctatcgtagctgactcttaatgttttcataatatctccgttcaaaccatttcggagcctaggcatcatctccatccaccattctttggtccttccctttaaagacgaaccaaggacactaagacccaacggaagattaccggcaagcttcgcaacttcaaatgctagttccttaaaatcatcaggtggagagtctttcccaaaagcagatcggcataacatcgtaagagcaagatgttcagatgggaactccacctcatatataaggtcaatctcatgagccttgagaagttgcctatcttgagtgatcacaattattctgcttccagatccaaaccattcagcttttcccaccaaggtcttaagaaactctagactatccacatcatcaagaaggataagaactttctgttgctttaacctttgctccaccacaccaaaatgctctatctttatgtccttttgacctaagatttccgagagaagttctttttcccacctcaacttcatgccagagacgtcactaccgctggtgcttttatatgttatgaaagcgcgatggtggaactggatagagagtttactgtaaagagctcttcctatggtactcttaccaatccctgattgtccccaaatcccgaccattattctagcttccttggattccaagcacaatactgattttattgcctctatatgattttcaattccgactaagtcgccaaaatcatccgatggtgtcatagtttttctcaaaacatcctcggcaagctcttcaatcatggctgcttcactaggcctaataacaatagtcaactgtttcattaaagaagcaacgcaaaacaaaaaaatcacgaagtctattcattgaaataccatttccgaagatcatatccggccataactgcaacagctgctagagcttgcttccaactttgtttctcatcctctgatttagccttgcatgtctcttcaaagacctttccaaattcgccggtctgttttttaacttccgaagcatcaacgtggaagaaaatcggaatcaccatttgattcaaattcgtataacacttgtgaatctccaccaattcattcaggcaccaggtggatgaagcatagttcttagagaagataacgattgctattctcgattcttttattgccgataaaagctccgggccgattgagcggctcctctcgatctcatcatctatgaatgtgattgctttgcccctgagctccttgagaagatggctgaggaatgagtcacggacatcttctccacgaaagcttgggaaaacgtcgtatctccggctgccagaagaagaagctatctccatatcatcatctttggatgtatccatcatttcacggtcgagctcgagctccttgacaagatggccacgaaacaatttgccgaaattttctccactgaagctcgcgaaaacattgtatatccatctgagaacattgtatatctatctgaagcaagaagacgccatggcagaggatgagagagaagagacgaaatttctcaaaggaaaactctttgaagtatatcaataatacaacacagtaacagagaggagaaacttggtcttcctttcctcgaagacttgtatagaagacttactatacaagatattgttttagtggttaaaatcaaatcccattacaagacaattgggacaaataatacgtaaacttggtcttcctttcttagaagacttgcatagaagacttactgtacaagatatttttttagtggttgaaaaatcaaatccctaacaagataaggccataattatgtgatacagaaacttccccttcctttccttggaaagcttctactctataacgataagtcaattttgtggctatcagtcgtcactgaatttatctatgatgatgagacgtagccattctacaagatttcaagataatttctaggcaaaatagacagaaacttcctcgagagctacttttcctctccacagatatttttgaagacccaaaattttgtggctgtcagtggttcaagacagaaacaagatttcaatttattttaacaatgttaaggttcactaatatcaaaagtctggttttcctattcatactgtacatacatgcatggaaattaggagaataattagtatatcgattatgaggattataattcaactaataatacagtgaaaacactaacaacaaactatctagttttctagagctgtgtggtgtggacagtggagagaatattttcatgtaaagttttcttgtttacatttacaattgtaatattagtttagagttttggcttactgtgtcagcaaccactgtaggctgcgattgcatttgctgccgtttaaggagcatttggtttctaagggtaggtttcatgtactggatggaagaagtcgtgcttgagagcatcctctgcactgattcgccgtctcgggttaacggtcaaacatctatcaacgaggtcaaggagcgaccatggaattgcatctagaaactccatgcgttttgggttgagttcgtaccattttctcaactccatccctttcaagtaccttgacttgtacaattcctgaaacaacaacacaaaaatcaacctgaactcatctctcacgatcatctatctaataattttgtcggtaatttacatttttaagatatataatgttttggaacacaaaatgctaacaatgaaaacccttttgtgatatttgaatccaaatgctggcggcaaagaagaacagaacatgtatgttatgttcacaccaatgcagtaatcaaatgaatggagagtttacaagggatgaaagatgagattttacctcatgtaaagaggattcacggttgtgcagcttggctacttcccataattcttcactgcctcgtagttgcgcaatgtcctttatgttcctgggaatgacaaggtcgttgtaagacggcaagaaagaagaaaaaagtggaaccgagtgatggtgtattcagtcaagtcagatcttaactgttcagggtcaccagtgagagctttccttcccattatgaggtataacaaagtaactcccgcagaacacacgtctttttttaggtccttggtccaaagaccattcagccgagaacagccctagagaattagcttttccatcccatcctagatgtgttaatgagtagctcagggaacaagatattttcatatggatttaactagtatcaagggaagtgatatatctgcaggaaaaatggcttgtgtcaaaacatatgaaatcgtcttgccattatcattatagtcatgctcggtcccaagttatcctaaaacagaggaaaaccgaataataagatgcttcagttaccagaaccagaattcaagataggaatttcttcatcttgttgttcacttatcatggaatcaacacacaaagattccccctccagagatggataagaagaaactgatgatgcttctccctgccctaacgaaagctccatatttagagcggtcaagcttgtgtccgctacaatttggacacagggtaagttgatatattcttcagatgttcccgatgtcatctgcatcgtaaaccaaaggatcgattctgttaaatagtctgtcactaaggtattgatcctggaaaatataataaaacatcaagagatagctttgcaattttcagttctaattatgtcaaaaggcttacccgcatccgcttattgcttctcgcagtctctacaacatcacatttttctcgagactgttggctgtactctgtttcagagcttccatcactatcatctggaaatggagacacattcaagagtcgtataccacattcttttatcctcttggagcaagaaaagttaaactccacatcgttgaaagtcaatttagatggaagatcttcaggctggaagttgaaggaacagaaaaccagatgatccgtcttacacaaccgcaggtctgcatctttaaaaaatgatttgcaatacagtgtcccattgaagccagcatttacctcacaatatggaccccaactcttgccctcagttagaaggtcaaccacgatgcaagccttaaagcaagaatacttgagaaagagagctctaaggtaaagtgacagttagggaatctccataagctcgatgttgaaaatacgttggcacttctccacctggtaaggacataggcttgaacaatgaccgtaagatgagttctcgcgcatctccatccaatttgcagcagttctggaagagataatgaaaggccccgatccggactacctaagtccggacgagatctctcgacccaagtcactaagtgactcgacccaagtcactaagtgactcgaccctaaccatttatgaggttcattccctagtgtaatccgtttcatacaattctgtgattcaatatatgagacgaatagagtaaacaaacaatcggatactttattaattaagtaaaggattcgatacaacttatgagtttgcatataagctattacaagtaatttaatcgatccctagactatccgaaactatcaccacccatcattccggccttgagtctctcgcgcctaagccaagtccttcccactatcaccattggttcctgaaagtcatagagccataagtaatttcatttacttagtcatatgcaagtccatgcaatgctccatagtccttacactactcggatccgcggagaggattcggagaagggaagatcgcgcataagtccggccgattctcggtaggtcaattaagacccgccggtcctccgccgagccgcgtctccgccccagccgatcccttgcccggaccgaggcttgtgtaggttgcacatgacccgattctacccagcccattagtcgttcctttcaaggaatcccgactcatttaacgcattctagaatccttagactcgaggtctaggattccttaccttccttcacgatgttcggtcgatccgacccttcttcttccttgccggccacagtccgactaccgatttcctccgatgatttattctcccgaaagggagagagtttaatggtgagtttccggtattttccgtgtgttctgctgcctctaaaggtcttgggcgccctcccttatataaggagcgaattgatgcttcccgaaggatcacctccgttccttgcacctttccgaagagttgcatctctcggtccgtaactgctcgcccttatccaccctttgggcgagcacccgttcgaccgtaaccgcccaagtaaccgtccgggtaaccgcccagctggtcagacagtcgaccagctgcctcgagctcaaccgtcactcgcccagctgctcgagctggactgtcactcaacccgagtaaccgtcactccttccagctgagcttgagcttcggacgagctgacccagctgattcctttacgatcctagcttagcccgcatgatttccctttgtccgagcttatggccaactccttcccacttgtccgagactccaccttcttttctcggaccaagtcccagccaacgatcctattgaggatcgcgggcgttacaagtctcccctttgaattggattcgacaaatcgaatccaagttgatctttacccatctccttgaaccactccggaaaattggccttcatcttagtctcggtttcccaagtgtattcttcacggcctccacaattccacaagatttttaacaaatccattgatttcccccgagtccctttcttcatttggtccatgatccgtaccggccatgcttccaccgtcatgttctcctttaacccaggaggtacatcttccatgctttcttcttgttcacttaagcacttccgtagttgtgatacatgaaagacattgtgaaacgcgtctagttttggaggaaggtcaagtttgtatgccaccgcccctactcgttcgatcactttgtacgggccaacgtaccttggccttaactttttccttgatgtgaatcgccctgcccctttgtaggtcatcgcctttaaatacaccaagtctcccacttggaattctaattcctttcgacgcttgttggcgtaacttttctgacgatcttgggcttcctttaacttgatttttaagaacttcattttcttcgtggtttcatccacgaccgcaggtccgaacaaccgacgttcgcccactggcgtccaacacaacggtgttctaccagctcggccatacaacgcctcatagggagacataccaatactagcttgaaaactgttattgtacgcaaattctactaaccttagatatttctcccagtttcctccccaatccaagacgcatgccctcaacatgtcctcgagggtttgaatcgttcgttcggactgtccgtccgtctgtgggtgatatgcagtacttagattcactcgagtccctaagaccttttgaaaaggcttccaaaattttgacgtgaaccttgtgtctcggtccgacactatactaaccggaatcccatgtaatcgcacgatctcgtctatgtacttctcggcaatgatttcggctgcatccttatccgagattgccatgaagtgcgcagacttagtcaatcggtctactacaacccataccgcattgtgtttggacttgatccccgtcggcagtcccgtgacgaagtccatcattatatggtcccacttccattccggtataggtaggttttgtaacattccacttggtacttgatgctcttccttggctacccacctggccacatctttcttcattcctacccaatggtagtatcttttaaggtcgcgatacatcttgttcgacccaggatggatcgagaacttcgattgatgcgcttcttttaggatttcctccttcaacgccttatcgttcggcccacatactcgaccgttcaccacgatagtaccattgttcgagctttggtactcggttttattgttttgtgcccacccttttatttcttcatctcgttcttgagccgaccggatcctactaagtaggtcggcttgattggcggctctcaaccctaagggttcaacttccttagacaaagcattcaaatgcaatgtccccatcatgttaaccaaattcacttggttcctttccgcttccactaccgtgcgcagcctgctcaaagcatctacaacttggttggccttgcccggatggtacgctatgttcaagtcgtaatccgccacaagttttatccaccttctttgccttagatttaactccggctgggtgaatatgtattttaggctcttgtggtcagtaaagatttgaaccttggcaccatacaaatatgatcgccaaatcttcaacgcaaatactaccgcggccatttccaaatcattcgtagggtagttcttctcgtgtttccgcaattgcctcgaggcgtatgcgataacactccccttttggatcaatacgcatcctagtcctactatggatgcgtccgtgtagaccgtatagggctcaccttcctccggtaagaccaacaccggtgcattagtcaacatggcctttaactccaggaagcttctctcgcattcctccgaccagttgaatgcggtgtcttttccggtcaattgagtcatgggttgggccatgctcgcaaatctctcgacccaagtcactaagtgaatggaccctaaccatttatgaggttcattccctagtgtaatccgtttcatacgattctgtgattcaatatatgagacgaatagagtaaacaaacaatcagatactttattaattaagtaaaggattcgatacaacttatgagtttgcatataagctattacaagtaatataattgatccctagactatccgaaactatcaccacccatcatcccggccttgagtctctcgcgcctaagccaagtccttcccacgatcaccattggttcctgaaagtcatagagccataagtaatctcatttacttagtcatatgcaagtccatgcaatgctccatagtccttacactactcggatccgcggagaggatttggagaggggaagatcgcgcataagtccagccgattctcggtaggtcaattaagaccctccggtcctccaccgagccgcgtccccgccctagccgatcccttgcccggactgagtcttgtgtaggttgcacatgacccgattctacccagcccattagtcgttcctttcaaggaatctcgactcaattaacgtattctagaatccttagactcgaggtctaggtttcccttaccttccttcacgatgttcggtcgatccgacccttcttcttccttgccggtcacagtccgactaccgatttcctccgacgatttattctcccgaaaggacgagagtttaatagtgagtttccggtattttctgtgtgttctggtgcctctaaaggtcttgggcaccctcccttatataaggggcgaattgatgcttcccgaaggatcacctccgttccttgcacctttccgaagagttgcatctctcggtccgtaactgctcgcccttatccaccctttgggcgagcacccgttcgaccgtaaccgcccaagtaaccgtccgggtaaccgcccagctggtcagacagtcgaccagctgcctcgagctcaaccgtcactcgcccagctgctcgaggtggactgtcactcaacccgagtaaccgtcactccttccagctgagcttgagcttcggacgagctgacccagctgattcctttacgatcctagcttagcccgcatgatttccctttgtccgagcttatggccaactccttcccacttgtccgagactccaccttcttttctcagaccaagtcccagccaacaatcctattgaggatcgcgggcgttacagataacctgccctacaggccaaatgtttgtggttaaggttttcccagaaacgatgacgagtatactcaatgttttcatataatggtatataagaagagtgatcttccacactggcatcactcatcgccacgttgacacctctacattctgtaaagtcgacgagcttaagaattgtcagtctgaaaatgtttggcgagatgtttttcaacctcttgcaacaatacatcataagtacagtgagccacgagaaattttcaatgcagcagggaacttcttcaatagcggtgttttccagatagagccatttgatactctttgaaatcagaggaaaagttctcaaacttgagcaaccactcagatcaagcattttaagagatgacaagttgacatcggttggaagaacctccagccctgtgcattctttcatttccaacctcaccaatttttggagattcccaattgtagaaggaactgtcaccaaacttttgcaattagagagatataaattcaccagattagtggcctttgaaagatctggaatttctgtcaggtttccacattctgacatatccatctccacgagacttgcaagcgactgaaacagaaattaaaaaaaaaaattgttatgcttcaatcactttcattttaatttaataactatacacatttaaacaaaattataatcaagacataattctgtatgtaaatataaaccgtggaatcacaagccattttgacaactttaatttggttatacgtaattatttacaacagaggttaaacaaaaatcagcaaatgctataatattaacaatgtacctggacgccttcccatagcttctcaagcatttggttgcctctcactatgagacgaaccagatcatttgggcgaaattcacatggcatacatctcacaaggcaggcgagataatcaagaccagggagattcttgttccatatacaattttctacgcggatctcaattccatgtggcgaagtagttgaagtttccattttaaacacagggaaatttttctcaaattatcgtaataaaggagaccgaggtactcaagagattccaagttgagatgagttggaaaactctctagctttgtgcaacccctcatatctaaatagatcagtttaatggcattctgaatcgaggaagaaagtgtcaccaaagatctgcattccgaaagatttaattcctcgaggtttctggcattagaaagatctgaaatttctctcaaatatctggaaccatgcatattcatcctcttgaggcttccaagtggctgaaaacaaaatagggaaaaacataatacacacattcataaacatttcaaatagattaatttttaccacaggtctgttctaaaaattgacaactatttcaatgaagaattaagtaccacagttccttcccacagcttctcaagcttacttcccatcattgtgagttgaatgaggtaatccgccttaaaactataaggcaaacatttcaatggacacctatcccagtctagcaatctgagtttagggggcaaataaacgaggctctgaggtagatccatataatccccagtaactgatagacattggagattacgcatgccttggaacgatttttcatctattggtaatagctcttttgatcggaaagctgtgcagaaacgtattccaagaactgtttctgtcccctgaaaaaaatacgaagtaaactagtataatgatataatctttacaatggcaaccgtttttatttttctgagacatcaaaagagctagccacgttttaattaagcaggagaggcaacaattgttaaagtttatcaatccccaaatgacgattaaattaatataaagtcatgcattaaaaggcatctgctaaaaacttacagttttctctgtcaatacttctcagagtatcctcaaaatccgttagaaatcgacgttttccaggattacccttggactttgcacgatcaatttctatacccaatttctctagcaaattgtgcatctctatatctccatccggtgtaatacgtatgagggacttctcaaccaacattgtaaccccaacattatcttcaagtaaatcgttgacgtaactgacttcaaaaccattgaataaacacgcgatgtaaaggaacatatcttgatctttttgatgtaatctatcgtagctgactcttaatgttttcataatatctccgttcaaaccatttcggaacctaggcatcatctccatccactcttctttggtccttcgttttaaagacgaaccaaggacactgagacccaaaggaagattaccggcaagcactgcaacttcaaatgctagtgccttaaaatcatcaggtggagagttttccccaaaagcagatcggcataacatcttaagagcaagatctagagatgggaacttcacctcatataaaaggtcaatatcatgagccttaagaagttgcatatcttgagtgatcacaataattctgcttccaggtccaaaccatttagtttcccccaccaaggtcttaagaaactctggatcatccacatcatcaagaacgataagaactttcttctgatttaacatttgctccactacacctaacttccctcctatctttatatccttaccaagaatttttgacagaaatatttcttcccattcagacttcatgctatagacgtgaggtacgaaagcgtgaaagtggaattggcaaaagagttgactgtatagagcttttcctatggtactcttaccaatccctgaaggcccccaaatcccaaccattctagcttccttggattccaagcacaatattgaattcattgcctctaaatgagcttcaattccgacgaaatcgccaaaagaattcgatggtgaaataagcttattcgaaacatcattagctatctttacaaccatggctgcttcactaggcctaataacagtagtcaaattgtgtcaataaagaggcacccctaaagcacacaatccaaaaaaagaagaagcagatagcatagttcagagataattaaaaacacactcagagataatgaaatcaaaaacaaagtacccgtttcgaagatcttctccggctatatttgttatgtctactagagcttgcatccatctttgtttctgatcctcttctttgtcctcgcatgtctttttaaaaacatcgccaaattcgccggtctgttttctaacttccgaaggatcaacgtcgtaaaaaactgaaatcaccaattgaccccaatcatttaagcgattgtggatctcaaccaattcatccaagcaccaagtggaagaagcatagttcttagagaagatcacgattgagatccttgcttctctaatcgctgatattagctcaggggctattgtacggcttcgttcgatgccatgatccatgaatgtattgattgatctgcggtcgaacgcctcgagtagattgctgaggaacgtcttgcgaacatctaccccactgaagcttgggaaaacatcgtatctccggctgcaagaagaagaagccgccgccatggaatatgatgaggagaagataagtacagtaaatcgaatacacagtgattattgattagagtgattactgtgaggccggtccttaagggtgggatgcgcaaggaaacttcttattttttgcccataggccataaatataaaaatgtagcgaaatgtttgtaatgaggttcgaaccaaggccaatgaagcatttaaaacctgatttcaagtattcaaccgctcaactacaagttatgatgcctcttaaatcaatattagatttattttggtgtccaaggtctttgcttattgtaaaaaggacagcttatcgtaaacatgttgagtggggaattcagtctttgtttccctatacttacatgcatagaaactaggagaatttgtaagtatatcaattatgaggattttaattcacataataatatagtgaaaacattaactatctagtttgttaaaaaaaaaactcttttagctttctagagttgtgtggtgtggtgtggatggacagtggagtgaagatttctagaaactctctgcgttttgtgttgagttctcctcattttctcaactccatccccttcaagtaccttgacacgtacaattcctgaaacaacaacacaaaaatctatgtgaattcagctctcacgatcatctatcaaatcactttatcagtaatttacattttaaagttatatcatgttctggactaacaatgaaaaccattttatgtgatatttgaatccatatgctggtggcaaagaagaacagagcatttgtattatgtcacacaaattcagcaatcaagtgaatggagagtttataagggatgtaagatgagattttacctcaggcaaagaggtttcacgattgcagcttggctacttcccataagtcttcactgcctcgtagttactcaatgtcctttatgttcctaggaatcacaaggtcgttgtaagacggcaagaacgaaaaaagagtggaatcgactgatggtgtattatatttttatttattattattaggtcattggtgcaaatatctgaagcaaacctgcacaaaccaattcagctaaaataagcaccagagaaattagctttcacatcctaaatgtgacaatgactagctcacttgacctcagggtcgtgattgagtttggtggttgtggccggtgagtaggacgggtggaagctggttttgtatgtatggggcagtggtggtgctgagttatgttgtaatcactgttttttactgtgagtgtaggaaacgccatggtagcagtgatgcatttaatgctgatgaggttgctatttaaaaatttagttccaacacttttttgttgttgataattctcttgtgaaatacatttttctttaccgaatttattcattgatttaaagagagaaaaataacctttggtaacatacacgtagagagatatgtgtgtttcaaaagacaagactgttatatttacatcttttcaggaaagcgaatttttcaaagaagcaaaacagagagaagtaagaacagagtggttctgctgttctggacatggaaccataaaagttttctagttgtcagtgctccatcatctgcaggagaaaatggcttgtgtgaaaaactaagaaatcgtcttgtcattaccagtatagtcatggtcgatcccatgttcattataaaacagagttgtaatacgtttcaggttaccttaacaatgtgataagctgtagagacggctaaggatccaggaaaggaatcttaacaatgtgatggtgtgaattcagtcaaggcagatcttaactgttcagggtcagcagtgaaaggtgtcgtccccatcagaccatacgttttatttaggcccttgatgcaaagatctgaagcaaaccaattcagtcaagaacagccccagagaatgagcttcccatcctagatgttctagtgagtagttcaggcctacaactttcactcttctcgatataattaaagagtgcagcggcataggggaacagcagcgacatattttctcatcgacgtaggatagctggatgatacttcatggtttggaagtggaccagacaatgtctcctgtagaaagtttaaaagctctttccttcacccgaaggattgttccttatgctggttacatctttggccgaagttaggccaaaaacgcttctgccttttggctattgaatcagcggatatgcaaatgttgctgattcttgttgttttctgtacccaaagtctgatttattcattgctaataaagagaaaaacaacctttactaacataaacattgagatctatgttttaaaaaggcaagactattttgggtagtacctgcactcaagcaggtacgctcccaaattcaatgtctttcttaaaaatagaatatgtttttacaaaacaaaacaatgccaaagatgtttttccagaatatgctaaagtatggctttctgaaacatttattctttcaggaaaagtgaaatgttcaaaacaaacgcagagctggataatgtaacggactttggttctcctaaagatcttcatcatctgcagttaattatcattatcattatagtcatagtcgatcccaagttatcctaaaacagagtaaaacagaatgataagatgcttcagttaccagaatcagtagacaagataggaatttcttcatcttgttcttcagttatcatgtaatcaacacacaaagcttccccctctagagatgttgatgatgatgcttctccctgccctaacgaaagctccatatttagagcggccaatcctgagtccgctacaatttggccatagggtaagttgatatattcttcagatgtccccgatgtcatctgcattataaatcaaacgatcgattctattaaatagtctgtccctatggtgtttcgatcctgaaaaatcaaaccaaaagtcaaaagatagctttataattttcagctctaatcaaaagtcaaaagatacccccatccgcttctcgcttctcgtagtctgttggttgtactctgtttcttgatagacatacaagagtcgtacaccgcattctttgatcctattggagcaacaaaatttaaactccattcagaccagatcttgaaggaacagaaaaacagatgatccgtcttacaaaactgcaggtctgcatcttcaaaaaatgatttctgatactgtttgccattgaagccaacatttaccttcaaggatggataaaaacccttgccctcggagggaggttcaaccacgacgcaagccttaaatggaaagaagtattgagaaagagagctctgaggtaaagtgacagttagggaatctccataagctcgatacgtgaaatacttagggatttctccacctggtaaggccacatgcttgaagcatgatcgtaggataagttctcgcgcatctctttccaatttgaagcaattgcagaagctaaaggattccctacgtaagcgccaatctacgacgtagttcttataatcatcatcatacaacgcatcccagaaacgttcacatgtatattcaatgttttcagataatggtacacaagaaacgtgatcttccattgtcgctaccacagttgcatcactcaacgccttgatgacacctctacagtctgtaaagtcggcgaacattagacttctcagtctgaaaatgtttggggagatgtttttcaacctctggcaacaatacatcagtagtacacggagcctcgtgaaatcctcaatgcagcagggaacttctccaatggcggtgttttccagatagagccatacaatattagttgaaatcagaggaaaagttctcaaacttgagcaaccactgagatcgaggatacccagagatgacaagttgacatcggttggaagaacctccagccctgtgcatcttttcatgtacaaacgtctcaaattttgaagattcccaattgtagaaggaagtgtcaccaaacttttgcagttgttgagtatcaaagactcgagcttggtggcctttgaaagatctagaatttcttcaatggcggtgttttccagatagagccatttgatactctttgaaatcagaggaaaagttctcaaacttgagcaaccactgagatcgagggtttcgagagatgacaagttgacatcggttggaagaacctccagccctgtgcattctttcatttccaacctcaccaatttttggagattcccaatagtagaaggaagtgtcaccaaacttttgcagttgttgagatataaatgcttcagattggtggcctttgaaagatctggaatttctgtcaggttttcagattctgacagatccatctcttcgagacttccaagcgactgaaaaaaacattatcgatgataatcattttaattttatacctatatatgtttaaaattataattaaacattattacgtatgtatgtaagacataaccgtggatcgaccacaagccataaaaacaaatttgggtatacttaattagttatataacagaaggtaaacaaaaatcagcatagcattaacaatgtacctggatgccttcccatagcttctcatgcttgtagcacctcacattgagaaaaacgagatattctgggcgaaattcacaaggcatacatctcataaggcagtcgagataatctagtccagcagggagattcttgttccagaaacaatcttctaccacgatctcatttctcccttccggaaagtcaacgtctgaacatcccattttgattgctgggaaatttctcaaattcgggcatccagtgagattgaggtactcgagagattccaagttgagatcggttggaaaactctctagctttttgcaatcactaatatctaaatagataagtttaatggcattctgcatcgaggaaggaaatgtcaccaaggattcgcatttacaaatatctacttcctcgaggtttatggctaaagaaagatctggaatctctttcaaatatttggaaccacgcagaaacatctgcttgagtcttccaagtggctaataacaaaataggggaaaagagagtacacacgttagtgaacattttaaacagattcattttagtttttctaacagatttatgtttagaaattgatcactaatagaattagtacctgagttccatcccacagcttctcaaggtcactattctccattctgagtttaaccagatactcaaccttaaaattagaatgcaaacgcttcaatggacaattattccacaatagcaatctgagtttactagggaaataaacgatgccctgagtgccttccatacgtgagcaatcaactgatagatattcgagattacacatgccttctaatgattttaaatctattaatagcacccccgaacaatataacgtcctcagtttaatggcattctgaatcgaggaaggaagtgtcaccaaagattcgcattcagaaagatttaattcctcgaggtttatggctaaagaaagatctggaatttctttaaaatatttggaataccacaaattcatcttcttgagacttccaaggggctgaaaacaacatatggaaaaagagaatacacacgttcacaatttttttaaaacagattcatttgaagcttttctaacatatatatgttcataaatataccacagttctattctaaaaactgacaactaataaaatttataattcgtaccagagttccttcccacagtttctcaagcttactattcttcattatgagtttaactagatactccgccctaaaagtagatggcaaagacttcaacggacaataaacccattctagcaatctgagtttaaggggcaaataaacgaggctctgaggtagatccccatctgaccaataaccaatttctagatattggagattacgcatgcctttgaataatttttcatctattaagaacgaccttgtcgtaagatatcccgggtgtggcaaacgtattccaagaagaatttctgtcccctgaaaaaaaatccgaagaaaactaatataatcttaacaatcgcaacctttttttatttttctgacacatcaaagctacgttttaattacgcatgaggcaacaattgcttaagtttatcaatccccaaattacgattatactagatattgacccgcggtgtaccgcgggtggatatgttcatagaaaagttatacatattttttatacgaattattatttttatataaataatattttcttaacacataatttttatttatgtaaatcttggataattcatgttttatgttctcatatttgttagtttaatattaaaattcagtatttgtttttttggtttgggttttttagagataataaagatctaaaattcatgtttggggtcgatatttttatcagaaaattaaatatttttattttaattaatattatttatatatataatatattcaagaagtacatcaaaggcctatatttttattaaataaaaaataatatttttgtctttaaaatgatctatagatatatgctattgtttttttatgtatgatactatgatacacctctgtatgatttttataactaattttttttaaaaaaattaaaattttttttagtgtttaaaattgtataattgtattttgattgttaattttaggatttcatccatagtatatcatcccgtatcaatatcgatccaaactcatcccaccatataacctcgtcccgtgaaattaaaacttcataaaattttaaaatcattaatattttaaaaaaatttatagactttaacttttaaaaaagtttaaaaatttgtaatacttaacttttaataaagtttcaaaatatataatattttaaaactttaaaacttttacttatttaaaataaagaaccaaagtaaaacgaaagctcctgctctttcgttttcagaatcactttggtcttttttatagtataactcttaacgatttcctcatttttaagcaatgtgagacctttaaaacttattttttttcatcgatggagtattatatgtttgttttaagaaatttaaatttcatcagatgcaaaaaaaatctaatattttattaactatatgtattttatatataaagtaaaaaaaaatagatataaaaacaaatatagtgacagaaaaattatatatttatatttaatgtcgatatatagattttagaaaattagccttaatcgaatatagttcaataaagaaagatttagttaaggataaaaatttaggaaagagttaattcaactaattaatgcaattaagctaattgtaattttttagttataaagtatttgattgagattaaatttgtaaggactaatattgaaaatagtaaataggtgagggatttttggccaaaaaccctaccaaaaatgtatatgtagattgacataaagtcatgcattacaacgtttaaggagatgcgaaaaacttacagttttctcggccaatacttcttgaatatcctcaaaatttgtcagaaattgacgttttccaggattacccttggactttgcacgatcaatttctctacccaatttctctagcaaattgtgcatctctatatctccatccggtgtaatacgtatgagggacttctcaaccaacattgtaagcccaacatcatcttcaagtaattctttgacgttactgactttaaaaccattgaagaaacatgcaatgcacttaaataactctctattttttttatttaacctatcgtagcagactcttagtgtttcctcaattttatcatctgagtcatttcgaagcctaggcatcatcttcacccactcatctttgtcccttccttttagagatgaacccaagacactgagacccaaaggaagactaccagcaagctcggcaacttcaaatgctagtgccttaaaatcatcaggtggagagtctttcccaaaagcatattgggatatcatctgaagagcaagaccttgagatggcagcttcacctcatatacaaggtcaatctcatgagccttgagaagttgcctatcttgagtgatcacaattattctgcttccagatccaaaccattcagcttttcccactaaggtcttaagaaactctagattatccacatcatcaagaaggataagaacttttttgtgctttaatctttgctccaccacaccaaaatgatctatctttatgtccttttgacctaagatttccgagagaagttctttttgccaactcaacttcatgccagagacgtcactaccgctggtgcttttgtaagttacgaaagcgcgaagggggaattggctagagagttgactgaaaagagctcttcctatggtactcttaccaatccctgactgtccccaaatcccgaccattattttagcttctttggattccaagcacagtattgattttattgcctctatatgatcttcaattccgactaagtcaccaaaaccctttggcggatgaaaaagtttattcgaaacatcattggctatcttttcaaccatatgcgcatcattaggcctaataacaatagtcaaatgtgtcaataaagaggcacccttaaaagcacatccaagtctatgcaaaaaatattgtatagttctacgataattataaacacacacataattcaaaaaaaaacacacacataaataatggaatcaaaacaacatacccgttccgaagatcctccccggcaatatttgatatatctgtgagagctttaacccatctttgtttctgatctgctggtttgtcctcgcatgtctttttaaagacctttccaaattcaccgatctgttttctaacatgagaaggatcaacgtcgtagaaaaccggtatcaccttttgtccaaaatatttagagcaattgtcgatttcaaccaattcattcaagcaccacgtggaagcagcatagttcttagagaagatgacaattgagatcctcgcttctctaatcgccgatataagcgcatcggcgattatgcagcttctctcgatgacgtgatccatgaatgtattgattgatctgcgattgagctgcttaagaagatggctgaggaaattcttgcgaacatcttccccactgaagcttggaaaaatgtcgctgccagaagaagaagctgccgccatgaaagatgatgagtttgagatagaatatctttaaaagaagtaaatcagcaatacataatgattagtgtgcaggaagaggagaaatcgtgcatagaagacttatgctgtgcgaaacggagtaccttatattcgctgggaaacgtgctgttatgtacaagattagtaattttttagtggttaatatcaaatctcctaacaagagtagggtgacgacaggcacaattaagataataaataactagataacacagaaacttcgcctttcattcgtcgaagagttgcatagaagacttattatacaagatgtttattttactggttaaaatcaaatcccttaacaagagagtatggtgagacacacctaatatataataacaatttaacacagaaacttcgccttccttttcttgaagatttgcatagaagactttgttcaagatatatttttttagaggttaattgatatcaattttcctaacaaagtatgatgtattaagacataataataacttaataagacagaaacttcgcctttctttcgttgaagactcgcatagaagacttgctagttgctatacaagatatttattttacaggttaaaatcaaatcccctaacaagagactatagtgagagacacaatcaagttataacaaattaacacagaaacttccttcctttccttgcaggcttgcatagaagacttactgtacaagttatatttttgtagtgtatgatgacagacacaataataaatacaaagaaacttcgcctggcatagaagacttactgtacttctagtggttaaaataaaatcgccctgaaagaactcataactttttaggctacgtcagccgagaaaattgcgacaggagaggcgactagggtttttttcttttgccgcacgcgaagggttcctagcagtcagccaccgaatctatgttcagaaggagaaagggaattatacaacgatgttccatcgccatgaaatttgcttgaagaaactgataacagtagtatcatacttatagaagaagacatctggaaagttccaaatttggagccgtcaagcttgtgtttgctactgttttaccacagagtaagttggaaggttcttcatatgttcttaccgtaatctgcataataaaatcaaatctattaaattcctttggtctattttgcaggtgatcctgaaaatgaatcaagagttagatatgtaattttccgttcaataattcaaagcttcacccgctttagcttcttgcttctcccattgactatgtcactttctctagaatgttggttgttctcagtttgagcgctcgtaccactaccatcctcagatggagaggcatctaaatgccgtacgctgaatttttttatcctcttaaacgacaagtttgcgtgtcgtggtcaagcccaaatttgacacaagaacaagcattgctatgatattcaaacttgaatttcacatcgttgtagtccaattcatatggataaccaaagacttcttctgaagggcaaaactcagagcggaacacaaccataatgtactaggtaagatttttgaattagattgtgctactttgaattccgatggtgttttttgcagcgttctattcttctaatcattatatactttgtaagaaataagtagtttataatcaattctttgcgaaaaaattagtatagcaagcaaaataatttacgttactagatttcaaatcccaatttgagcgggaagtccatctagtttgaagctaaaaggctttatgacaaatatactctaacaagcttgcaggccaagcaaatcatattagaagcaaaagaaaggtcgagaaaatatcttaggaacatcattaatgaatgagtttaaggagaatgttacctggattacttcccataacttctcaagcttgctacctggcattgtaagctctgcgacacattctgcatgacatttagacggtaaatattttattggacaatcaatccaaacgagttcagtgagaccaaagatattcccaataaagaaacaatctatgtcttctctgattgcagtttcgtttagatggagctctgaaatgttctttgaaattcgagggaaacatctcaaacttgaacatcccctgagatcgaggtgtactctagagattccaagttaacgccggttgggagaacttttagatttttgcatccttgcatttccaaccgcctcagtttattgagattccgaattgaagaaggaagcatcactaaacttttgcaatcgttaagttccaagtggtcaagattgatggccgttgaaagatctggaaattctttcaggttttcacttcctgacaaatccttcctcaccagacagactccttcccacaacttctcaagcttgctattctccattgtgagtttaatcaaaatttcagccctaaaattgaaacacatactcgtcaacggatattcatcccaatatagcaatctgagttttcgggccaaataaatgaatccctgaggtaaacacaatctgctttcaccagtctctagcgatcgacaactccttgtaaaattttagaaatgtgagattacacattcctttgaagattgtccatttacaaacaatctatttctgagattacactcatcgatttctgttgtgttgaaagacatgcctagcacattttcagttcctgaaaaaaaaacattagtattttacaacggtcacaataatctattacgttatagatgactctcttcgattcatatggagtagtgtactcaaacatgaaaatcaactgacccaccttccttcttagtgggtccgccactgatcaacaagcaagttcttgatataatcaactttttgatcattaagtaaacacgcaatgtaaaggaagacttcttcttactccttcattgtgccttctcagaacaggtttggtttctggttcttcacagactaggattaccacaatgtacttttgttgattggtctactgtcatcacttggctcctgaccaaatccccttccctatcaaatgctttgaaacgcatttctgcccaagccactatctacctgctctggcgagaaaggaacaatcgcttacacaatgatctttcctcttcggtctctgtgatctttggtcagattgataggaatataaaggatactcttcttgctcgtcagtacaggaaaggttgtgggagacttctatcccaatggttttcttatagttaacatatctattctattgatcgatgtttcaatcatggctttttaattttttttgggcctttgaaactggctgccttttggcattgtaaataacatttccactttccttctaaggtaatatatattcacaagttatcaaaaaaaaaaaaaaaagggaagacttctttatctttgtcatctaacttatcgtagctgactcttaatgttttctcaaattttccgtctagaccatttcgaaccctaggcaacaactccatccatagtccttgtcctttcctcttaatgaagaaaccaaaagattgagacataaaggaagattaccgaaaagttttgcaacttcacgagttaaattcacgaaaccatctggtggagcgttttgcccaaaaacacatcgacaaaacatttgtagagccaaaattatatttcagatggaaaattcagttcataaacaaggtcaatcttatgagacttgaaaaagttttttttatctttacttatcacaacaattctgcttccaatcccaaaccatccagtttgtgccaccaaggtctttaatagctcaagatcatcaacatcgtcaataattataagaactttcttgtgctttaacctttgttccaccgcacataaatgcaaaacctttatgtccttttgacataaaatttctgataaaacctgttcttctcggttggtttataagttacgaaagcgcgaagggggaattggctagagagttgactgaaaagagctcttcctagggtactcttaccaatccctaccattctagcttcttcagattccaagcacaacaatgaactcaatctctctaaatgagcttcaacaccaacgaaatcacctaaatcactcgatggtgttatgagcttattcggaacatcgttggaaattgtttcaatcatgtttgcttcattacacctaaaaatcaatactcaaatgtcagcaatgaacactacaatcggagtcttaagcctaatcaaacaaaaatttgaaaaaaaaaaataccagtttcgagaatcctctccagccatatttgccacatctgctagagctttcctacacctttgtttctcatcatctgttttgttcttgcatgtctcttcaaagacctttccaaattctccggtctgtttcctaacatcagaatgatcaacctcgtagaaaatcggagtcaccatttgatccaagtttttaaagcacttgtggatctcaaccaattcattcaagcactaggtggaagaagcatatatacttgttagagaagacgacgattgagatcctcgattctcttatagccaataaaagctctgggccgattgggcggcttctctcgatctcatggtcgatgtgtattgattgatctgcgatcaagcttcttaagtagatggatgatgaatgaattacggacatcttcatcgctgaagctcggaaaaacgacgtatctcttgctgcgagaagaagaagatactctaaacctcgacaatgactatacgactggggatgagatggatctggatgaggagaatgaagatgaagaacaagcaggcctagattcacttgctagtacagctaataacaaggtgaaaggtagacgtagacgtaagcgtttcaaagtgcttaataattagagataattttagtaccacaaggataattttagtaccattggaactaaactggaagatcattatgagtgatgtgcaatgcaaatactgcaatcatacttattgcttagacctacgtagaagtggtacaactactatgttgcgtcacatgagagtttgctcaaagactcctggaagtacacctgcaactggaataaaaagcttgatatgatggtgtttagggagatgattggattagattagcaataattgagcatgatttgcctttttcttttgttgaggacaaaataattagagagacatttctctatgctaattctagcatataattttggagtaggaacaccgcaacttttgatttcaagtattggaccgagctaatggacatggacagtccatttcgacagctctagctttggatgagacttgatggtttggaattggagttgactccttcacaaagttttaatagttcttccttgcatgacacggaaaaggctatctccttttttcaccacctgaagggttgcttcttgtactggtcacatgtttggccgaggttaagtcacacgctattgaatcagcgatccaacacttttttttttttttgttgttgttgttaattctcttgtgaatttgcaatatacaattttgtttacccaaattctaatttattctttgctttaaaacaaaaaaaaactttgctcacatacatgttatcattatcgtcgagatatatgtttttttaataaagacaaagactattttgggtagtacctgacctgagtcaagtatgtaaaaccctaagatcacaaattcaatgtcttttcgactaaaacagataaacagtacggtacaatacaaaacatcccaatgatatctttccagaatataatgtgctatggctttttgaaagatgtatttattcttttaggaaaagcaaaattctcaaagaagcaaagacagataagtaagaacagagtgcttcactttcagctaaagaagaaattacaaacattttcatcaggctccggagttggagacctaaatggattctagacttctggttctccaaaagctctccgttacctgaagaaaagatggcttgcgttaaagctatgtaatcgtcttgtcattatcagtatagtcatggtcaatcccaagttgatcctaaaacagaacaaaacagaactggaagatgttttgattacattaaaaagttgataagctctgggaacaacgaaggatccgcggtaggtgtttctatatattgttgttcagttatcattggatcaatacacaaaacttcttcctctagacatggttgggaaagacacaacgatgctccatcaacatgaacgttgctagaagaaactgatgaaaacctgggtggaagaactcccctgccaataacgaaagctccagatttgtagcggtcaattctgtgtccgcttctatttggccacttggtaagttgatatattcttcagatgttcctattatcatctgcattataaaccaaactatctatcctacgaaactgttcatcctccaaaaaaatcaagagacagctatgcaactttcagatcaaaactggcaaaaggcttacccgcatccgcttcttgcttctcccagtctctactacaacatcaactttttctacagactattggttgtcctctttttcaggagagacattcaaaattcgtacaccgcatccctttatgctctccttgggaataaacacaaattccaaattgttgtctgatttagatggaacgtctataggcgggaacttgaaggaacccaaaaccatatgatccgtattacacaacgtcatcgtaccatgaaatactgtctcccaaatatgtaggaacttctccacctggtaggaccgtcttgacgtatgatcgtaggatgagttcctgcgcatctccatccaatttgaaacaattaaggagatagaaatattctcttctcatcaagtcggccatttgatggccgtgcttgtttaaatttactgtcaatggtttctaggaaatgcgaaagcgttaaagaagcaaccacaaggatgtaagaacagagtacttctgccttcagccttcagctaaagaagaaattgcaaacattatcatgctctggagttggactctttaacggattctggttttttttaagtagtaacccctgcaggaaattattgctttgataagccaaactccactaagagcttgatgcgcttgatgagcttgatgacctgtccaacaagcaagaaaagagtcaatgttgagagttgaaagtatatatagagtctctaatctctgagaggttattcaattagtgaattggtgtgtttgttaagactcctgcatgagtctcttgggttgaggattcagagcccgaaactctgcaattctcttcattgtgtgacagattctttgatagatcaataaaagattgcttgtttattcttgtcaagcttgtgtgaaaaacctatgaaatcatcttttcattatcactatagtcatggtcgatcccaagtgatcctataacacaaaaaaaaaacagaatagtaagatgtttcagttaccataactcccactcccaatccacattagctatatgaatttgtgcatcttgttgttcagtaatcatggaatcaacacacaaagcttccccctccagccatggattaaaagaaactgatgatgattctccccaccctaacggaacagtgtctgttactatttggccacagggtaagttgaaatatttttcagagtttcctaatgtcatctgtataataaaccaaaagatggattcttttagatagttcatccctgaaaaaaaacaatcaagagatagctttaatagttttcagttcaaaataatggcaaaaggcttacccgcatccgcttcttgctactttcagtctctacatcatcacatttttctccagactgttggtggtactctgttacagagtctccatcactatcatccggagattctgtttcagagcttccctcactatcatccggagatgtagacacattcaagagtcgtatgccgcatctttttactctcgtcccgttaaacttaaattccacatcattgacgtctaatttagatagaagacctgtaggctggaacttgaaggaacacaaaactagatgatccgtcttacacatcatttccatgccctcatatattgtatgtctataatgttcgccattgaactgaaagagtacgtccatgcatgcaaaagaatgggttataggttcaaccacgagacaagcattaaatcgcaagaatttatgagaaagagagctctgaggcaaagtgacagttagggaatttccataagcttgatgcttaaaatatgtaggcacttctccacctggtaagaccatagtcgtcttgaagcatgatcctaggataagttctcgcgcagctctatccaatttgaagcaattctggaatttaaaatatatttctccatactcatcctcgtcatcctcatcctcgtcatactcatactcatactcatcctcgtcatcctcatccttgtcacatttaggtctcttttcgaccttatttatcttttcattgttttgatcttccattgttgtcaccggatcactcaacgctgtgatgacacctccacagtctgtaaagtcgaccttcataagccttgtcagtctgaaaatgttcggggatatgtttttcaacattttgcaaccactcatatttagtaccttgagcctcgaaaatttctcaatgaagcagggaacttgttcaatggcggtgtcagctagattgagttcttgaatactagttgaaatctgaggaaatcttctcaacgacttgcaaccacgcatcgataattccatgagcctcgagaaattctcaaaacatggaacttcttcaatggcagtgtcatctagattgagtactgcaatactttttgaaatctgagggataaatctcaaacttgagcaccctttgagatggactgtatggagagatgacaagttgatatccataggaagaaccttcagccctgtgcattcttccatatttaacgtgtataatttttggagattcccaattgtagaaggtaacatcaccaaacttttgcaatttgagagatccaaaatctccagattggtggcctttgaaaggtctggaatttctatcatgttttcacattctgacagatccaccctcttgagtttcccaagcgactgaaacagagtaaaacattgttatgcttttcttttttctgaatgtaaaacgttgttatgctttaatcattgtcaatactatatctgtttagtgttataatcaagaacaagacataattttgtatataatacacgtataaatcgtacctggacgccttcccatagcttctcaagcatgttgttgcctctcactgtgaggtttttgagatgttctgggcgaaatttacttggattacatctcctaaggcaatcgagataatcgagtccagggagattcttgttccataaacaatctgctacctcgatctcaatttcatctgtaaagatgaaactttgcattataatctcagggaaatttctcaaccgggggcatagtaggagattgaggaacttaagagattccgagttgagaggacttggaaaactttctagcacttcgcagttacaaagatctaattcctcgaggtttgtggctaaagaaagatctggaatttctttcaaattgttggaattcctcaaattcatcttcttgagacttccaagaggctgaaaacaacatatggaaaaagagaataacacagatttatttagattgtttaacaaataaattaataaaaataacacagttctgttttcaaatagacaactcgaaacaataaagaattagtacctgagttccattccacagcttctcaagggcactattctccattctgagttcaaccagatactcagccttaaaattagaaggcaaacgcttcaatggacaattttcccaccgtagccatttgagtttacgtggcaagtaaacgaggccgttaggtagacgcaatctggtttctctcggttgccaccagtaatgatcatgaatatttagaaattggagattaagcatgccttggaacgagttttcatctattgaaataaatggcttatcgatttgtgaatctgatgacgtgctgaaatctattccgagcaatttttcagtgccctgacaaaaaaaaaaaacccaaagaaaactgttatcctcaagtaccaaactaaatcaatgtttttaacatcaaaagccaatcgttgaattaatataaagtggtgcattaagctgcaaaaacttacggtattatcggtaaatacgtctagaatttcctcagcattctccagaaatcgacgttttccaggattaccattagactcttcacgatcaatttctgtagccaacttctgaagcaaattgtgcatctctatagtatcattcggtgttaaacgtatgagggacttatcatccaacgttttgagcctaatgttaacattaacaccatctccgaggaagtctttgatggatttgactttccaaccattgaataaccatgcaatgtaatggaatatatcttgatcttttggatctaatctaacgtagctgactcttaatgttttcataatatctctgttcaaaccattttggagctcagccagcatctccatccactcttctttgctccttcgttttaaagacgaaccaaggacactgagacccaaaggaagattaccggcaagctttgcaacttcaaatgctagttccttaaaatcatcaggtggagagtatttcccaaaagcatattggcatatcatcttaagagcaagaccttgagatgggagcttcacctcatatataaggtcaatctcatgagccttgagaagttgcctatcttgagtgatcacaattattctgcttccagatccaaaccattcagcttttcccaccaaggtcctaagaaactctagattatccacatcatcaagaaggataagaactttcttgtgcttcaacctttgctccaccacaccaaaatgctctatctttatgtccttttgacctaagatttccgagagaagttctttttcccaactcaacttcatgccagagacgtcactaccactggtgcttttataagttatgaaagcgcgatggtggaactggctagagagttgactgaaaagagctcttcctatagtactcttaccaatccctgactgtccccaaatcccgaccattattctagcttccttggattccaagcacagttttaattttattgcctctatatgatcctcaattccgactaagtcaccaaaaccctttggcagaggaaaaagtttattcgaaacatcattagctatctttacaaccatggctgcttcactaggcctaataacaatagtcaaaattgtgtcaataaagaggcacccctaaaagcacaatcgaagattcgaagtgaacgccaagaaaagaaaaaaaaaagtacagttttgcaataattataaacactcatagaaatagtggaataaataaaacatacccgttccgaagatcctccccggctaaatttgatatatctgtgagagctttaacccatctttgtttctgatcctctggtttgtcctcgcatgtctttttaaagacatcgccaaagccaccgatctgttttctaacatgagaaggatcaacgccgtagaaaaccggaatcaccatttgatccaagtctttgtccttgtgacacttgtggatctccaccaattcattcaagcaccacgtggaagaagcatagttctcagagaagataactattgagatcctcgcttctctaatggccgttataagctcatcggcgattatgcagcttctcacgatgccgtgatccatgaatgtattgattgatctgcggtcgagcgcctcgattagatggctgaggaacgttttgcgaacatctaccccactgaagcttgggaaaacgtcgtatctccggctactaggagaagaagaagaagaagaagaagatgagctcagggtcgtggtggaggtcggtggttgtggccagtgggtgggaagggtggaagctagtttgtatgtatggggctgaggtggtgctgagttatgttgtaatcactgttttttactctgagtgtaggaaacgccatggtagcagtgatgcaattgttgctgatgaggttgctatttaaaacttttttgttgttgatagttctcttgtgaaattgtgaaatacatttttgtttaccaagattatgatttattcattgctttaaagagaggaaaataacatttcgtagagagagatatgtgtttcaacagacaagactgttatattcacatctttcaggagaagcgaaattttcaaagaagcaaaacagagaagtaagaatagagtacttctgttctggacatggaaccataaaaggtttctagctgtcagtaagtgttccatcatctgcaggagaaaatggcttgtgtgaaaaactaagaaatcgtcttgtcattaccagtatagtcatggtcgatcccatgttcattatgaaacagagttgtaatacgtttcaggtcaccttaacaatgtgataagctgtggagacggctaaggatccaggaaaggaatcttaacaatgtgatggtgtgaattcagtcaaggcagatcttaactgatcagggtcagcagtgaaaggtgtcgtccccatcagaccaaacgtctatcatcttaggccctcgatgcaaagatctgaagcaaaccaattcagtcaagaacagccccagagaatgagcttcctatcctagatgttctagtgagtagttcaggcctacaactttcactctttatcatataattaaagagtgcagcgggatgggggaacagcagcgacatgttttctcatcgacgtaggatagctggatgatacttcatggtttggaagtggaccagacaatgtctcctgcagaaagtttaaaagctctttccttcagctgatggattgttccttatgctggtcacatctttggccaaagttaggccaaaaacgcttctgccttttggctattgaatcagcaatgcaaatgttgttgatgacaaggatcttgctatttaaaattagttccaacacactcttgttgtcaattcttttgtgaatttgcgatatacatttttgtttacgcaaagtctgatttctctattcattgctaataaagagaaaaacaacctgtgctaatatacacattgagatctatgtttcaaagaaaaggcagacaaaatgttcaaagcaaacagagtgtttctgcattcagataaagaagaaattacaaacactttcaggctccggagttggatgattaaacggaatttggttctccaaatatcattctgcagaataaaatgatctccatgtaccatctatcaataaaaaatggcttgtgtcaaaacctatgaaatcgtcttgttatcattatagatatataatcatggtcgatcccaagttatcctaaaacagaccaaaacagaatgataagatgcttcagttaccagaaacaggatccaagaaaggaatgtcttcatcttgttctttagttatcatataatcaacagacaaagcttccccctctagagatgttgatgatgatgcttctccctcccctaacgaaagctccatatttagagcggccaatcctgtgtctgctacaatttggtcaccggctaagttgatatattcttcagatgttcccgatgtcatctgcattataaatcaaacgatcgattctattaaatagtctgtctctatggtatttcgatcctggaaaatcaaatcaaaagtcaaaatatagctttataattttcagctctaatcaaaagtcaaaagatacccgcatccgcttcttgcttctcgtagtctgttggttgtactctgtttcttgagagacatacatgagtcgtacaccgcattctttgatcctattggagcaacaaaacttaaactccacatcgttgaaagtcatttcagactcgaacttgaaggaacagaaaaacagatgatccgtcttacaaaactccagttcttcatcttccaaaaatgatttctgatactgtttgccattgaagccaaagtttacctccaaatatcgataaaaacccttgccctcggagagagggtcaaccacgagacaagccttaaatcgcaagaaggattgagaaagagagctccgaggtaaagtgacagttagggaatctccataagctcgatacgtgaaatacttagggatttctccacctggtaaggccacaggcttgaagcatgatcgtaggatgagctctcgcgcatctctatccaatttgaagcaattacggaagctaaaatattcagtacctaagtcccaatcaccatcaccatacaactcaccccagaaacgttcacatgtatattcaatgttttcagataatggtacacaagaaacgctatcttccattgtcgctaccacagttgcatcactcaacgccttgatgacacctctacagtctgtaaagtcggcgaacattagacttctcagtctgaaaatgtttggggagatgtttttcaacctctggcaacaatacatcagtagtacacggagcctcgtgaaatcctcaatgcagcagggaacttctccaatggcggtgttttccagatagagccatacaatattagttgaaatcagaggaaaagttctcaaacttgagcaaccactgagatcgaggatacccagagatgacaagttgacatcggttggaagaacctccagccctgtgcatcttttcatgtacaaacgtctcaaattttgaagattcccaattgtagaaggaagtgtcaccaaacttttgcagttgttgagtatcaaagactcgagcttggtggcctttgaaagatctagaatttcttcaatggcggtgttttccagatagagccatttgatactctttgaaatcagaggaaaagttctcaaacttgagcaaccactgagatcgagggtttcgagagatgacaagttgacatcggttggaagaacctccagccctgtgcattctttcatttccaacctcaccaatttttggagattcccaatagtagaaggaagtgtcaccaaacttttgcagttgttgagatataaatgcttcagattggtggcctttgaaagatctggaatttctgtcaggttttcagattctgacagatccatctcttcgagacttccaagcgactgaaaaaaacattatcgatgataatcattttaattttatacctatatatgtttaaaattataattaaacattattacgtatgtatgtaagacataaccgtggatcgaccacaagccataaaaacaaatttgggtatacttaattagttatataacagaaggtaaacaaaaatcagcatagcattaacaatgtacctggatgccttcccatagcttctcatgcttgtagcacctcacattgagaaaaacgagatattctgggcgaaattcacaaggcatacatctcataaggcagtcgagataatctagtccagcagggagattcttgttccagaaacaatcttctaccacgatctcatttctcccttccggaaagtcaacgtctgaacatcccattttgattgctgggaaatttctcaaattcgggcatccagtgagattgaggtactcgagagattccaagttgagatcggttggaaaactctctagctttttgcaatcactaatatctaaatagataagtttaatggcattctgcatcgaggaaggaaatgtcaccaaggattcgcatttacaaatatctacttcctcgaggtttatggctaaagaaagatctggaatctctttcaaatatttggaaccacgcagaaacatctgcttgagtcttccaagtggctaataacaaaataggggaaaagagagtacacacgttagtgaacattttaaacagattcattttagtttttctaacagatttatgtttagaaattgatcactaatagaattagtacctgagttccatcccacagcttctcaaggtcactattctccattctgagtttaaccagatactcaaccttaaaattagaatgcaaacgcttcaatggacaattattccacaatagcaatctgagtttactagggaaataaacgatgccctgagtgccttccacacgtgagcaatcaactgatagatattcgagattacacatgccttctaatgattttaaatctattaatatcacccccgaacaatgtaacttcctcagtttaatggcattctgaatcgaggaaggaagtgtcaccaaagattcgcatccttcaagatctaattcctcgaggtttctggcattagaaagatctggaatttctttcaaatttttggaacacaacaaattcatcttcttgagacttccaaggggctgaaaacaaaatatggaaaaagagaatacacacgttcacaaatataccacaattttctgttctaaaaactgacaactaataaaaatttagaattcgtaccagagttccttcccacagtttctcaagcttactatacttcattatgaggttaactagatattccgccttaaaagtagatggcaaagacttcaatggacaatcatcccagtctagcaatctgagtttaaggggcaaataaacgaggctctgaggttgacccccatctgaccaatcaccaatttttagatattggagattacgcatgcctttgaacgattctttatctattaataacggccttgtcgaaaaatattcctcgaatggcaaacgtattccaagaagagtttctgtcccctgaaaaaaaatccgaagaaaactaatataatcttaacaatcacaaccctttttatttttctgacacatcaaagctacattttaattacgaatgaggcaacaattgcttaagtttatcaatccccaaatgacgattaaattaatataaagtcatgcattaaaacggagctgcgaaaaaaacttacagttttctcggtcactacttcatgaatatcctcaaaattcgtcagaaattgacgttttccaggattacccttggactttgcacgatcaatttctctacccaatttctctagcaaattgtgcatctctatatgtccatccggtgtaatacgtatgagggacttctcagacaacattgtaagcccaacattatcttcaagtaaatctttgacgtaactgacctcaaaaccattgaataaacacgcaatgcaaaggaacatatcttgatctttttgatgtaatctatcgtagctgactcttaatgttttcataatatctccgttcaaaccatttcggagcctaggcatcatctccatccactcttttttgccccttcttcttaatgacgaacccaggacattgagacccaaaggaagatggccggcaagcttcgcaacttcaaatgctagttccttaaaatcatcaggtggagagtctttcccaaaagcagatcggcataacatcgtaagagcaagaccttgagatggcagcttcacctcatatacaaggtcaatgtcatgagccttgagaaattgcctatcttgagtgatcacaataattctgcttcccgatccaaaccattcagcttttcccaccaaggtcttaagaaactctagattatccacatcatcaagaaggataagaactttcttgtgcttcaacctttgctccaccacaccaaaatgctctatctttatgtccttttgacctaagatttcagagagaagttctttttcccaactcaacttcatgccagagacgtcactaccactggtgcttttataagttaggaaagcgcgaagggggaattggatagagagttgactgaaaagagctcttcctatggtactcttaccaatccctgattgtccccaaatcccgaccattctagcttccttggattccaagcacaatactgattttattgcctcaatatgagcttcaattccgacgaagtcatcaaaacactttgaccgagtgataagtttattcgaaacatcattggatatcttttcaaccatatgcgcttcattaggcctaataacaaaagtcaattttgtcaattaagaagcacccctaaaagaagaaccgaagtctatgcaaaaatatagttctgagacaattgaaaacgcaagcagatatattggaatcataacaacgtacccgttcagaagatcctctccggctatatttgctatatctgtgagagcttgcacccatctttgtttctgatcccctggttgtttgtccttgctgacctcgcatgtcttttcaaagacctttccaaattcgccggtctgttttctaacttccgaaggatcaacgtcgtagaaaactggaatcaccatttgacctaaatcattaaagcacttgtggatctcaaccaattcatttaagcaccacgttgaagaagcatagttcttagagaagatgacgattgagatcctagcttctctaatcgccgatataagctcaggggcgattgtgcggcttctctcgattccatgatcgatgaatgtattgattgatttgccgtcgagcgcctcgattagatggctgaggaacgtcttgcgaacatcaaccccactgaagcttggaaaaacgtcgtatctccgtctgccagaagaagaagaagccgccatgggagatgatagagagaactcagagaagagacgaagatttttaagagaagtaaatcagcaagacatagtgtgagaaagagaggagaaacttcgtcttccttccctccaagacttgcatagaagacttactgtacaagatattcttttaagtggctaaaatcaaatctcctaacaagacaattgagacgtaaataataaagaaactcggcccttcctttcctcgaaagcttttttacactacatacaaagatatttttgaagattgaatttttgtggttgtcactgaattatgataagtcttagtctttgtacaagacagaaataatatttcaatttctaggcaagtagacagaaacttacattcgtttcctctacaaagatattttgaaaacacaaattttgtggttatcagttgtccttgtacaagacagtttatcgtaagaatgttatgattgtttaatatctaagtcttgtttccctatacatacatgcacacggtttaggagaataagtatatcgattatgaggattttaattcaaataatacagtgaaaatactaattaacactaactctctagtttgctaaattactcttttagttttcaagaattgtattattagtttaaagtttggcttagtgcgtcagccaccactgtagttttaaggagcatttggtttctaagggtttcatgtactggatggaagaactcgtgtctgagaacatcctctgcgctgtttcgttgccttgggttaacggtcaaacatctatccacgaagtcaaggagcggccgtggaattgcgtctagaaactctctgcgtttgtgttgagttcacaccattttctcaactccagccccttgaagtaccttgactcgtacaattcctgaaacaacaacacaaaactctacgtgaattcatctcacacgatcatctatctaatcattttgtcactaatttacattttaaagatatataatgctaacgatgaaaacccttttgtgatatttgaatccatatgctggtggcaaagaagaacagagcatgtatgttatattcaaaccaatgcagcaatcaaataaatggagagttttatcagggaggtaagatgagatgtaacctcagggaaagaggattcacggttgtgcagcttggctacttcccataattcttcactgcctcgtagttgcgcaatgccctttatgttcctgggaatgacaaggtcgttgtaagacggcaagaaagaaaaaagagtggaatcgactgatggtgtattattttttttttctattattaggtaattggtacaatatctgaagcaaacctgcacaaaccaattcagctaaaataagcaccagagaaattagctttcacatcctaaatgtgataatgactagttcactcctacaattgtagtctcagctctcaatgcacaagtttattatatatggaattaattactaacatacacattgagatgtatctgtgtttttagaaaagtcaggactaatttaaaaacattaactaattcaatgtcttttaaacttatccatagatgtaaggaaacatacaaaatctgtcaaaaatacttttccagaatgagctaaattgtggctttcaaaacatgtatttatacgaaagccttagagaagtagatacaaagatgtaagaacagagtaccatgctctagagttggagacttaaaaaggcaccagcgacgaagagcttgatgagcctgatgagcctgatgacctataaaagaagaaagaacagagtcaaagagtcaacattataactaaatattgagtctttaaagtatatatatatagagagagagtctctaattctgtgagagattgattatccaatcagtgaattggtgtgtttcagagcctgaaactctgcagttctcttcattataattcaggttatttgatagatcaataaagattgcttgtcttgttatgctgcaacaaaacaaaacagaatagtaagatgtttcagttaccatgatgcctcagaatcttcgtccctatgcgcgatgggaatttctttagcttgtcgcttagttatcatggaatcaacagagaaagcttcaccctccagacatggatatgaaattgatgacgattctccccgccctaatggaagctccagatttggagcggtcaatcctgtgtctgttactgtttggccacagggtaagttgaaatcttcttcagagtttcctaatgtcatctgtataataaaccaaactatcgattcttttagatagtggccttcctgaaatattaaaaagaaaatcgagagatagctttaatagttttcagttcaaattatggcaaaagacttacccgcatccgcttcttgctactactctcagtctctacagcatcacatttttctccagactgttggttgtactctgctttagagcttccatcactatcatccggatatggagacacatgcaggagttgtacgccgcatcctttgatcctcctccctttaaacttgaattccacattatccaagacctttacctttggatatagagtatttttaaactgccggaacttgaaggaacacaaaaccagatgatccgtcttacacatcagtgtcatatcagtagctattgtatggatataatgttcgcctttgtattggaagtatacatacacactcccataagaatcggtttgaggttcaaccactacacaagcattgaatcgcaaaaatttgtgagagagagatctccgaggtaaagtgatatttacggaatttccatatgctcgatgcttgaaatatgcaggcacttctccacctggtaaaaccatagtcttcttgaagcatgaacgtaggatgagttctcgtgcatctctatccaatttgaagcaattctggaagttaaaatagtttcttccataccaataattatcttcatcctcatcctcctcctcatcatcctcctcctcatcctcgtcctcatcctcatcatcgtcatcgtcatcttcatcctcctcatcctcatcctcatcctcatcctcgacatcggtattctcgttatactcatcctcatcctcattcttgtcataactcatcctcattctcgtcatcctcattatagtcatcctcaacatcatcgtctcgtgtacgcatcttttcaatcttttcatagtgatcatccattgttgccaccacagtggaatcactcaacgccgaaatgacacctccacagtctgtaaagtcgaccttcttaagccaagtcagtctgaaaatgttcggggagatgtttttcaactttttgcaaccactcatatttagtatcttgagcttcgaaaaattctcaatgaagcaaggaacttgttcaatggcggtgtcagctagattgagttcttgaatactagttgaaatctgaggaaatcttctcaacgacttgcaaccacgcatcgataatacaatgagcctcgagaaattctcaaaacatggaacttcttcaatggcagtgtcatctagattgagtacagcaatactttttgaaatttgagggaaaaatctcaaacttgagcaccctttgagattgactgtatggagagatgacaagttgacatccataggaagaaccttcagccctgtgcattctttcatttctaacgtgtatagtttttggtgattcccaattgtagaaggtaacgtcaccaaacttttgcaatttgagaggttcaaattcaccagattggtggcctttgaaagatctggaatttctatcaggttttcacattctgacagatccatcctctcaagtttcccaagggactgaaacagagtaaaacattgttatgcttttcttttttttaatgtaaaacgttgttatgctttaatcattgttgatactatatccgtttagtgttataatcaagaacaagacataatgttgtatatattacacgtataaaaatcgtacctggacgccttcccatagcttctcaagcatgttgttgcctctcagtttgagattaacgagatgttctggtagaaatttacttggattacatctcctaaggcaatcgagataatctagtccagggagactcttgttccataaacaatctgctacgtcgatgtcaattccatatggggaaatttgcattatagtctcagggaaatttctcaacttggggcatcgtaggagatcgaggtactcgagagattccgagttgagaggacttggaaaactttctagcacttcgcaatcagaaatatctaatctctcgaggttcatggcataagaaagatctggaatttctttcaaatatttggaattacgcagaatcatcttctttaggcttccaagtagctgaaaacaaggaaagagagaataacacacatttataaacatttcaaacagatttatttagattgtttaacaaataaattaataaaaataacacacttctgttttcaaatagacaactaaaacaataaagaattagtacctgagttccattccacagcttctcaaggtcactattcaccattctgagttcaaccagatactcagccttaaaattagaaggcaaacgcttcaatggacaattatcccaccatagccatttgagtttacgtggcaagtaaacgaggccgttaggtagacgcattctggtttctctcggttgccaccatgaatgatcatgaatttttagatattggagattaagcatgccttggaacgagttttcatctattgaaataaatggcttatctatttgtgaatctgatgacgcgctgaaatgtattccgagcaatttttcagtcccctgacaaaaacaaatccccaaagaaaactattatcctcaagtaccaaactaaatcagtttttttctgtcctttttaacatcaaaagccaatcggtgaattaatataaagtggtgcattaagctgcaaaaacttacggtattatcggtaaatacgtctagaatttcctcagcattctccagaaatcgacgttttccaggattaccattagactcttcacgatcaatttctgtagccaacttctgaagcaaattgtgcatctctatagtatcattcggtgttaaacgtatgagggacttatcatccaacgttttgagcctaatgttaacattaacaccatctccgaggaagtctttgatggatttgactttccaaccattgaataaccatgcaatgtaatggaatatatcttgatcttttggatctaatctaacgtagctgactcttaatgttttcataatatctctgttcaaaccattttggagctcagccagcatctccatccactcttctttgctccttcgttttaaagacgaaccaaggacactgagacccaaaggaagattaccggcaagctttgcaacttcaaatgctagttccttaaaatcatcaggtggagagtatttcccaaaagcatattggcatatcatcttaagagcaagaccttgagatgggagcttcacctcatatataaggtcaatctcatgagccttgagaagttgcctatcttgagtgatcacaattattctgcttccagatccaaaccattcagcttttcccaccaaggtcctaagaaactctagattatccacatcatcaagaaggataagaactttcttgtgcttcaacctttgctccaccacaccaaaatgctctatctttatgtccttttgacctaagatttccgagagaagttctttttcccaactcaacttcatgccagagacgtcactaccactggtgcttttataagttatgaaagcgcgatggtggaactggctagagagttgactgaaaagagctcttcctatagtactcttaccaatccctgactgtccccaaatcccgaccattattctagcttccttggattccaagcacagttttaattttattgcctctatatgatcctcaattccgactaagtcaccaaaaccctttggcagaggaaaaagtttattcgaaacatcattagctatctttacaaccatggctgcttcactaggcctaataacaatagtcaaaattgtgtcaataaagaggcacccctaaaagcacaatcgaagattcgaagtgaacgccaagaaaagaaaaaaaaaagtacagttttgcaataattataaacactcatagaaatagtggaataaataaaacatacccgttccgaagatcctccccggctaaatttgatatatctgtgagagctttaacccatctttgtttctgatcctctggtttgtcctcgcatgtctttttaaagacatcgccaaagccaccgatctgttttctaacatgagaaggatcaacgccgtagaaaaccggaatcaccatttgatccaagtctttgtccttgtgacacttgtggatctccaccaattcattcaagcaccacgtggaagaagcatagttctcagagaagataactattgagatcctcgcttctctaatggccgttataagctcatcggcgattatgcagcttctcacgatgccgtgatccatgaatgtattgattgatctgcggtcgagcgcctcgattagatggctgaggaacgttttgcgaacatctaccccactgaagcttgggaaaacgtcgtatctccggctactaggagaagaagaagaagaagccatgggagacgatagagagaactcagagaagagacgaagattcgtaagagaagtaaattagcaatacatattatgagtaagagagtaagagagaaagagaggagaaacttggtcttcctttcctcgaagacttggtctcccacttgatagaagacttactaaacaaataattttttaagtgactaacatcaaaccacctaacaagacaattgagacgaactaaactaatatgatacagaggtttactatacaccggtattttaaaagattgattttgtggttgtcaactgtcactgaattatgactaagtcattgtaaaaaacagaaataagattataatttatcataatttcgaggcaaatagacaaaaacgtcaagtttgtgtcctctacaaaagatattttgaagactcaaactatctaatttgctaaaatactctttttagttttccaaagttgagtggtgtggacagtggagtgaagattgttaaatatatttttcttatttacttttacaattgtaaatagtttagagtttggcttactgcgtcagcaaccactgtaggctgctgtttaaggagcatttggtttctaagggtttcatgtactggatggaagaagtcgtgcttgagagcatcctctgcgctgattcgtcgcctcgggttaacggtcaaacatttatcaacgaggtcaagaagcgatagtggaattacgtctagaaactctctgcgttttgtgttgagttcgcaccattttctcaactccatccccttcaagtaccttgactcgtataattcctgaaacaacaacacaaaactctacctgatttcatctctcacgatcatctatctaatcactttgtcatcaatttacattattaagatatatatgttctgtaatgggagtgcagtagaagcaatagaacacaaaacgctaacaatgaaaacccttttatgtgatatttaagctggcggtaaaaagaacagagcaagtatatgtgtctcataaatgaatggagagtacagaagagtggtaagatgagatgttaccttagggaaagaggattcacggttgtgcagcttggctacttcccataattcttcactgcctcgtagttgtgcaatgtcctttatgttcctgggaaatacaaggtctttgtaagaaggcaagaaagaaaaaagagtggaatcgagtgatggtgtactcattcaagtcagatcttaactgttcagggtcaccagtgaaaggtgtccttcccattatgaggtataacaaagtaactcccgcagaccacacgtctatcttaggtccttggtgcaaagatctgaagcaaacctgcacaaaccaattcagccaagaacagccccagagaattagctttcccatcagagatgtgctaatgagtagctcaggcctacaactttagtctgaaggcacaagattttcatatttaactagtattaagagaagtgagctatagttacagttgatgtacctctggagctcggaagcctttggttcctgagcaaggaccgtctttcttctcaattacgtcccctagtaaagtcagaaaaactcttcttaaggtttaaattaaactctgaaacaaaaacaaaagtcaatgattacaccagaactgcacctgcttcaggccgaccgttagagcacagtggcattggggtcagataaagaagttccttctcagctttccctggaagagcagctacccgttttctcatagacgtaggagctttggatgatacttcatggtttggaattggaacagacattgtctcttgcagaaaatctaaaagcgcttttcttccatgacatggcaaaggctctcttctcttttcacctgaagggttgttccttgtgctggtcacatctttagctgaagttaagccagacccttctgccccttggctattgagtctctcccatctggtcatgtcattccgagctcttgtctttcccgctgctttcttgatactattaggcgctaaagttttctgagaaggtttgttggtccctcggtttaccgcatcgagtgatttaaccaatgtatgatgtttcttgctggcggtaggaagacctgaagctgcttttgatttatctacagaagataacaagagatagctttagtttccatattttatagccaagtacagcacatatgcatgaggggagaagtttacctgctcttctgtacttctggtgcaaatcctaattgaaccatgcaggaaaaaaaagagattaatatcagtgggtggggaagggaacataacagtaaattttaacatgaacgtttgtgttcctcaagtttttcagtgcctctgttagacactgaccttagaattgaataagcaggttttttcggttacttcaaattctatagtaagaaacactaaccaaaaatcgtcgctaggaaaattttgataagagaagggtgacaaaaaatgctaaccatggcaaggttaaaatcaatgagatagcctttgttggtcttcctagagaagaggaagtttcctggcttaacatccctatgaacaacacccttcaagattgtgaagagaaaaaatagaactggttagttgcgtgattgaaatatgaatgctaaaaataattcagtccaaaatctgcatacctgcttatgcagactcgatagagctttgaacatgcagtagccgtaccactgcagctgatacacatctatttctctcttcaatgaatcaggtctgtcatgttcaaggtgctcaaggatgatgcaatcagaatctccattcttgagacagccttcatgctttattatacagtttttccccctaaataaagcaataatttcagcagtttcagatcgttatgcttgaaaatgtggaaggttcatgcctaatcatacttagttacttacccaaaacgctccagcattctgatttcattattcacataatacttctgagcgccaacatgagggcctgcaaggaaaacaaatgaggcaagtcttccaacgaaaaacactgatgcagtgaaaacatttagccacatatcattttctttcccgtacatttaattgcaaactctgttccatcagttttcctcgttgccttataaacaatcccgtagccacctacatttggatttcaccagtgattagtcaataactagttaagttgttacaatagaatgaggaatatagatgaaatagactggaaagaaatacctgaaccttcttcctctacaatagtgtaagaatcaaaatctggaattgtgttatgctttgcctgatcctaaaccacaaatatgagaagagaacttttaatatagtgtgcattaatgctaaaattcggtgcaagagtgttaacgtagttaacattatataaaggcctcactctagacgaaagagacatgtctaccttctgatctttaagacgaacggtgttaaaattctgcttcctcttctggataactttactttttctggtgtgttttatctcaggggaacagctgtacgttttgctgtttcccggcaatttgcattgatccagagttttttgtaccaaagatttatcttgattagcttctgtagcagaaggcttcaacggcagctctctgtcaggggtgctaacgatgtctacagtgtgatcatctacaagtagatcttcagtgtcatccacaatctgcactggttctaactcattttctgttggcatcaatgaggcaacgggatcggactgcacagaatcagtttgtatctctcccttagggaagagatccttcttatttttatcatcaccttcttcgattaatatttggttgtcagcaatttggaaatctccaatttcaggtcgctcgtaatatccatcctcctgaggagatggcaaatcgttcttgctttcctctaaccgatgtgtaggattgacatccactgaagcattggatgtctgcggaccaggctgatgatcttgaacaaaagcctctattcctcggttagatgcacttaaattgaaaaccgaagcttgggattcaagagctaaaatagtcccaagcatagttccacaggcaacagttctgatgtcgttaggtctgctatctattacagagtaattcacctagagaaaataatcaataacacaatgaatcaaccacccactaaaccataccgtgagaacttcatatatatcttaagagattacttacatcgtttccatcatttcgacttcttttgggcaatggcatgagctctagctcctcttgttccgcattctctgatacattaccataaataacccaaaattgagaagagaatctctatgtaagtgtgacctactaaaccgcaatatcagataaaattgcaaaaacttagtacctctcgaatgctttagcgtgagagatctcggatccataaactgttctaacacaacattttcctgcaaatccaaactacaggcgaaactagccggagcggagggagactcaggcgagagagtcacagtgaagccatcttcggcaagggaaataggagaattagggatcgagcaaagatatttgacgagattaggagaaccttggaagtatgtacactttgaagaaagatctataacagattctggatgaccagaagaaagtaggagacgagataactcaaaagcatgcagatgatagttaaggtcgtcgttgccgtctgaattggtgggactaagaggaatgagctctcttccggctgtagaattctcgagttgacgcggttccgagttttctgacattgcaaatgctgtgaatctgagggagagagagagaagctagggatttgagaatttgagatttggggggcaaatggagaaggagcgggagaatggcacgtgcggtacgtgtgatgttttgtttcgaggattttgtacataaaaatgttcccgctcatttctttgccagctggattatttacggcctcatgcgtctacaggcccattttaaatgagcccatatagcctggaaatgtttcattgattgtagtcttgtagataatttttagaacaatgcaattattcaagatgctaaaacttgctgcatttcgaactatatatttgaataaccttctcaaatactattattggttacctaatgtttttgatgctctagaagttcaatttataacatgcaaagagaaaaactggagttcatggttacagaaaacaacattagtcgtcaatttcaaatgaaagtaatcccataaaatatatatatacatgcatgcatgactatgtatggatggttatatcatatatggaacatgtgcatttgtgatggtataatgtaaagatggataaatagtaaatgatggccaaagagtgctcgtgagagacaaaggaaatggtatggggtaaccaaaatgtcggttagttggtgcggacataatattggccgtggagctaaatcaggctgtgtgactaaatacaacacaaatggtcccttttgtttttcgttttttgttttgtaacatagcattatgctcttttatcttgtcctatgtaaattttgtcttctcctgataatattatagaatatcttgatatggttatcataaattttctgttaaatttacagaaaacaaaatgaacattaatgttctaacatatgaatggctaacatcagtaatgacctgttctaataaatttgatatggccccttaaaaaccatcccgtgaatccgattgatcgtttccactatgtctttaaaagaataaatataaaaggcattgtaatcataatatcctccatttccatatatattgactattctatctgtacctacaatgagatttcaactttggagttttcatcttttttttctttccaatttgtggaggaaaataaatcagcatctcatacctatccatcgactgatacgtgtcacacattgtatccaacgatccaaaattataaaacaaataatctctaatatatatccaaatagcacaaagaaccttcacttttctctcccactctttcttttactactctcacacatatctctgtctatatatcactttacataaacgactattccacacacaaacacacatagccatggcctcttctttctcttcacaagccttcttcttgctcacattgtctatggttttaattcctttctctttagctcaagctcccatgatggctccttctggctcaatgtccatgccgcctatgtctagcggcggtggaagctcggttcctcctccagtgatgtctccgatgccaatgatgactccaccacctatgcctatgactccaccacccatgcccatgactccaccacctatgcctatggctccaccaccaatgcccatggcttcaccaccaatgatgccaatgactccatctacaagcccaagcccattaacagttccggatatgccttcgccgccgatgccatccggaatggaatcttcaccttctccaggacccatgccaccggcaatggcggcttcgccggattcaggagctttcaatgttagaaacaacgtcgtaacactttcatgcgttgttggagttgttgcagcccattttctcctcgtttgaaatgattattgaattggtcagcctcgatcgttttcttgtaatttaccttcatttttttccctcaaattattagtggtcatcattttataatatttgagtttgtgtttgatgtacgattcagacatttgtttgcattatgtgcttaataagtttatcgttgactctacttgaagagagactttgtatgtgatgtaaatttcttctatctatggaacattgcattcgtagtcatatataggacataaatatggttacaacttggaaggataaataccacaaggcacaatatgatcaatacgacaatacctctcattgttagtcgataatatcgatgtatatagtcactagactcaccgatccgtaattccttttaacaaaaaatacgttattcagatatgttattttcatatatatgtgtaaaaatgttcttcctaataattaaaagagacaaaccaaagaaaaggctatatttgcaagctgtcattggaattttgcatacattttctctatatattctcattgaaattcatttattctttcattttatggaggtgtagaaatacataaaatccaaagaaaatgagaaattttcaaatatgttgaatttgagaatggaagaatatgacaaaggtgggtatagtgaataaatggtagggaatatagatatgcccgacccaagaggacagctaaaaagaaagtgacgttcacatgtctgtctttctctattgccccaaccattttccaatgtgtattagtaataacagaaatcatacatttaaaaagaactatatagaaattttattcatatatatatagcagtactagttagtatatctgcatttttttgtttttcaagtcatgttgatgatttattactttaaacagatgccgaagctttctaaagtaattacggtaaatatatgttagtcatttgtaaaaacgaccgatgacagaaagatatgttttatttcttagtatatctaacaatgttataaccgaatgatgacaacctataaaccacaatagagcactaatttaattacatgctctttgttgctggctccgtacaccggccaccacaatcaaaaccttaattgtccactttttagccacttcgaattctcagaaagataaatctaaggaagttctaggtctttcaaaggccacaaatctcgatatgttggtggtttgtgaatatgcaaatctttggtgatacgctaacttcttcaattcataatttcaataaacgaactgagaatttactgatgggtagttgttcaaagctggagtttcttccacctgctgacgtttacttggaatctctcaaggacccaaatctaaggaaatgcttacggttgaaaagtgtccgtccgatttcgaaaaccattccaggtatttttttttaagtcttacaacatattctttccggtgaggaggagaccatgttgtttttcttcccaagaaaatttaacctctattgctatgatcctaagtgtataaaaggcttgcaatcaatggaggttttaattatagtccatgggtgaataatgtcatcaatagtgataactggacaagatttttaaaaaatgccacaaacacaaaagaaaaaaaaaattgaaagtaaatgtcataaaatcataattatgcgtagtgtgcaaggtatactttggtaaaatctgtcacattagacatttacttatttacaattttgcaaattggttatttacttaaataaatgaaacttatacgcaaaataaaataaaatcctgactaagctcatatcttttaatttgttttctaacagaaatatatccctctgttagtacaccacattgacgatgtcattcattattaggaatggaaatttttcattctttcctataaaactagatgttaattaaaaaaaaaaaacaattatacggatttcttaagagatttgaatttctttacgtagattttctgtaagtagtataattcaaaagaagcaagttaaagctaatctccttgacatggattgaatttttttttgaaccaattacccgacaaggatttttttagtggtatttatagattttgccattttttatatctaaaaaatacaatttaacacattacgtttgggtttatttagttccatattttttttagggtatagtgtttgttattaagtatgtattttacaaaaaaaaatctcaagtgtttcattttttaaagttgcagaaaacgcaaaatctaaaatatttgaaggtggcaaatctaaaagatttaagtcacaaaatggcaaaatcaacaataatcctatattattttgggtggtgttgatgagccgttgacgtagaagaatagcatgtggccttatttgctataggatgtggccctaaccctaataggatgagaaatctttgctcaacttggcttagagtggaaccaaccgtgaagcatccgtctcaaaaatgtctactctatgacgtctttttcaccccaccccccccctctccacaaggcccctccatttctgtataaacttcagaatgctttcttgagaatgtttttatcttctttctatagtttccatgaagtcttcttcttctcagagctacgatgttttccccaacttcagaggggaagatgtccgccactcattagtcagccaccttcgtaaggaacttgatcgcaaattcatcaatacattcaacgacaacaggatcgaaagaagccgcaaaataaccccagagctgttattggctatagaaaactcaaggatctcacttgtcgtcttctctaaaaactatgcttcttccacgtggtgcttagatgaattggtgaagatccaagagtgctatgagaaattggatcaaatggtgattcctattttctacaaagtagatccttctcatgttagaaaacagaccggagagtttggcatggtctttggggagacctgcaagggcagaacagagaatgagaagcgaaaatggatgcgagctctagcagaggtagcacatctagccggagaagatcttcggaactggtatgttgttgtttttttagtttatatatatatatatatatataattagtttcgttggatagtgtaacacccggattttaggaataatggtgtatgcggagaggtttaaaataatttatttggctacttatatcatcaaattgcatttattttttcggtcaaacgttttgagagaactgcatagttaaacgtgcttgggatagataagtttcaggtgggtaaacttccgataagtgattgtcggaacagtgtgtatgaggattaaacacagagaaagatcgtgtggtgattgtagtgtcggtaaacaagtttttaaagcctcccagctgtaatgtatcaaccgtcggaaaggggtgggtcccacgagcctgagtaaagacgtgggtgctcactagaaaaggcagtccatgcgttatagatagactctcgttatgctattagggatgttccttgataacagttgactattgttatttttatgtaggcgtagcgaagcagaaatgcttgaaaatatcgccaaggatgtttcaaacaaactcttccccccatcaaataatttcagtgacttcgtcgggattgaagctcatatagaggcattgatatcaatgttgcgcttcgactccaagaaagcgcgaatgatagggatttgtgggccttctgaaactggtaagactactataggaagagctttatacagcagactcaaaagcgacttccaccatcgggctttcgtagcatataagagaaaaatacggagcgactatgaccagaagctgtattgggaagaacaatttctatcagaaattctttgtcagaaggatataaagatagaggaatgtggtgcggtggaacaacgactaaagcacacgaaagttcttattgttcttgatgatgttgatgatatagagctactaaaaacgttggtaggacgtatcagatggtttggatctgagagcaaaattgttgtgattactcaaaaaagggaacttctcaaggctcacaacattgcacatgtttatgaagtgggattcccatcagaagaactggctcatcaaatgttttgtcgatatgcttttgggaaaaactctccacctcatggtttcaacgagcttgcagatgaagctgcaaagattgccggtaatcgtcctaaagctctcaagtacgttggttcgtcttttagaagactagacaaggaacaatgggtgaagatgctatcggagttccgtagtaatgggaataaactaaaaatcagctatgatgagttagatggtaaaggtcaagattacgttgcgtgtttaaccaatggtgagaaaaaatcaatattaaaaattattgcatggagatagtgttaacactgaaattaccattattgctgataattccctcaaacacatgcatgcaggttcaaattcccaggtgaaggcagagtggatccacttggcactaggcgtgtctatattacttaacatccgcagtgacggaacgacaattctcaaacatttgagctacaagtaatgtgggctctaagcttatacaatgctacactttctttttgcatagtaatctgttgggatcataagtaataatctaggatttgtatcaatcaatctaacaataagtggttgtttacagtcgaagcatggcgcaacaagcaaaaatatggtggtatgaaaatttggaaagagtgtgcaagaagtacaatatatgtggcatagatagctcaactgatggtggtggtaagaaagtttgctacgttgggatatacccctatgttttaatacaatatcgtattgcgggacgatattgatagtataaaaacggctaggagataggttaagtctctcgtactggcccattcgtttccacgttttcgatgaagatctggataagaatacatcttatgttgttagttttttccaatttggtatttgcatttagatggtgcatgcaaacccaattgtgtaccaaaaaattctagatattttggatgcacaaaaaactatatcacatcacatgcaatgcataactctcttgcttcacattagctatgcatgcaatgcaggttcaacgtatggacaatgttcaaattcccaatttcaaagaaacatggacgcaagccccgggggaaacaaaaccagtaatcaatccacaaaagattcaccgagagcttctcaagtagagaaggaaaagatcgagtactgtgagccacatgtatatataacacctgccatcttcagtgacggaaccagagctcccaaatacgtggagtctaggtaacgtgaaatctaatctttcacaatatataagtatactttcttttcacatcgtagaatcttaagtagtaacttggaactaggattctatatcaatcaatctttcaacaagtggttgtttgtacttagtagccgaagagtaacccaagtgcaccacgccaaaacatggtggccggagaattgtgaaaaagtgtacgagaaccacaacaacatatatggcatagatagatcaattgacggtggtgataagtttgagggaaaaagtaaagttagtgacggtgggttagacggcaaagatcaaggtattgtgtgtttattgaatggtgatcatttcaaaaacttgctaggagatagtgttaacatgcattattggacttagaatcatatatgataagttctcatttgttttcgtgtttatcagatacattcaccaaacattcttcgcttgtccaacttggtatttgcatatacatgatccattaaaaactagaaagtagctcacgctatgcctatgcgtgggttatgcaaatcaaatgtttcatacacaaacacatgatttgcattagcttaccaatgaagttgattgatttattatatccaaaaaaaaaaagtagggaatttcaaaattgttctttaacagtaatcattaccaatggagttgataatgattatttattattcatgtagtttgtttttcaatttatggtataagagcttgcaaaataattagtaaaaactaaaaagagagagagagaaaaagccacgtaaacataagtatactacttgaaagaaagaaatttgatgacaattgaattattgtttgtacaatatagtgaccacgacactttaactgactttcaatttttattttatttttatatgtatgtatagatgaattcattttgttaatagaagaaaatttaaatgttatagaattttcatgtgaaactaataatatagtattcatatttatgaactaaaataagacatttaattacgaagactataataaggtttacttgcatggtgtttaatctcaattttcttgctctctcatggatctcaaatttaattgtggtaattaaatgtctcaataactattaaaataaaatacttttttgatctaaagcctttgaccttgtttattctacgcagaattaaaataagatacatttacatcaaattccagagatcacaattttatgcccaaattacggaatttggcgcaaaaattttgatgccaaaaagtagaattatattttgatgcaaaaaacggtgaaacttctatttagtgtaaaaaaatgtggaattttgttttggtcaaaaaatgtagaattacgctttgacgctaaaattaataaatcaaatatgaaatatttttatatgcttttaatattcgttcttcttgaaaatttaatcgttcaaattcaggttttttaaaaataatttagtactagatcatctcattcaaacaccattataaaacccataaactaccaaaatgcagcatccagatgcagaaaccaatctttgtagcgtacattgcatgtggataactatctctttcaatccctaacgtctatgcctacaggttcaatgtatggacaaagttcaaattccgagcttcaaataaacatggacgcagacaataggagatgtgaacctgtgagtgagatgcttttcaaaaattacaatgtgtgttcgcctaatggtaagggaagtgatatttgaaaattgcgcatgacgatattgttatctggacttacaattcttactgataagtccctcaagcacatatgcctgcaggtttaaccgatgtaaactgttcaaatccccagtctcaaagaaaattggacgcaagcctaaagaaagacaaaattgtgcatgagtggattcgaaccggtagtggcttcttttttgattttcagggcccaaaatctatagtgagtgctgctcaagtggacgagaaaaatttcgagtactgtgaacaaggtgtgtatataacacttggcatcctcagtggcggaattatagttctcaaacatttggagttcaggtataatgtgaaatatattcttacgtacacaatattttttggatgctaccctgtctttctgaatcgtagtttacataatcttcagtagtaatctgggattcattattcatatatataacaatgagtgggttatttgtagccgaagaatggcgcaacaagcaaaagtttggtggtcggaaaattggataaaagtgtaccaggagcacaacatatgtggcatagataaatcatttgatggtaggtttgatgatagacgtgtcattcgtcaattaagaccaaactgaagcacggcctggcccttgtaaaagtcaggacttgagctagatacttaagccaagcagatctgtttggctaagtctggtcgggttagcgcgaaattgtcgaaatctgtttaataattgcattcagtgcaagtctttaatttgtacttcatggctttaatacactaattaaacattggatcatttttagttttttcttcttttcaaaatacatatttttctaagttttccaatttagtgattttattagttctttagtagaatactggatcatggacacatgctacaacatgctttgacctaattatgaaatttatcagcgaatatattatgaacatatgtttggaatataataatatcaaattcaacctttgcatgaaatccatatttttattttagaattctcataaaacacattgcttacaaatcaaatttcaatcatttcgaggtgtcaaaccttatttaaaccatcttatcaaattttaacccaccgtttattataaaaattataactgattccatattataatacactacatttaacccgtcacctgctataaatattttaaatatatttattttacaaaaatcacattagattatttataatattttcatctgtttaatatttatgatattctttaaaaatattaaattaaactatttaaatattcaaaatgaaattatttaaatttcttattgtagtatataatattacaataagaaattccgaccctgttagtcttcaaaagtatattactcaaatctgaatttttaatctattacaattttttttccctaaactgaacgatttatatacgtttttaaaaattcaaattatggcatatgcggaaaacgatcttttttttataaatattttatggatgatatgattatttatttttttcacaaaaatagtatcaaagaagtgaggtgaagtataataattaatatggtaattaaattatatatcacccaatcttatatggtcattttgatgggttattcttttttagaaataataacttaatccgttttttaatctatggatccacaagattactaagtggattaagttatgtgattacatttttctaataacatattaatgtatttgttacactttcaattttacaacttataagtatactccccaagtaattgtataggattttgattgtcccattatacataaattttcgttgtttaatttgattttcttgtcaactgttttatttgatgaatgagcacgagtatcacagtagagtgtagaccatatgatttaatcgtattcctctgtttagttatcttagaaccatttacttgcaatttttttttaattgcgttaatttttgtaattatagattgcaatgattttagaataaaattatatttagatctaagttattggataatggtttcaataatacaaaattttaggatagcctcttaaaaatccatttattttggtatttcttttcttcctttaagaaagtaattaataaaaaaactttgtacagatatatttaatttggtttggtttggttcgattaaaggtttaattgagaacttgatttggtttatttaaaaccattttggttaagtcgaaactggaaagtgtttgatgaacatttcaataaacgcttcatcatttcatacaaccacgattacgttaatttaaacaatttttgtaatgattaatctggaaattgagcaaatgttttatacacccaaaataatctcacttctgttaattctcaaagatcaaccaaacttacaagactcgtgtgaattaaactgcagatatatttaaaaacccgatcttagacttccgatgccactctctttgtacagctcttagggacatgaatacaatggaagtttggtccctttgggacagttacaggtcttttctcccccgaagcaacaacacaaacagaaggtttgttgatgattggaacttctttagatcctccattcatctgcgaggcttgctccgcggtttcgattcgtttatttgccacttgcttctttctacctaatgcaaccctggaaaatgcacacaattttcagattacatgccgagagaaggcaactgctatgacaagtcaaaactcgtttgctcggttctctcaagtgagagattacactttgtcttctaatcaagcagtttttacctcttgcaatccaccatattttcagagacaagttttgtggatgttcctcttgaagcttttaaccgggaagctgagttcttctccaactgcatatgagattattatatcagaaaaagaaactctcacacgatgaacagacatcaatatgctacagaaagaacttactcgaactggttgatgatttggacccaagttttcaccatggaaccccctaatgctggcagtgtcttctttggcaagagtacattgtggtttcttctctgtatttgcttccttgagaatttgtctttcctataaaaatgtaaattttcttccatcagaaaagagttgcatattagagaataaacagctttggtgggttgtattattgtgcatcatacatcggttctaagtcgaaaaggctttggattcgtgagcttgggttttgtatacttgacacgggtaccagccgaaacagtcttgccattgaaacacttgtctgctactgtcataacctggttcatacaaatatacataaatacacagaagatgatagtagagcccaattagaaagtacataggcttgtaacataccttttgagtagttttacaaatttctttcttgccaaagactttctttttcaacagaggataggtggcttggtcgagatttctgcaagatccacacagaacaagtatatctgtgagatgatgtacaaaaaaggaaaccaaagtaaagcaaataaacaacattttcctcacctgttattgtccaaggctgaagaattttccttatcatcttccctatcaacatccgttgcattagtagcattttctttcttctcacactccaatggcaatgcattttccttgtcttcaatctccacagtctcacattgctttgctttatctagtccactcaccttaattacagcaatatcttctttatcgatagccgcgacaatattagcattctctttgtcctcgcactccgaagctaatgcactttccttttcttcaatctctgtgatttgatatttctgtgatgtagcaagtccactctcctttattacagcaggatcttctctggcctggagctgattgttcatgttagccttcgatgtgtctgacaattcttcagatttgttttcaaccaagagctcttcatctctactagttttatcctcaacttccataccattagaatcataaggtttcaaaggatcagaggaaggcacaggatcttcctttttcttaaccctcttcttcaaagtactgacacctttgtctttttgatcaatctgtttctgtgaccgcagagaatcaaacactcggctcttcacctctcgtgtttttagaggtcttctagatgacgctgaactcacaaccttatgattaacccccaaaccatttcttttgttatcaatctcaagcttcctcatcccattacacaacttcttcaccgaggaactaagctccacagatctcttcagtttcaccaacttctttggagattgaaacactaaagcctttgcaacaactctgttttccgacaccttgattgttgcatttctcggattctgtacacttctaaaagctgctgggctctgcatttgcttcttcctctcagttaatgccttctgaggaactgatgagatcactgctgactcttttccttttgcctttgcctttggagtcacattcttatttgtggaaactacttttacttcttttgacctgatattaccattacccttctgaggaatcgatgagatcatagccaatttagacacacgtgatcttgagggctttgcaggaaccgtgttaggacatttaggatcaacactgtaataaaaaaaaagtatgtagcacaatgcaatgttaaacacacattacagtgattaatctctctcgaagttcaaaaacacatttctcaaatagttagaagttcattacctgaaatcctttctataaagagcttttcgaagacgaacacttggactcctagctgccatgacctattaatgttgattaacatcaaattcttaagttaatgatacactttaaaacgaaatcaaatcaaggaagagaagaagaaaaaaagtttggaactttaagctaacccgaagaacgaattttttgtagattgcttccgaatccaaaaattcctcatgcttctgatcacatcctaaatacacattatcaccaggaaaccaaaatggatcaaaacataaactaattaaaaactgttcactaaaaccctaatttagcaattttcagaaaatgttataatcaaatttcccagatctgtggaacattaatgttattagtaatgatttgattcgaattttgaacaagggaaatgtaaaaagagtgaacaagattctgaccaactctagaacagaaccagtaacgatcatctccttcagggcgatgatctggtgcggtgaggtctacaaacttgggagcttctattgtctcgtagaagtcttcttcgttaaactcatccactatcatatgctcaaatgcctccatcttacactaaattagaaattcgcagagagagtatagaagaacagagagagagagaaagagtattgtctaatttggtgcgtgtctgtttagctagctcagacaagatgaaggaacattcacagaaactagccgttaaaaggaaaggattgtaataatggtctcttttcagggttattttcgtcactacagtgattttgattttgagcttcgaagcatctttttcattccgagtaaagtaaatctgaaggaaagaggagacagaagaagcaaaccggttcatttaaaccggtatctatatagaaccattttaaaccctgtttacgactcttaaacgtcaataatcatagaggcaggaatattttttgtttctttccacataatttatgctttgttttcttcgacagattcaaaatccgtatttaatttaactggtaaaagtaattattcggtaatgcacaacatttctctttctttgtttagacgcgatcagatatttcaatatgaaatcaaaattattggtttaattaaagagtttggagcctagtaaatttcaagcaaaaaaaaaacacaggaattgatcagagtgttatgaataaagatggatgcccattataaaacttatcatctaagcccatcatctagatgtttgtagagttttaccttttccttgtactcctatataaagaaccctttcctcaatggaaaacacactcatttcttctatctctttctctggttataacacgttatcagcacgctcttaaaagatagatatagagattcttacatttttttaagaaccatgtttacttatcgactcatggttcatagtacttattttctattattgaaacaaaacaatatgagtcgatcgatgattatagtatagatcggtaaaagcatgttttcaatgattcaataaagaagagaatcatgcttatcatttgtttctataattactatcgcatggttcaatgattctacaaagaaaatcgttaaagaagagaatcatgcttgttaattgttaatttttgtgatttactattacaatattgaatatataaattaccaattttataattatataactaattttgtaactattcatagcccggtggtgggtgatgcaagcatgtattaatgttttagcattccagttttgaatagttgcatctatattcaatatcattttataaatattatattgtctaaaatccatttatgattgatatgatatcccttatttaactcatttgattaaaacgttatacatatcttatcacttttagatattgacttttccatattaaatatttgatttccatatatttgattgtgttattattatttttactaaaaacgttgcaagataatttttctttttataagattccatatatctaaatctttatgttattattatctaaatctttttataagatttccatatatttgattgtgttattattatttttactaaaaacgttgcaagataatttttctttttataagattcttttctctaaatctttgtggtatctaaaaaaaaaaaaaaaaaaaaaattgttcatggttttgccctaattttgcacgaaatcattttacccaaatcttgcacgaattcatattaccctaaataaaagttttgtcaagatatatgtaaaatccagatttttcacaacatagttttattctgattggttttacaatattgcattaaaattgtattgttatataatacttgattattttatgaaataaattgattggtaaataacttaatttaaaggtataatcacttatagaaattttcatgaatgactagtttaatgtatcttaagaagacatcataattttgatggtcaaagttttttcaagaacttaaattatcaccaaaagttgagaaaataaatatggtaaaaaataagtaaaatttctaacttataacgatgaaataatctagtatatcaagtagtataaaatcttattaaaagactctagaagagcatatacattgttttctatgggaatacaaaattaagatcatcgatgcggtatagttctccaaatctcaaagttaatatgatgagatataaaatacatttgcttctagagtggaattcaatacgagatggatgaacttgaagtttcatcatttcgaagaggagaagtaatgaatggataataagtgacatatcgagaagattatgttcaatctttgactactaaagatctaaaagttgtataaagcaattcttataggaatgtgttattagataaaataagttataattagttattactaaaacttcaagacttgaagtctctttgtgaatataactcacattgttaagagaatatctttgatgcggagatggtaaaacagacgcttaaacttttacgcaagtattgttctcttgtagacacaatattttgaaagaaatttaagaactattatgaacttaaatcgagtgtttttcaaaggctaagaaaatatatgagttattgatgataagtaatactcatattcttaagtgaatataagatctaacatagctagtcaaattacatttaatatcatttatattagaatataaaattttaattattgtctcgtttattgctttattaacatatgattgattattaacatacatggaagtaattttgattataagatctcattaagagagtaactgataagcaatgaaaagtaaatccgaagttaaaaaaaaaaaaaaaaaaaaaacctagaaatttcaagagtatatttggcttaaccggattggtcatcttggtttaatgatgatgcgaaagtattgagaattatgtggacattaggtgaaaagccagaagattctccttaatgatttaacaattgttacttgctcagaaagcaatatgataaagtgatttttaccagtcaaaataatttggactttatctattcgtaagtatatacaaggagatgattatgggttaatcacccactgtatgacatttagatacctaatggctataaaagatgcatcgattcaatggacgcattgactcgattgttgcatcgactagaaggtcatatttatccttgttataaacccgcaacatagagtttgcgaggttactttcttgattaaaatacaagagtattccagtgtttatttattataaccattattggatatccgttgggataagtgtttaacattttgaaattcatgttcatacacaaaatggtttagtaatatcgatatgcatcaagccaatgaataattaatagttttccccatcattattggttttggatcagaaaccaaatagttttcatctaaaatctttgaatgtgaaaagtgctccaccacagcacgctgagatgaaccctcaaaggaggataaggatacatgttggatatgaatgataactaagccatcctagaaagatttatataccgctcgttttgaagactatcatattatatagtcagatattccaacataagggggagaatgtatacagctggtgaaaaaaagataaaaagaaatgaattatcaatgatcttcggagtaaagaatgtatattaagagtccaaaagataattcaattacagaatttagcgttgtaattgccagaggcatttgctgacccaaataaagtgatgaagtcacctataccagttgtaaattaaatgctctagaatataatgaatgtcctgtaaggaccaatttcaaactgctattgagtcttaagatcgcatgaagcgtaatagaccttggttccaaatataaacatcctcgtaaaagtgaaggagcacaaaattaaaaatgaccaaattgaggaaataaatattttgatgatctcttgaagagagtgaatgatctctaaaagagacataaacatgacaaatgaaacattcaagtacttgacaatgaagagatctagctagttatgtcatgtcaaaatataatggaatcaaaagcaaatcgacgtcgtaatatatttgcatgctatgagcagttgatattatggacaaaaaggaggatcatgaaagaaagtctattgaaaagtgtacacaaagtaatgattagccaaaaatggaaaagaagaaatagacatataattataatctctagtagagatatttgtactagtagtctatgcacatgatgtgtaaaaccagtggaagataaatgagtctttatgtgaaagaatagtgaaattaatgagattttcacaagataagaaatgtattatgaagagatatattctcttgtggtggatgtaatatttttaagtatctaaagtctgacaataagagacagaacactggatatgacatttatatgaaattattgaaagatataatctctgaaggattaattatatgagaattatgttctctagaactctactcgatcgaataaaaagaaatatgtaacatgacatataatcatataaatgtatatttatgttgagtttgtcaaaatatattgatcaaactaatatttgttttgaaaatcattaaaactcgtacagagttatcataagtaatacgatgacaataatctatgataaaatatcactagataatgatatttataagtctatatgaaaaccatataattttgatcattaagattatggttattaattccaacgagatattgtatttgattgaaaatcatctccttaagaagatgtttccgagggggagattgaatgatatgcgtggatgtaccctttttccttatcatagtttttatcccacatgatttttctatgacaaagtttttaacgagacattaaagaacacgcaaataatacacttgatgaatattaagaaattctatcaatcatccaaatgaatattatacactaatgatatttagagaaataaataagatggtcaagatgaatcatctaaaagattcatgagcagaagaatgacgttgtactttatccagaaatttgttcaagagaagatttggcagacttattctcaaatactgtttattctctgccacatcttctaatcatgcagagattttactaattcatgaagctagccgcgagtgtgtatggctaagatccatagttcaccatatacaagaagactgtggtatgtatgcagggaaaaaaactccaacaattatgtacgaagacaatgcagcatgcatcgcacaactcaaagacggatacatcaaaggcgatagaataaagcacatcctaccaaaattcttttacacacacgatctacaaaagagcggcgatgtacgagttctacagatccgttcgaatgataatctggctgacttattcaccaaggcgctacctactgctactttcaagaagttagtctatcgtatcggattacgccgtctcaaagatctcgacgaatatactcataagggggagtaattgtatgttgcactctttttcccttaaccaaggttttcctattgggttttcctggtaaggtttttaatgagatagcatttcaaatactttacgagttatggtactataatggtcatcaagggggagtgttatgaataaagatggatgcccattataagacccatcatctaagcccatcatttagatgtttgtagagttttacctttttcttgtactcctatataaagaacccttttctcaatagaaaacacactcatttcttctatctctttctcaagagaaatttattttcaacggatacttgtgacttttggagactcgagaatctaaacaacggcgatctacaaagataaagagttattgagctcactatgccaagttctgaaaaggcccacttcaaattataaaggcccagtttaagcccactatggaaacgagacagaagcaaatgggtataatcttcaagtcaagcgaacgatcggtgacggtgttatcttaccgccggagccggagtttcccactctattgtaataacagatatttcgaccggagtttctaagtgaatccaaatttgttgttcttcgttgcggctccatctctcgctgtgtatttatagtcaggtcttttgagttatcccattttgcgcgatcccgtcttcaccgtttccatcttccagcgagcacatctctgttgatcgataattttgtacctagttcaggttagttgcgtaattatacttgtgtaatttctttttttggattctctctgaactgatttgctgggcgtggaccttcggttttgttcatttcgtagtcctctatgcgaatgtttccagcgtttgatctttagatctgtagttcgattgtatgcttctaatagttattcgttgtcttgtacatttgatctataatgagaactgatgcgcggttttagtcgaacgcgacatcgtagttcggattagagagtgtactaatctttgtttaacaaagatggcatttcatcttttgactgtgtgatatgtcaaacccgcagaatccataaaactagtttactttgatatgttttgttcttcttcattgaatgtttgtgtggtgtcttgtagttgtaggaaagatgaacaagctgttggaatatgggagaaaagctatgttctatgtgagagttctctccggctatgaagaaaggagaatccggagttacaggttgcaactcgaaaagcgtatccagcaggtttctttctcaccatgcctctatctaatttcttagcataaatggtagaataagatgataaaaccctgctttggactatagttggtcgcataaatttgaagaaccctgtctataaacattattacccttgtttttattcattgttaatggaagtcaatatgtgtacttctagtttatgataattgaataatatctataaattagaaaagcttagtacttattgtacattgtgaagactgctgaaataagatcttccttacattatagtttcctaatcgtatagacttctgtacttgtgacttctagcttctagcttgggttggtcatggacctcatggttacctttttatctgatcaaacctctggtcctgcaggctaaccaaaggaaagtagagataaacagacttccagagcagattgtattatctgaagtccgccgtatggttgaggagatgcagaatttgaataagcagattgagaatacggttagtctctcttgtctttatcctcagtccaaagtttgcaaatggttgagtttatcacttgtttaatatcaattatatatattaagtgtggtgaaaaatgtttgagatattgtttccttcgaagtgcttttggttcgaaagcattcatagaagagaaaacgcttttagtttttggcgtttgagatatttgaaagcagaaatttttggaagaaaagagtgaaatcagtgccagagtctgtgttccataaatcagagagtcttttgttctacttttgttcgtgttaggagaatataagtctaagtatgttttgggtcttttaccaatacaggaggctcaaattgaagactacttcaaaccgatagacaagcatgctagtaccataatggaaattcagctcgaaggagagaagaaaacgatggggacaatgatgaacgcaacacaacaggaagctatacgaaagattgaagaagctgagaaactcgctcgggcacgtggaaatgcaaatgtgactacagatgcaaacatgggagataagatccaggattcagagtcctcagccaacgaaaaatctcaagcaaaatgaagtcagatcttgtcttcatgttgacacagaatagattcagcgtctctgaatacatcctcttagttgattaaactgagattgtagcctcgcatttgctgaggttttaataattttgaaatttggtcaactgaatagaatcaaaaccgagattgtgttctgtctagcgtacaagaaattatagaggtgaccctggttggaccatccccaacgaccacgttttgtcaatatatgttgtttcaaacttaacttcgcctaataaagtatattgtgatttacaatggatcggtcttacagcttaaaggtttcaactttcaacttcgtgggtaccaacaccaagtacttttcctacgtttggggtgcgcatgtgttagcaggataaaaacgatggtaactaatagagtaacaagacatcaaatggctactcttttttctctttctgctgaaacctcacgaaagacatagtttgtagaatcgaagcatgatgttttgttttaatacgagaagaaaatgtgagtttcttcttgttacctgctttgggtatgaagaaactcacgcatctgattgtgaacttcggatttcacaacaagtcgcattctcttagagtcttcccaaagaaggcctctccattcccgagcaaagtcacaagctgcctcaaacacatcctgctaacatgattttggttaatgagatttactataacggttttgcgttatggagaagagaaaataataagagggttcaggtttgttacttttgaaggaaattcatcatagaagtgagcctgggtcatctcaattctctgcagatctgtctcccaaagccgaatctgccagaacaatgcatttttattcaacataagcctgatgaatcaggacgtagagatagtatacactttcaattctataaaccaatcctatacacatttttgtataatcgacacttgatgggcatagagagtataaacctgatcagtgacattttctggaatagatgggactcgatcagcacatcgtggatgagaattctgctggaggaaagttataatctgtgacaatcaaaagaaaaggaaaaaatatttattcagaaactataaagagacgcatcaacaatttgatcaacatttcaaggacagtgaggatccgggcaaaatcatgtattcgataacttcaaaatgtttttcaactgaaaccaactgtacctgatctgatgtgatgccattgtcaaatgcattgtacaaactttcctttgtaatggcacaagcaataaggtttggaagttggtactctatcctggaaataatgaagcaccaactacttagacctaaaggattttaagacacagaagagtaaagtttcaggtcgatgttcaggagcttctacctcgcaaatagtcgtaaaatttcacactgtaacttagatgtggagtacgcatacattctgaagtttgtttccatcacgacaaatccctgatgaggaacaacaaacaacagcgatacacaaaatcaagaaaattgttggtagcaggtagatatgggacaagaggggaataaaaaaggtgtgacctcttttcgcgctgatgaatctgccagactgactgataaatttgtagccagtttagtaggaataaaccaactgtctttccttcccttcaataatcataaagactggctcagcatgtgatatagttctataatcataactttagcaaagttttttttcttttgatatttggtaataaaaaaaatattacaaatggtctaagtctaacctgttgaagcttgactaatcccaagtctgcaaggtccttgagggtattgttttgaacctctgtcaaggtatttaagttatatgcctgcaatgtgtaagctcaccgaaataattaacaagcatcccgctaaatcaagtaagagtaaaaacaagaacaagaacgcttgaaatgacttttttgtgaagttctgttatacctgaccagtaacatgaaaactaagctccaacaaaaacgaaatcaagtctgctggatctacatctcgctcctgagaaacactggcattgggttatccattcggcgaaatagagatatcaatttcacaaaaccttaggaataatacaaacctcggcattcaatatgtattctcgaataatgtaccaaagctgggcatttgtatccatcagctgaaaattgaggtcaatcaggttacttacatgaatacaggtaattatagaccactgactcacgatttgcataccaaaaactgaaagccactctcagttaatctcgggccatctttgtctctgcaatattacatgaagtgtatcaaatagggaggctatatgccaccactatgcatctatagacgtgtatgaaaacattacctctgactcaataaacctcgctgaaaaattttcatcatggatgaactgatgccagttagtttttcaccttgacccgaatttataagttgtagcaagaaacactgacaaacataagtacacatcatcagatactaaccaagttcatattaaaagatatttgttttacaaattacttccaccttactagtattatcaataagaaattaggaaatacacacacctcccattgcttaagtgcataggtttcgagttcttgtaggcttggaagtttaatggcattgtcggagttcataggctctctaggcaaaactccactgcaaaattcaaatttagctcatcagcatcttctccaaaagcctagagaaaaaacgaaaaaggagagtaccgtcaatgtaaagatgtctttacccggaaataatatgtttctgaagattgttctgaaatgtaggatttaggctgtagctggttccccttttcctgcaaaagtacgaagagcagcttaagaactaaatctgaactatcatcttgccacatacaatcataatcaatccaaacacagtaaattgaagtataagatgaagctcatagggttcaatgctcaagttaacatccaccatcactcttttaaataaatatatcaaataaaccctccaacgtgaatagacagaagtattgaactaactgaaataagtcaaatcatgacagtatcaagaataaagcaagaatgcatacctatcactaatttctgaaaaaatccttaattgaatcagtcgatcaatagcaactctatgtttagaggtgccatctgcgagcacccactcctccatcatcgtagcaggtacaggaacatcaatgtacaacatctgcaatacatacttcttggcaagaggcggcaaagacctgacaccatcttaagaatgtaagatcctcaattttttcaaaattcaacaacatagacacataaattaacctgagaatggcttcgcagataaagacattgttgtagagtttgtcaagcttgatggctggaagtgacgccaccatgtccatgaaatttttagcaatgatcttaacttgcggcatcttcaccaattggattcccttactcactggaccggttctaaaagagcacagtttccacgaaattagggtttatgccacacagcgatcagctcgaagcaaacctagttaactaaagcatctcctcaaaaaaaacaaatccaaaacagttctaaacaagaactccagaaaacaaataaggaaggatttaaagtttcgggttcgagtttgagaacaatacagaattgaatttaaagtttaggttctctcttttctcgatgagctcttctacaattgatcccgattatttactacccagaatcaaagaaaactgacgaaatcgatcgaagaggatggccaagataaattaagttttaatgggccttgtgaatactactaatgggcctatctatataacaaaaatcgcgccaatttgttttcatgaaaatggttgattagggagagatatatgcttgactgaccaaaatgtaaacaaaaaaagcttacgaaacgtttgatcatcatctgataaattgattagtactgatttattccatcaaaatcaaactcatacaaaccattacaatcttcttagtgagacacaatacataaattatatatgaatctactacgattatttatattatcatcattaattatattgtcctagagggcattatttaaatatattagccattgcatacagaaaccataataaatactatatgataaaaacacactgatgaaaagtgaatcaattaagtaagtagaatgttggagtcgtaggtggctccggcagtccaatcagcgggaatagcgtttggcgattggatccaattgattcctgcgcttccgtagactaagaacctcaatgtgagagtgcctctaggtggattctgcaaatcatgaaccgctccaaacactcttctcatacgtctccactctttgcaatcctcctaaaatcatacatatacatgcataccatataataacgtttaactttgtttcacaaaatcatctaagagtaaactatatattttgatcctcaaaaacatatatctaagtttctcaacatctttgattaaatttacctgccagacttcaacggcgaggatgtcattaacaccaccaacgtacaagacaaggatggcaagataatgaggattgtagcttttctcatggatcttatacaccagattataccctgcgtatcggcaagggatcctttggtactcaacgttgactacaccgaaggagtagagctgattttctgtgccgggtcgcgccatacgtccgtacgccttagggcttaagatgaagtccgtgccatctccttctccggagtccgtagccactacgtatactccttcctcactgcagtgtggtggtatcttgcacctcacctttttataattcataaaataagtttttttttctttcataatataagtttagtaattaatgacatagcatatactataataatatttgatgaaatattgattgagataagtagataactatatataataacctggtaacaagcaccacagccagttccattgttccatagtcgccatgaaacaccactcacttcaccgttattgatatctcttccaaattctccatacccacaatgtccccctgcatcatcaaaaaattaattaattattcttattctttcgacaaatattatgtatattctcataatggaaagttatcattactaattacgcagttaatggacacttagtggactcgttttcaatcatatatgtatttagaatttgaataaaccttcaaaataaaacaaaacaagaaacctatacgtagatataaaacaaaaataattagttatggcttatagtgagatattacaccaatgtatcttttaccaatatataacgtgtacaagtctatacaacaactaagaaaatgaaaaagaattaaggtacacgatgtatatagcaataacaattttaatacgtacgaggatttgctttgcaatcggggctgccataataagtagctctagagttaacaaaatcgtcggatagacaaaggagaggcaaaaggacaatgacttgaacaaatagaagaagcaaaacgtgagaatgcttcatattgttgttatcttatctataaatattgtaagattattaatacttctaactctttttcttaacaaatgataggaattgataatagaatttcttatcacaaaagatagtgaagatagatgagagacttagtagggtatttatagctgcagctagagtgcttattacaattatacaattgatcgagcatcgtcactattttttactttccacttggcaaaaagcttaaagctaactcaatttttttatatagtttaacttggtattaaattaaatgtttacatcatacatctgccaatatagcattagggttggcataaacccagtagattcaaaagtcgattcttattatacgcaatttattctttgatttttgtagtctagattagttaaggagagtattagatatcgaattatcaatatagtagtattttagaagattaagtatgtgaacattgtaaagctcagaagattgaggtaacatagttccaatagatgcataatctccatttccgtataacacataccgaaattcaaactagtttcaagtgaaaagataaaagatgcatttaacactgaaaatcaattcctaatactctagtttcttataggagtatacactctttctttctgttatcagctctctatgtggcattcaattgtaaaacatgttttggatgaatacaattttacattcctacaaaaaaagattatagcgctatggctttatttttggttgatgctatatcgctactaaccctttgtagacatcctgtattgattatatattttgaaactactgtagatatttgtataaaatatccaaaatatgtaatgcaatagacaatggtggggtttatagcttttgggactattatttatttgaaaaaggataggttgtgcctccaaaacgagaagttcatgacacctaatagtaaatagattggtttacgatagttgtttggtgaattggatgaatgaactcatagaatatgccaagcgtgctattttttggaatcactaagcctttattgtttttcactactagcattttagtaatattaagattgtgtaaaatagcataacgacatgggtttgcaagttgtaaccaatatatggacagaaaacatggttttggtctttttcttttttgagtaaatatcatataaaatgaaaatagtttggattaacattttgttttcctagatttttggttccttggaaaaaaacaaaataaaaaaacaagttttggtcattttttcgagagagattcttcaatagcatgttgttcaagtttggatccggtatctacatttaaggatctttgtgtttgataagccagttgtattaccaatgaattctgtttccaacgtgaaacaaaaacgtgtttctctataaaaagcgtgaaagaaaaaacatcttaaaaaatacacattagttgctatatattagtactaacctatgcatagatataatatggcaaactagaatagaactttactttctataattcataaattgagttaagtattccatgcaatataaattatttcgatgttcaaactaagataaacactaaaacacaccacgtaagcaaccgttgatcttgaatgtgtatatcttaattttagtgatgtcaataagagtaacacaatgggtggtaggatattatcagcagcctaccttttgtatttgaataaaataaatttcttattaatatgtaactgagagtctgagattaggagaagagaaagacaaaaggataccataagtctagtatatatgaatagaaatagagaattcattagacctttttgttgttggtttggttgtaatccacttgatgaaatttctagttccctacctccctagaaaaaagatatattccatttgtgagagtatataatattcttttgaatgggattcaattgaaattgatgtttgtatacaactcattatcgctaccacaaatacattttcaacaaagtttcttttaccaaaattcaaattaatatcatgagatatatcaatttgaaagataaaaagtaatcttttcaattattcgactctctcaatttaaactttttaagcacttaccatgaatcagtatttgattcaatattttgggtgtcgggttacagaaattgtatacccttggtttagatcagcctaagtttgaaatgcagagaacatattttcttgtcaacgtttcgctatgatataaatgcacaccctaactctaaatcatggttggctagttcttactccagtggaagaactcgtattcgccggcacgtaaggaaccgatgacgtcactataacagttgacatgtagagtccaacaaaacattgcgtgtttaatgacaagtgtggacttttcataggaaaaaggaatatcacaggataatggggttggtgcaatttatcgttatgtcatcgctcattgattctccatctaattccataaacggtaccacgttcttgcttcatgtgaacacaaacatattggtttgtaacacacacacacagcagcatatgaaattgattcatcttagaaacatatattgaagatacaccaatcctgtttctaggcattcacaagcctacacatatgggtttgtttctgttcaaataaccctacaattgcagcattactagtaaccttttttaacatgttttccagactttacctcagttctgtgccggtgaatggttcactgattccccatttgatcagcggtaagatctccaaccttagaaacacagtaaaatgataatgtcataacagagtaaattttaaacaggaagctaatagaaatataagtcataacataatgataatgtcgtagcaaagtaaaactctaaaaaggagaagccaatagaataagaagtagtatatcattgctattaatcaccaagacctatcaatggtaggagttaataggcaaacaatcaaagaatacaaaggtttgagatttaatcatttgtttaagacaacgaatgatatgagttctagtgtctgaaggagcataatccctttataggtgtctgccatcaatagtgaagtttcttgtaatgggcaatgaaaatgatatcactaaaaaatgggtcctaagagagcaacagaggaaaatgggaagtaactatttgaactaaaggggatgcaaaaccagaagataccagtccactataagcacttacattacaaaatatatgtccccatgtattcgtcgggtttctattaggctattgcttgaatgctaaagtaattatcataaaccatttgtgaggtgtaaaaagtgttagaacttttacaggtgttcctctttgttagtaaatgcaggacactgggataattggtccaaatttgacagaacgaaagtggtacatgattccagaatatgcccccagggaagtgtaaaatttatactttgtgtaataatagaaggttaaaattcaaaaagcaaattcatcatcattataatccatatgtagaatgacagtgagcaaattttagcttttacctgttaatcatgggatttcggaagacagttctgacattcaaatgagttgtgcctttttaaggtcagacacaactcctctgtcttggctgcccctttcattgtaaaccacctgcacacagattacagaaagagaatgattcaatcatgcagaagataataactctatgttgacaggaaaacaaaatcgctcatacgttttacggatttttctgacattttatcgtaccttatcaatgatcccatattcaacagcctcagtgggactaaaatatttcgggcgtttcatgtcagcttcaatctgctccggggatttaccaatatgctttgaatacagcttgaccttgagcataacattacatagaatagagacacatctttcagataagtttgaaggtaaaagtgaaaagttgcggacagagaatgatagcatgatttgagatttgctagcatgtgcatactattaatggctaactgatgaatattaagatgtctgcaagtatatacacccattgcctgcaagttccatttatttatatctcccccttaaaagacccaaataacacacacaactggacactgttgcataatgaagatcaaactaagatattctacgtacatcacaagggtttgattctctactatgtgaattcatatcaagtttatcttctcaccatttctgtctttatgtgcttgatttctttccttgcaatttcaacatcagttgcttggccttgaaatcgagcaatgggctacaaagttaacatgcaagagaaaatatattgataagtaaaaaggtgcatgcacagaattaagaatcataaaccttagattcttccaacttgaaaaagaaaaccaaaatcttctagcagggggaaaagacgccacctaatatttaaaagaaacgatcagaaagaacctgctttatcataatagttgatgagggcaacgcagatcgatttccttttgcaccagcagtcagaagcaaagcagcttcaccccaagcattcccgacgcaaagagtaaagattggtggtttgacatacctgaaattcaaagataaggtaagagttgattgttgcattgataattggtcgttctccccaaaatatgctggatatgaaaactgtctccaagtgcaattttgaatatttgggaaagcagtttaagtatccaagtcttgttatcgatgctattacgggaagaagtaagttgaggaaagagatgaagatcaattaccccatgacatcatagattgcaaaagcctcagtatcatagcccaacttttcaccattctgaaaagggagaagataaattctcttaaaaacagtttgaacgataggtaatgatttctaagcttttagtcattcatttgaaacaaaccacagtttcaattttactattcagtatgcgttcttaatatgatggactacataatggaagcccaccttggttgtcccagtcgagtttatgtaaaggtaaataggcttttcctcgtcttcatactgaaggtaaagaaactccgcaagtatcaactcagtaactgaaggtacgagagacattcccaaatatacaattcggttcttgaacaaatatgatgccaaatcaggaggaggttgttcgtgtgcacttccctttgagaaaggtataacctgttgataagacggaagcacgaagataagaatcatataataacaacaataaacaaaagactatatgtgaagaatatagcagcctccaaattctctatcataatcataatcagagcaattgatgcatattataagtggcacacacaatcaagtgaaacctctgccacataataactcaacttcttccttaccagccaaacacacagcataatttcttccgaaactgcattatttaatcttcatactcaactctctaactaaacatgtaccatttccgatcaattaaacaacagaaatgaatgagccgtctttgctatctaattgcatatatcaatagtaactctaatccattaattcgccgtttaaagctaagtagcaaccgttggtaagattcgacccataaattttccctcaattcaccaccacagaagcataaatctcagctatagaatgaatgagcattactcccccttgcaatctaatagcctatatctagagtcaatctaatccattggttcaaaactaaggaacaccatttctcgacaaatacaatttctgaaaattcactaccacagaagcataaatctcagctatagcaacgaaaacctcaatttcaaaatcctaacagaatagggagctcgttaattaagaaactgaaaaaaagtataaattcgagtaccatagtgacaactccgcgtttaggcttggaactggaaaaatttaacggattaagcgattccgcacgaagcttagcgccgcataagtcactagagatgcttcctccggtatacggcgaaagaaagccattcgaaagagaagctctgagagatgaagatgaagaaaatctcggtttagatctcagattacgtgtagaagacgggataatcgctgacgtacgagctcgaagcgttgtgaagctcgtcgcagtcgctgctgctacctccatttcttctttgttgcagagagagagaaagagtgaaagtccctgtgaccccgaaacgataacgatctgtctcaaatcgggcttcataacattatttatgggctcaacaaataggcccaatagttgtagttttttttctctgaaaatattccggtttcgactataatagtaaccaaatcaaaccgaagtaaaaccgggaatttctcatttttcgaaaacgtataatttaatatgaggctaccaaataaataatctactggccactgcagagaatcatctgtcgtgttctgtttgttctcacttctcacttctcagatttttataaacatgaatgaaacctgaattgttccactaactctcagcaaaaatgcgatcactttacttaatcgtcttcatcgttattagtaagtacgaatcttttagattcttctcaagttcttttgagtatactgtgaaactaatcagaactttcttatttgttatcaaaggtcttgttaaagcttcgaaaagcgatgatgggttttgttcagcgccttcgattgttgaatcggatgagaagacgaaccccatttattggaaagccacgaatccaacactctctccttcacacctccaaggcaagtgttttcttacagcttcgtgttattaaaagtttgatacttttgctggttaagtttgattgctgtttttatcaattgttcgaggtcttgttgtatatgattgattttgagattaagttattgaaaagttaagattactttaattagtgtttaatctgagagggtttctggctcatgtcttgcaaaaatctcttaacttttgatcaattagatttagacataaccatggaagcattcaacttcagttctgtatatacagtctctttctgagagttcgctctctctgtgtataattagattagttttctaatcaaatttggaattgggggttttgtatttgcatcttcatcaagtgtttaagcagaaatatttatgagtctgttgttttgtagacttgcctggtttcacacgaagtgtatacaaacgagatcatgcgttaataacaccggaaagtcatgtatacagccctttacctgactggtacatgactctcttataatttcccttacttttcttgattttatagctaaaagaagtctaaacttggcaagctcttgcacttatctgttgctcaaatttacaggacaaacacattaggggcgtatttgatcacaccggcaacgggttcccattttgtcatgtacttggcgaaaatgaaaggtatgaaaccaatctcttctcacaagtaatgaacgtcaagttcttgggattattttcttctatctttcgataatagagtcaatcttttaggaactacctttatgtcctaaagtgtgctgtcctaaagtgtgctgctacaccaatctcatcattattagaacattcacttgttcttgctttgcgcagaacaagtcgagtgattaagggtttaaagatttgctgttttatatgatctactcgtagaatttggagatcatctagctgattctactgtctcttgcagaaatgtcaagttcaggtttgcctccacaagacatagagcggtattattacttatatgagctctatctttaacatatgcttgcacttatgatctataatctgctttttaactcctttcaatattctgaatctttttcaagtcttatattcgtggtcgagggtgctgtgacactcactaacacatccagttcttcaaaaaaattgacggtatgatttgtacaaaggaaaatttaccacagtattcttctggttacatcacgttctgcccagatttgatggtgaaatggttgcaagatttctccattagttttatcattttctgctgataatccatttttcctgtaggttgattcatatgcgtacctacctccaaactttcaccattccttggactgtgttgagtctgcaacacttgttgtcttcgagcggaggtttttctcctttcccttaatatgacaagaaaattttgagttctctctactgttttaacttaaaaagtcacccaatactgctacatctctaggtatgaatatctaggaagtcacaccacagagcttattgttggctccacagacaagcaaccactactcgagactcctggtgaggtaagtgtgcaaaagttctccacttttctcagaatacatctgaaagtatttcagtttacatttgtaatgcaagttctagttcctaaaattagtcatctctgaagatatattttgttattattacaggtttttgaactgcggaaacttcttccgatgtccgttgcttatgacttcaacatccatgtaagcacttcacttgattgaattaatcctttcgctttttgagacctctaaagcttaattactgatgtgtctgtcatctgcagactatggattttcagcctggagagtttctgaatgttaaggtacataacagtttgacttgacaccataagcagattttttaactgttccttttccatttcgtcttctcaatgattttgcaatgtgagcaggaagttcattataaccagcatggtttgttgcttctggaggggcaaggcatttatcgcttgggtgataactggtacgcaacactgtattattaataaacgaaattgtgaatataattgataactttccagcaacacaccacatgcacaaccaagaacaatagttttctacatcggtcatgtaaagtgaacagaagcatgttccaaaagaaaactgcaaacacagctatattccacagaatagaagaaatgattataacttttatgtgatcttcttgtctttaaattaggtatccagttcaggctggtgatgtcatatggatggctccttttgtccctcaatggtaagagactgttgtcacacaacatgaaaaattctactctcttccatgaaagttttgcaagaatacaactttctattggaactgtgcattgattttacctgaagatttattcgaccacacaatctcagatactgtcgttgtttcaggtatgctgcactcggaaagactaggtctcggtatttgttgtacaaagatgtgaatcgaaatccattgtgatcaaagattgatatgactttgcagtaaaagtcagaatcttgttgttcagcttcttgtcttataaacgccatgtccactctaagcactagctacgtgagacttagttgtatgaatcttataacaattgtgaaaagaaacacattgataaatgatgaaatgactctctctctctccagcatagacacttcaaaaaaaattattcttaattcggagatgcacaatgttgtgccttgtccaaatatttggctaatctattatacattcaatcccctatcctaaatggcaaccatgccgttttcaaataatacgaaagatgcccaagaacaccaatgctatgagaggtaacgctcgtgttgatttacaagatgattacaagagtaaacactttggtatagaaagtcagaaattaatcctcatggagctttgaaaatgttcatagagaaatggttatgtgtggagttcccactaattgatggtgatttgaatctcattggcttagatctccttgttaattgaatttatcttattcacttcaaaatatgttattttggtattatgcttgttaaaacttatgattgttatctctttaccattatttgaacaatgttgtaaacaatttaatcaattgtcatgtgtaatgaaaatctcatagcatgttaatacaataactgttgacctaatttttcgtttgtcaaccctgaatcacacaatttattaggattttctcttcatttgtatattaatgtaatttgcggcgatttttttgttgattttacttctcacttgtgcattgtgtctttgtaggaatgaacaaagagttcgagaactctatcttcttcccctcgactttggtatctgttttgtttttcgcaggttaagtttcaactcttacaagttcactattaaggtgtcatccatagactatgaaagttgtttatatgaaactaagttctctagacatttgtaccaacctgctaatttcttctgaccatgggaaagtatcgaattttccaagttgaaaggggggaaaaatgagttacttctctgttctaacatcaaaaaagtcactgcaaacacgatttggctatcctacgttcaaacaaaaatttcatcttatcaaatttatcaaaatgccaataattgaaaaacttaacctgcattactcgcatcaaatttcactgccgttttgtttcctagtaactcgaagaagacacttcgtactacactcgaaagctatttgatcattataccatatgaaaatccatattatgaaccgtttcattcctctttaataagcgactttgctactacgaaaccggcctccttgcatttgtgctctttttctcgctcaacgcttcagcaaacgcgcctatgatctgctgctgtgactcaagcatcatctggcaatgcttcagctccatctccattctcgacttctccatctctctcatcatctccatcttcgaattctccaccctcacaaacatttctgtcaacatcttaacagaagaaacaacttcatcgatcgggtcagactcaacttctgctgctgcattcatttgctcatgcttgaacctagaagacgatccatagccattggaagcaccagtgtttcgaggatagctcccatccttcctgctgtagccattcacccgcgaagagctcctagaactttgaatcctcgggttgaatccttccctctctgctctatcatcatcaaactcatcatcataatccagatcctgagagaaattgggttcaggcttactgaaattcttaggtttaaacccatgagaagcaaaattccgatcaccaaacgacttcaacggaaacccaccaccactgccatggctaaaatcaccagaggaaggcttgccatgagtcctaagcctagttgccttggggactaacacaatctcatcatcagaatcagcatcgaaatcagcactaacctttggattcccattgtatttccttttcaatccaaatccacttcctgaatcgtgatctgaatcaaactcagacttgaaaccaccatacattttcatgttactccttgccctagatctaaccccatatccatctcctacttctcgaggtgaatcagagtaaccaccgctaaacttcccagacctcttcgatctaaccctaaatccatccaaaccgttactctcatcatcatgatccacatcgggatcgtaagtttctacggctgccggagtcaccggagcgaatcccatagcatccaagatagggaacaaatcccaagaggaagagaacttgcctggtcgattaagagctcgttgtttttcgccgcgataacgtttccgaagcttctcgatcttgtgtcgacattggattgctgatttcggcggacctccaacggtggacgaggacgaaacagccgcggcgacgtcatcccaatcagccgcacggaggttcccgcggcgaagggcgaaccatttatccttgtaggcattgacaagcgcagcggtttcctcgtcggtccagcacggaggaggaactcttcgagtggtggtggtggcgacggttacggcgtggaagaatcgatggccatggcgacgggagatccatcatcgggtattgtcattgcggcggcgaagaataaattagtgaaagtagaaagagcggtgggtaagggataataaagaggcggaggagaggagaggcgcacgttagaaagaaaagttaggttaatgatggattgggccgagaaggaggtggccggttgagaattgtgctaaagtgcaccgcggagtggtgggtgacgtgtgcgcacccgacgcaaccttctccaccgccgctgaatacgcgcggtcgttttagtgatctctctctcaaccagatagtcaatttaccggttaagagtaacccaatggattcggtccaattttgagtcactgtactcagtttcggttttaggttttgttcgattttaaaccaaaaattttgggatgtggtaaccaataatttttcattgaaatggccagaagaccaagaaaatttcagttttctatctatgaacaaagagaaattgtaaaattccaaaaaagaaacaataactattctgaactcatttctatgttcttcatgaaccggtttcttcttgttcttggcccgtcttcattctccgtacggttaaggaaaccggtttctccagcacagagacattgacgctgttccagacatcggctcttgttggtaaaccggcaattgtctccacgacatccatgtcttctggtagaactaagccgaataccgtgtaagattgtttccattcgtggtggtttgctaaactgatgaagaattctggacccgagccgacccacgccaccgagccacggcttatagttgggcagtgctcggttgggatcggtgtgaaaatgtttccctcggcctggagtattccttgaatcatagcgtatggtggaccaaagggagcctgcagggacacggataaaatgtgagacctgcattaaggtatgaacaagctaaaacggaaattgacccgatataaaccacgaaaagcttactccatacagtactaaagcattcatcatacgactcatttgatcttcgatattaaagatgtgttactaaaacttaaggtgtgcaaccagatgaatcaaaaggcaaaaggttccatcaaattgacagaaatcagtgcataacacatgtcacaatgtctactatgctatcagaccagttaagggtcatgcctaaagtacaatcaggtgtgcctcatattatatgcgagatatgaacaaacattcaaggaaatttaattcatagaaagggtgcaagcataatcgatacaggattgtacaacaatgtgggtttagccagaggcagtcagttgccattgatcacacccgtgtgtttcacatcagtgacgatattcttttggaaaaatgtaaaatcaaacggctaaaagtctatcacacctttgaacttcaatatcaaagacagaaaaataaaaatgtataatggatgaatcaaatggctaagagtctatcaaattgacagagatccgaagacatggatcaatatttgtcctatgagatcagatcatagctgctatgatctatactggaaatgattatgcaaaatctacgaattaaaaagcaaaatttgtgtaaggtctcttacattctttacatgattgccttctgagtcccaatatgatccccggttctctgctcgatgaaactggcagcctgcacaatggcgtagagttaacaaactcagaatgtagtatactgagtgaggagcgcattcagggtgaagctgcaataaaggaaagcatcggtgtcaattctggaaattttaaacaaaactgaaactttctctcgaagtacacaagatgcattatagtaaagacacttactttgacatgaattacgccgtgttccgtctcaaaaccaacaatgccctaacagtagccaaatagctaatcagtaaatatgactatcatcgagaacactattagttttcaagagaagaaggaaaccagagcatcatcacaacaaaatcagagagacataagatttggttacactccaccaaaataacatcaccccaacgcagtaaattcgcagatttaaaagtaggaaactgagaacaaactgaaagtatgatcttgtgaaatctgataaaactgagcagctactatcatctgatcagacagacaaatcaataccaaaggctgagtaattttcatggaatagtaaatgtttggaggaaaatgagaacacaattaaattataattaataatatctcattgaaacctactatttccagcggttggaaaaaatgcattaactttgaactttggtcgatcaatggagttaattttcaagacgtattaaatagatcactacctggccttgtccgaagataagtccagatgtccacattactttctcgccacctccttgtcgatcaggcaccaagacatctttttgcttcttcaaccaacactgcgcagagaaaaaaactacctcagtctctggaacttgcactgtggcaagtgtcatcaaagtcagcatttctcaattactaatcacacacagagtaaaaaaaaatcacgaggtttctttaaatttagtaactttcgactaaatctctagatatttgacgatacaaggctcaattaagcattttgtcgaacagttggcggactatattggtaaatcatgcacaatgcgattcgcatgacaaggatcagacttttacctctccaaacttcgagccacaatcctctttgttcccacaaaacacccatgaatcgcacaagcaaggtccatcgttgccactacacataactttacaagctttacaacatccatcagacgaattaaacttaaaatccgtgccccacttcaccgccggaccccaaagctccagattatcaattccacggcaacacccaccttcaccgtcttcagttgcatcgtgatctcgcggctcctctttgaatcgaaccgcggaatcaacgagtgtaggatcttgggatggacggaggacagaagagaaaacagcgtagacgataacacaagagattaaaccgattaaaagaagaacggtggcggtaaaacggccaggctcgcgtcgtttaatcgacgggcatcgccggagagtccgaggattcgttgacgaagaagaagatgcgaaagcaaaaggaagagagaagtaatatgtcatgtgaaattgaaaaatttggaatctttttgaataataatgaagagagagaaagagaagagagagtgttgttggtgagtcaattcgtggctgcgcttccgctctggaacctttgaactttcatggcagatgattgtgatctcttcttttgtctgttgtactttctttggaattctttttccttctaagttataacattcaagtaattgaaacgctgtcgttttagcaaacctaaaccttttaaatggtatgcttacgaaatatgaaatatgaaatatgaaatatgaatcacatatgattatattttttttgcaatgaatcatctttagattcaatatgcatttgaaagaaagtttagattcaattatcatatgtaactacgatggtattcgagttttttagagttgaggcaatcatgcaaatgtccgagtttcgcggttcggaattggtgttttttcctcggacttaggatggatgctaatctcttatgcttagattgtcgtagtttttttttttttgttatagattcggtcattttggcttttttgtttcttctgtattcgttgttgcaattagaaaattttcgaaaattttggcaggtcatgctcaatctaaaaccacgttggaaattgagttccatagtgatggcaatgcaatgtttggttgtgaagctactaaatggttttatttgaaggagattgcaatttacgtgtgggctttatgatcaataagagggcaatggactttggttttcactgctggataattagtgaagactttgaagttggatgatgaaaaatgtgatttgcgaatgtcaaattcacgtggatctctcgagattcaaaccaagcggcaaacatgcatgaaagaaaattctgaatttctgaacatgcgaacgtctcaacgcatttcgattgtggtttgttttagtttatttatttttaattcaacttttttttctttgttgtaaaaacatgcacatcaatttcatcaaccaactacaattttattaaaattccttttttatttttttcaatcactcagtgttaaaacacttcatcgaatctaatttctttttattttgggaaactacattgaatgatgatctttataattagccacaaatcattgtcaccgatcaccatgacaccatatatagctttaattttgtttgttctgtaccgcttgtttctgttttgtatactaaattactaaccacaatatatttccaaatccactattttatttgtttctgaaagcaaacacttagtaatatgattggctaaaacgctcctataattgtcaagaaaaggggaatgtattgcgacactaaattaatttatccacaagaactatgaccacacaactcgaatacaaaatcaacttgttcatttatgtttatcttgtgtgtaattttcaatctttatccttatatatatatatatatatgggaaaaggaactattgaatttgaagcaaactgttgagcaacacatttaattaagtaagttttacagagttattttgatcatcttaagaatgatagatataattagttaaccgaatttaatcactttaatttaatcattattacgttgtatactttgtatttggctatttgctttgttcgttccaaaactttagtatattcaccacacttcttcaccttatctcgttagttttgctttattacctttcctctttctattttttttttattgttagggtcaaagctttgttaccctttttatcattcgatatttgtatatggcctttgtttgatatagataacaattatctacattggaaagatgcgtttgcgagcccataaaaattggatagagacttgcacttttggatgatatctaaattatagaaattagaaagtcaagttgccaaaaacttatccctcaaattccattggatcggtatcgaacggtgtcgtttatatcatctcgaggcaatgctgatattagccgctttctcgctgacacgtgtccagagattagcagctcaaagaatctagtgactcatctttcctcttatcatctcgttattacattactaccctttgcttgctaatgtttctttacgtgcactggaagaaaaatagaattatcaaaccaaacgactaatgactaatctatgatgcatctaaataattacaggacacaaagttgaatattctgatttaacttaaggaggtttattattattttaattaaaaattgatcagatgactctgtctcgtctttcaaaactattacttgttgataatgatttttctctatgactaattcaaacattttctatattaaattcatactttttaagttaattactcattagggcctattattagttatatataatgaatgttttaaatatagggagttgaaattccatcttaatcatagttggatttctttagttaggtgagtttatgagtgagttttttttttttttttttttttttttttgtctttcagtttggttgttaaattgttaattatgattaaaacgattattatctaaaaatattatttattatactatattggatgtatgacctcacttcttaaattaatccaattgctacacggcaagaatcaaacaaaaataatatgtgaaaaacttattgttgtgagatcatacttaactatatagaaaagaaaatgttagaatcaaataatttaagaggataaaaagagtagttgaaataattgattgtcgatatgcgaccagtacctaaaaatattagaattatgcatgctaaatattgtctgacttgaaggttattagtagtaatagattttatgtgatatgtttgcttaaaacaatatcattaataagaattaaaatcatgacaagggtaacgtttgccacgctagtggcagacacgtagaattaaaccgtacaagcataaatccttgtattagtctcaaaaccatccgggtaaacataataaaagttcattttcttgccatttctacaagcaattgacaccattattacctagaatagtactatttaatatgagagtttaaaagacccggaattttaaattttgatgtacggcattaatgcattgaatcgtaaagtatattactcttgattattaaactaaaagtgagtcatttggtatcttaatgacgagagagatttaactaatctcacattaaactaagcttaaggatcaagtgggggcaagcgaatggcataacagtaaataaaacgaaacacgagggctttatttgacaatgcctctaccttagcttcaaaactgagctcgttcttcatcatttcctgaaaactagaaaacacagtttaaaggaacataaaaagcaactcttttgagagatcacagaaaccctaatttgctaagaaccctaatctcaatttccatcttccaaagttcagattctgtatgtaaatgcatctgaagaattctactgtagcagaacggcggtacatcggaaaagaaaccgccggttatttaacttcttcctccgatttggatccgaaacctaagattaaacatcatcgtcctcttcaggtacctgagattttgactccagacattggtgctggtgctggattcagtgtgtataataatcaagttcaagctcagagtcgtcatcatctgacggttgaaatcccagattcatcgtctcacaatcttacatctaagagacctgtggtggttcaatcttctaatccgttcaacgttgacgatttccgaagacaacaacgcgcaagcttgggtccgatttcatcttattgtccgtcgtatcttttatcgtggttttcttcttctcttccatcgatccatcggccactaatcagaagcttctccgtcatgttcttagagtccgtttgatatgtttccatcttcgtttcttacttcttctctctgttcctcctctctacatcttcttcttgttgattagtttcagattcttccttctctttgtcttctcgattatcgctttttctttcgtcctttcgatctctctcaaattcgctcttcctcacttaccatcgattcgtttgattatcgctcggttactttctctcaagcttacccctaccagatcatcctcttcatctcaggagaacactaaacatgttatttggtcaattgggtctaagcctgtgactgagaagaagaccagctctggctcatgggttcagaagtacagctctggtgatgtatacgagggagagtttcatagggggaagtgttcaggaagtggagtttattactattctatgaagggtaaatacgaaggggattggattgatgggaagtatgatggatatggagttgaaacttgggctaaagggagtaggtaccgaggtcaatacaggcaagggatgagacatggaactggtatctacagattttatacaggggatgtatatgctggtgagtggtctaatggacagagccatggctgtggtgtgtatacctctgaggatggtagtcgttttgttggagagtttaaatggggtgtcaaacatggccttggtcattatcatttcaggtgagagttcatcagttttaacttttgcagaaatggtttagcttttcagtgtatgggtgatcttttagtcccatgctattgacgttaagtgtgaccggtttgaaaaattgaagtaaatgtggtttctggctttcagtctcgactttcttgttaagttatgatgctgtgtttaggtccatgtctatgttactcgtgggatgttcttaaagtttatggctttcagtcttgagttcttgatagattgttatactgcttaataccctctactggtagcgtccgtcaccctttgaagaggatatcaaatttttaagcctaattgttactggcattgataattgcatgagactaccctttgaaagattctggatttcagttcaaattgcatatgaaccaatagttttttgttggctgtcttccttacgtttcagacaattataagtctagggggaatcaaggttcaggcttatttgttggacttgagcatggatctaaaaaaaattgcatcaatcactgtcttctcttcttaagtgatatctatctgacttgaagccacatctctcttgtagaaatggtgatacatatgctggggagtattttgcagacaggatgcatggttttggagtgtatcaatttggaaacgggcatcggtatgaaggagcctggcatgaggggagaaggcaaggacttggtatgtacacgttcaggaatggtgagacacaggcaggccattgggaagacggagttcttaactgtcctaccgagcagaccactcgccctgattcatcgttttccatcagtcattccaaggttgtcgacactgtccaggtaccttataatttatcttactgctgctcatatatattaagttagagtttagatctttaagaaattatcttactgctgccaatgattgagtacccacatgagatttgatcctgctccctctctctctttgatcaacagcaagcaaggaaagcagccaagaaagcacgcgaagttgtgaaagttgaagagagagtgaacagagcagtgatggtcgcaaaccgagcagcaaatgctgctagagttgctgctacaaaggctgtccaaacccaaacatttcattgtagtagtggtgacgatcccttgtgagttcctgcggcaaagattttgacataatcgcagtcatgaccttacctcgaacttctacgaagacagaagagtgaaagagagatgtttagagacagcgtcagaattcgcaatctccgttgagattttcttgaaggtgaaccacttggaaccaatgtcgagatctcataagtaataagtaagagatctggctatggagcaagtattacaggtttactttttcttttctcccacttgttttatgagcaggctggtttaaaactgtacatatgttgttgaagagtaagcaatgtgtgttaacaaaagatctttgtaacaagcgtaacccatgtaagagaagtaacaaaacattgttttacttttacaacgtgttgaaaataacaccttttttttactagatttctatggatagaaattagaaaatgacatgagaattccagattcaaatcaacttgacaaaaccaacaagggaaagagtaaagatatctggtctgtgacaaggtccaagtagagacgaattacagatcatctaggtaactgtgcttatggttcttcaaaccctttcagcaaatcctagcagccagcctttgtgtttgattaaagtgggctgggctaaaatattggccgaggccatcaagtgattctctcccgctcaagtcttttaatccttgaggagaaaatggactggaaaattcacggaactttaacagaaagatgcaaaaatcgttctcgttgatccaaacagtggcaatctccggcgtattctccgccgtctcatgctggtgagtgattgttcccgtctttcaagctcttcttcttcaattctcgtcttcttctctttccatgtctcatctttagggtttaagctgccttactcaatttccaggtatggattcatgttcggtagagaatcagcgagaaaagagctcggaggtttgatcgaagagctccgtcgtggaggctccaattctgattccactccccattcctgagttaggcattccaatttcccaggacggaggaggttcttcgttatccgttgctaagttagtttccgatttcgattaatgttcatgaaaattgatcaattgttgtataaaccgatgtgtttgacaaatcctttgagttaattcaagtatgaaagattatcgtttgaacgagagatgcatattgattgatgataagagaaactcacattgattgagataatataaaactgtaggagaaaaatgcatagtatttgagattaagagtatgaagatgatgtacaaggaaaactcataggaaacatctaagtgtacatcatcttgattttgcttctctttgctctgactctgacccagaattgtgcaaatctatagctttaacactcttactggtttgatctctctagttatttatcagacaggaatacaataaacaccacactatatgtatgtacctatgtgggaaattacactaaagcagcctcctccacattctcagcgatcttgcctttgacaaatccaacataaaggtcacttccagttgtgtcttcttttgagagtctcctcccatgaccaccttccttcatgttcttaacaaactccactaactgctgccaattttgaccctcaaataaccgcttgttcattcttaggtaagtaaatgcggttaacccatttccagaatctgacctatttgttgctaccacttgtccgaatgcgcttgagtcatatcgttctagcgcgttctcccctgctagttcggttccggcctgccttgtcgcgttctgtacttgcttgaccagaccttctggtgagcaattcgcgtgctcaggttgctccccgtctttcatctccatgcaggtgaagttgagcacaactccatgtttgttgaacatcttagctattggcagatacccgtcatggtttcttgtgttgtagtatccagcggttagctcagctgcgtgtgacctggtgttgtagtgccagtgaattccagctacctttcctgatagctttgctccgcttccttgaaagatacctttcgctgaagataggagttggtctccatgttctagcagcttcccggagtaccattccatgaaaaactttccatactcgctattccatgttccgtctctcctgaaaaattcagtatcttctgggaggttcttgtactcgccggcatcatgaggtccacttgttccccagttagttttcccgattgactcagcatatgcttgaagtgacgatttcatatactgcaatcaacaagtatcatttcttagaagaagcaaatggagtataagtaagcataagtatacatgatcttctctggtatatgtctaatctcttgactagtgttcttatgaatttcaaggctttttctgctagtttaaaataccttgtcgtagcactggaactctccaattccggggaatctccaggtcccgttgctctcagggtatgatgggtatctcaattctccacaaggtcccattcctacttgaatttcctgcaatacataaaatgatgatccaattagcttaggtccctgtattgctcatgtctgaagttaattcgtttcctttgtagtctaaatttctgcttaccgcaataactcctcctatgtagccttcaaatcgttcacggaagctcctcatgaaatctgagtagacctggataggtgttcttcctcttaggacaggcacagaatcacatcccaaggagatatattcagggttccttctcccagatttgtctgtgtagacaagatcagggttcttgctgatctcttcaagcacccatggaggcaaggggatactagattggaagagagagaaccatatagagcattaataagctagaaatgagagacagagattttactcaaagggaagaaactaaagttgcttcattacctgcaagagtctcctacgtttcctccacattgatggaatgacataacgacctggagtttgagaccgtgcttttgaaccatctgtataagctcggcatagccttcccagttataattcataggtccatctttctccaccaatccccaccaagcatccaccatcacaccttccacaccagctcctttcagggccatcaaactagcgttcatggctcgtggtttgttcaaatgccctgacattgttactgtgtcgagcggtaacatgacgaacaccggaacgctagcgtcgttcttggagtgtgggtatgagagaacgtggagcttctcccatttctcaagggtttcaccttctggcgtgaaggtcttctcgtgagtgaacttcatttccttaaccgagttctttgcttggaattgatatgttggcggcttcatcttcgcaaaggtcatgttgttggaggaactttcttggtttctagaactcttggcatctttacgtttgataagagaactcgaggaattcagtgtcaattccatagtttttttctctctctttgttatgatgagaaatgaggtagagaatagagctgttggtgtttgatagaagatatgtttgtgtttgagagaaagatgctgtttgtgtgtttgtatttataaagaatattgattggctgtggtttggagacccaatttcaaaaagtggagagaaaatatcacaaaggttgcttattttaaccttttcacttgtcacacggttcttacacctcaaaatgaaaaattgtaaatgtcacatcagttacaaaggaagatgttttagttaataaattctcatttacatgtgtattcagctatagataattgagttttgttttcctgttggtgaattatttacttactcactcctgcagtttttagttacagagaactcttaaatctagtcttgcttttcccttgttaatggagataagctgataattttggcttctcacctttggctttgaacacatggttcgtgtggctgaaaattattaagttctcttgattttagtttgaataagaagataagtgcaacgatttaattatttctgtatgaaatttcttgtggtggctattaactttgcttattttctttttcttggactttccttcctgtaagatttgtgttttccaactaagcagctgacagatccattgacccaaaaaattctaacaatgctaatattttctttgaaaatttcttctcatggccctcttgttcactgtggcacattctttgtgacttttttttatatcatactcattgatctgtttattctgtttttttcttgcctggttattacattctgccatatatgtagagttacaagattatatttttttgtcaacctttccatttggactgcctgaatgctgcattctgtttgtaaatgaaatatgttgttatatggaaataacaggactttgatgcattaagcccttgttgtgtgtgttcgatgtgattcacggatattgatactatgttacttaagaacatgtgtcaaaagttagccagtagtgtctgtaatgcttaatacttaaggctttgatcttgttctattagccatgtgagtttcaagtgtttgtttattggagatgacttttgatgcattagaatccatgtcgactcaaatgttatagagaatctctctctctctctctctctttttcttgctgactcattgaaagtgacggtttggtctttattcaggtgacgaagattgcgcttttggctatttcctcaacaagtagttttctctcgtttctaattctcaccattagttttttgaatggtagaaattgatccttatcgcctttggcaccttctcattttggcttgtgcttttattcagcaggctaagaaatgtagaaggcggggggacgacattggacattgactcaaacaggtacgctcttcaaatcctaattggtgtttttgcagttagagagaaatttgttttgtaagaaactgagtataaaatcttgagcttcctcattctctatcattaatccctatgttgattcaaagactatagttatgtcttgctaagtatatctagatacatatgcttggtttcctgtgttgctctgttttcaatgatatatgcatgttgtgacatctacggtcaagaatttgaaatagacacaagctttttttgtgagaatatgtctctaaactctaaggtaagcattgtaagaaactcatgattgtgacgagtgaaagaatgggtagatgttgattttggcttttgaggtaaaaatctcattgtcattttcctaaattattttgaggtgaacaatgttaatactttttcttgcttatctctgtccatggaaagacttgagctttattgtagaccgatgatgaaaaaagtacaaagcgtgtggacctgttttcacacactgcatcagcaaaaatccaagatttgtggttggtcccttaacgttgagtgtttctctttttgtgcgttgatatcttccttccacgtaacctacttgcttaccctccccacttctcttttttaccctcctcacttatttggtcgactacatttgattagtgcttctttgttttggctttagatttcatcattgtaaaaatctaggatattctagaacccaatctctggcacatcttttttattttcttggttcctttttctttctctgttctttaaatgttgcttgtaccaatttggttaacatatctaactaaggcttctgaacaatattttctgtcattatagttagaaatctaggatttgggttagaaatcgtatgatctcgtgtgacttgtgagctatgaaacaatggtaaaacttggtggtattcattcatggatgagatgtgtaaatttgttagggcttagtgattgtgctttttttttttcaattgggttaaggccaagctaatattttgtagtcttgtttaacgcgtgtgtagaaatatttctgtgttgtgaatgcaagaaggtagactgtatatggcaaactgatttggttttgtggttatctcaatggtcaaagagtatcatcgtctagacttaattgtaaaactaaagaaattcaagtgtagtaacagttgagctttggtttgtcattgtcgctaagatattttcctgctttgtgatgtgataagtgaacataagtgtagatatataagctaacgagtttatctgtaaccaaaacaaattaaatatctctttgaaataaaaattattagaagatattttctcttacatctcttcttatgttgtatcattttcagaaaggacaagacatggtttcccataaatatcacatgaagatatttctagtctacacatgtagacagaaagatctgacaatcacaataattcaatacagtactgcgcaaggggcagatattttgtgaccagagccatcaagagaggtttcaagattctgcaatggggaaagctgagcgcgatacggttgttgccaagtcggtaacatttgacattgacattgtatggacccaactgaatgtggttatcttctgtgcccatgaagaaacacatggtgtatagagccaactcgaactctggacttactccaactagagtacttgagactgattttagaacaccgttccactcgaattggattgttagcagctgagtctctgaatcaggctgcatacgaagcaaaagtgtggtttctcggtcagtcaccggttttgaagtacttatatttggaggacatatttagcattgaacgaagctatggtacttacaatttcaccgcgacgtcggggaaatatatagccttgataatctacagttcctttggcttcctccaagtaaaactacaagaaaagagagccaatttaatcggttgtaagttttactgttttgaatcggactttcttagagattgaattcatggtaggtggaggacaaaaagtgttttacctgaagccagttatggaatccagagacttgttcccaccagattgtttgatctcacctacaaagacatgctcaaacgcagaagatgagccagatgtacctccgcggccatacagatcgaaccagagacttgtcaacattctcttgaactctaagtagcttccaggagcgacgtccttgagcacaaggtacctgtgaaggtacttgatcacagaggttctgctaatttcttcaatgaaagccgcttgctcttgcctctcttcttctgtgaccacttctttgtaaccttcgttggggttgtagttgtcaagcaatgaacagaatctggcgaaagtcggttttctagagacttcctcgctcacccaagagaacagtagtccttcagccatatcagctctctcatggacccttttcccatctccgcagtcgatttgataatccttccaggaacaaggcggtttaaatcgagctcccacagtttgttgcaagcttctgagagacctgagagctctagttgtgagggttctaggtttccataagtttcaacttcgtctgagtagtgttgttcacttgctgggcgtttgtaatcttgccattgctccttctggactgcggagaaagagagtgatcacacatcaaatcagtggaaaaaatgacgggtaaaatcagcagttagggctctgtctcggtttcgaaaattcaaaccttatgtgattgccttgcaggtttctttttgcccacagtttcccaaccatcattttcctcttgctggctctcctgtacttggaatcaaatgccaacattagatcctaaacatgctagctaaactgacattaggttgattcttcctttataagatgatctaatgtaagagtaaacgaagtgatatctcaccgagaagtcttgtttctcgctcactttagccgcatatgtattctcttcctggtcctcctgcgtggggaaatcaaaatgctgaatattaaaggctttttgcaggtaaggaagagcctgggtttcttgtgaatgaaagaaagatgaaagagtcaattgttttagagattcataaatatgaattttacaagatttctttgttggtgcataaataagactgttttacgaagtagcaatttcactgaaactcaaatgcgttatttaaatgttgaattggcgttgatcacaaacctcatgtgattgtgaatgccttgtgggaagcctttcgcccttcttctcccattgattctcctatgaaacaattgagagctatttcattaaggactatctaacagtaacgcaaagtaggataaatatactttctacattacaattgccatttgccaatggcgtagcttaaactcaattgactataagcttctacgaatcgtgtatttcagctaaattcaatgaggttccaatgtttatagatactgagtgataacttgagttacaacttgctaatcagagttctggtttctataaatcggttcgaatttcccaaacggtttgaattttgacttcttacctctgaattctggcgacggcgtgcgacgatcctcccgcgcgattctgatcctcttcctcaccggaaaccacctgcgaccatgtccagattccagaagaagaatcgttcaacagaaattcaaaatctctcaacaataaataaaaaaaactgataacgcagaagaggaattgatgatgtacgaacattagcccaagtagatctggatctctcgtccctcgagttgccttcatcatcaccaccatcgtctcgccgcggcgttggtttcctccgatagccacgtcgagtcgaccaaacctctgatcaatccgtccattgtctctaacaggaaagagatattttgttttgatttaaaagagtgtatgggagttgtgatccagaaatggtagttgaataacgacgtcgacgatttacttcctgttttttcatcacgcgcgtgacgtttagatttttattacggcatttattgtttaccgatccactagtagcactatgctctcataacggtttttcgctcctaccgacaaataatagttgattcgtaaattttagttaaaaaaagaaggttatggccaaaattgactattcttttcagttattttagtggagggtaatatagagaaatatatatacatagtgatcaacctgctttctataatcaaaaacaaaatctaaaatattgttttctcattttagatgcaagagagttgactcaatgaatcataagactcgtctctgtaaatcttgatcctaaaattccgtccacgcgggccgtttactctcaagatgtaaatttgagcgatgtaattgactcgccaaagtagcgcgttaagctctagtagtgcattggtcgtgtattaagctttgcacgttcccgccacaactaaaggcttttaaactttatcaacaatcaacatgtaataattaaaaatcaacctaacaatcttataatattagacgcaattgtgttgtgtagagcaccacacgatattgatacttctgttcagtaatcgaaattactcaatcagtagagagctctgaaatgttaccaactagtcttggttcaagcttttttacatataatgattaaaaaaagatgtgagctaaaatataccaaaacaataaaaagaaattagaaatagtcttctgttttcttaattataaattaaaatcttctaacaatcttattattattaagactaagacaaatttctgtaataataataacttgtacagatacatccttcctagaaagcacaagtaattttatccacaaatgtacaaaaaatatcaacataaaagctctcttttcacgccaaacaaaaaaccaacaaaaaaacactctctttgtttgcaagtctacttcgttgcatgaagtaatagtttcccaaaagcccaaaaaaaaagaagtgaaaagtttcattctaaacgcaaattctttcccgattcagattctatggacctgtaatcatctcgaactctaattgctttccaatcagagtcctctttggtctgtcgcagagccataaagtggagtgcatcacttcgaacttggtaaatttgacaagcccatgggtacgagtcaggtgcagaccaaaccttctgttcttcaaactcagtctgctcggccaaagacgttggcatgcaatacactgtgttgagctctggctcgatgaaaccagccactgcaacacatccaggagagacgaatccctcaggagcccgtggatgccagatcgatacaggacttatgtaatcatctaagcaattcctccacacctgacaagtgaataaacatatatgtatcatgctaaaaactcaggtttgatagagtttgcgtttgctcaaaatttggatgcttgagcacttaatgcatacgatgagttccaggttgaaaatactgtgcggttaaatgccacggattacggttgaaataaaatgttagagagatacttaccaggtcataacccacaggaagtgcaaacactccattggtgttattgtagacagcagcaacatttgggggatggctacccacgtgagctacatcacccactgacacgaatctggcaaacaacaatgacgaaactgcttaagtttcaacggctcaatgcagctacagcatcaccattagggtactaaataaccaagttaagaaataataaactagatttttggaattttaaatctcttttggctatacttaccccgctggacaactgggtctccagatagtgcaaactcctccatcttcagaatcctgaaagccaaaaaggaaataattgtaaagaaaacctcaaaacggttgatgtggggggtgaattatacatgtttcgtctcataaagttataaatcaaggattcttattgacatgtattgatgacaagggtttaagattttgatcctggtctccacctcttagcttaggctagaacccaaaattttcgagtgtcatcaaaagaaataaaatctagaaggcaagaaaatcagaaattttctgtactaacagggaaacccctttctaagctcaaagatatagattgggatggaaaggaacttacctgctttttacacaaagaacatcgacctttggattctcgctcactactccagatttttgagaagttgatactatgtttgacaagctttttatcatctgagacagagcttgaagaagaaagttctctcgatttaataatagctttgtttttgtatgtttttgagtctcttccatcagcctcattccaagcaaaatacacatgtctctggcttgaaggaacctgcaatgagaagaaagaaaattcattaggtgtgttgcactggtatgagcttcaatatttgcataatttacactggttagtaagttatgtggaatataaaccagaaaacttaaaacatgttttctcattatatttttactataaaatagaagactaaagcatcttgggagtagtaatttcaaatgtaaatttcacttgaatcatagccaaattatcaattctataactataatgagaatagtgatagcaataaccttgagcacaagatttttcatgttagactgatatgctttccacattttgcgcactactgaacagattcggacagcttgaggttctagtccatttaagtcttctggcacgctgcattttataacctgagcaaaactctctgacttccgaaaactcttcagatgcagtatgagatgcgagggcctttggctacctgcctttggcaattccaacgccataagttcctcccaaggcacatcccacatgatcttgctgggtttcttatccatcttatccagatcagagcactaaatggaagcaaacattcagttaataaaaacaattttgagacgctaatggaaaacctgcatgtgaaatcgtattctagttggttaaacctgtaataacacgactctcttgttggtcaccatgacaatgcgtttgtgtggaacaaggaaatgctcttcatcgcaatcagacaaagcaaattttgagggttcctgaatatttctgtacagccaaagtgccgacttgcttctgctagatgaaggagcatctgcaaaacgagataaccaacataaatcagaactagtttggtgagtggcaagcgtaactagaagaatgtaagttcgtggctttctggcaatatttcagtataacttacaccatatcgtataaggagcttagaatgtaaaactattagattgaaatattaaacaataggatagccgacttgtaattatgaagttttggaagcatccaaaatttctcactagtcagacaagaaaaataagctgagccagtacctggcctatagcttccttctcatcatattccctgagtataccatcagcatgaacagcacgaggatttctaattctttccaaggcggtcctgttgctcaaaacctccaaacatctgctacaacttgctccaattccatcaacagtcaatgagaaaaaatctaatgcaccactcactggttgtacaataaatcctaggaacgcccgtcctaccccatgggcaaaccctagaataccattttctcgggcgctctctacaggctttgtaacaactcctgaaaccccaaaggcaacaccttgtgccagggcttctgttccttgaacaattgcatcacctacaccggtgatccgcctcgaccaaacctgattcatattcacacctcttttgagcaaactgccaaagtgatcaattcaatattttatagcaagaaatgtacctgtttagcccgtagttgcatgaattgaccatcagttgaaagctcggcaaaccctttgctaagagaggccaatgttgagctagtcatacccaaaacatctactgagaaaatcaaatgtaagggattgtggatcagatctctccatatgcgattcccgatggctggaagtattgaacttttccgtataaaccgatctctgtgcattactctccttagatgaacctatatgtacatatgattttgaaacattagcaacatttctcgttctctatttgtcagtactaaattccaactatagcaaaatgatgaattagcctgtggtgtcaggcaattgaaatgctttctagctacaagctgtttcatgagaatccaaggaaaaaaagcttctgagctacttatcccctgtgttacttatctcgtgtgctgggagtcaagaaagagtatggcttaaacaaactcatgctcaacaattcataatttacaacaagttgtaactttttagtagtcagttctcaaatgaagtagactaccacgaaatggaaccaggtatcccaacaattagttctattactaggaagatgtaatcactattccatttcataaatgggagtaacttcaaaggaaaatcaaccacctgaattttgaaagcatttccaacagcggacaaaatggggctccaaacaccaagaattccatgaggcctctgagctggcgctgtttctagtgagacctttagccttacctccgaaacatctatgaggctgaaaatcacaaacaaaatcatccaatcacttaagttagaaaattgctagacttgcataccaaaacggccaaataatgtggccttcgtatctggtaaaaattctatagaagacaagaatactttatatgtatctcaggatcaacttgcgcgacactagaacttttggggagacggtccatctgaagcttattgtagaagtcagctgaagcccaaatgataggctcgtgaatgtttagtcgccaggtattatctgttacctgtcaattgaatagaaaatacatcatgtgcttcagatagtatctcaaagttatgtttgagtactctgcagataaacctgactagaatacatacccgtacatacacatatggatacacttgaatgccatcagtttcttcgttacacattgtaattgtcatcttaagcactggttgacgactatctccagtgttatctggtgccaatagtactggcattaaagttagaggtagctggttatcaatctgtaaacgacccagaatgattttgaacctggaaatcattaaaaagtatattgattatttggttccatcattccagttatacatgaaacagacatgaaaggaaaacattactgcgatattcgagttacctgctagttcttccctcatcatacccagtggagtaagatacaaatactctttcaaggtaaaaatatgataactctttaggcatgtgatctacaagagagatccccactagtcccatttcaattatgacctccagagtggtggtcttgtgttctgtaggtgtctgaggagtagaatatccatgatttccaatcgatgtcaaagatatgatttcgttagaactctgtgaagtactgtcatcatcggtgaatctagcaatcttgatgtcaccaatttcttgaacatcaaagttcacttctaactccctacacaattcagaatccacagcacctttttccatgtctactttgaataccccagagcggtgatcactttcaaccttagcatccaagaacttttgaccataaggatcttcccatgcaaaattttctgttgtaagaggttccaacaaaacccacgaatcttcacccaaaccagattgccgaacactgatgcttttgacagttgatctattttcaaccctggtttgaaaagttttcacagaaaaagaagaggaaattagtgattgtttcacaagcatggatgtctgtcgcttgtagagaagatacctcataggaccgttgcttggtcctagtcgaaatacaactataaaacgtgatccctcttcaaatccccgtatctctgctttcacatatctccgtgcaccatttttactctttaatacaagaacaattgtgtcctctcgggtaacttgaacgggaaatgaccactctgtttctcttaaccggacctgaaattaggcaatgtaataagaagatgatacatcattaatataaaaagagatgctcttacctctcacaatgtaaacatatgtggtaggtaagggaagtatgcatatgtaaaccatttaacaatacagaacataatcgccttgcagtgaaactctaatttactgctcctagaagtctcactggttttactgagcaaatatcatatgctacatacttccagtggacaccttcaacaacatttttaaccattcttttgtttttgtgtctctccctttttcaacaaagtgactaaagcaaatttatgaagaaatagaaagtggtgtagactctgcaaattagacagctcacctggagttcatctctcccacttggctggaaaacaaaggagacccttgaatcataagcatggagtacttttggttcatctgcactgttcagtttaatatatatgtcttcaccgatcctgttggtgaaagtcatgatggtcgaacagatatgatctgaaataaattcgagtcagtacgtaataacaaagaaaaagtagaagacaaaatgcttgttacctttgtaggaaccgactggtaagcacaaggttttgtagataaaaatagccgcatgcaatttccatcgggatcatacgcatccacatccaaagatccatcctattaacacaaactcaaaggttaattaagctcaatatttgagaatactagtctatcgatcaaatgcaataaaatattactgaccatgtcacccagagcagaaagatctttgacaggaccatgttgctgattgccaaactgagatatagacactgacaggcccagaagtttgaaattcaaagtagaagcaattgtatgaccttcatatatttcttcttcggttacctcatctaggactacttcatcattctttttacttcgaaagggaagaccaacttttcttgtttgcttcttccctgacagatctaaaagtctgagtgtaagtgagggacacctcgcaatcgaaaaccagaacggagcataaactctgatgatcttcgacaaaactatctgctgttcatcatagttttgctccagtattacttgagcaatcctgcttgcataaattcaactgtgtgagaccaattaaataaagaaaaattaattctacaattgtgtcatctcagcagaaagaacaagaccttccagtggcagaacttcttagtccaattgtcttcgcagggacaccattggggtgagatataaggacagcttcctgccaaattcaatagtgaatgtttaatttcccaagggagaatagaagatacagaacgaaaattttgtgtgcctaggtgatgtgaatctaggttaaatttcctaacttacatgcattggtagccatcctctttgtggaagcaaagaaaagtataaagggtttcttatatcaacactatacaccttgacagtttccccagaaataaagacacctctacagcgacaaataaaatgaccactagcttgcgcctctaacactgagtactcagctccaaatggaagacaatttgctatagaaaacggtgatttgaccacaagggtccagtcttgaatagggtccgaacgtatatcctttgcaatttctgttgcttgggtcttcaaacagaaccacaacttttgattatctccggaagaagtactgtttatctgagtacaaaatagcaagtgctcggattcagttagagccgatatacatatttcaggctctgattcacaagaaacctctgcccccccaggcctcgaaaccacagaactccaagaatactcatccgacccatcaggaaatacacacttcagtttcagaacataagatgccgactgtgtcaatcctgataagggaaccggtaacgtatcaccaggtttcagtaacccaattggaatatctggaattgaatttactttagactgcaggcagaggtcaagtagaaagtcagtattgttctccaccgaaactagagacctgacatttacgtatctgtttccatcctgcatactaacttcacttgcaaccacatcatttcccaacctccagcaagcagcaggagcagcataattcagcctaactgtcgtccaaggaccctcaatgctaggacttacttgaagaaatccagattttttttctctgaaggatttgctttggtccactttcgacttagctggcaacagtacagcacatcttatttttccgcagttctttctttgatccccttggttaatgctctgcaggaaaacaggaagccaatcatttcattttatcgcaatctgtgaacccagaaagtcgaaaatcccttaacatgcatgtattgataatacagtattgatatcattttctacacaacaatggctacatcctgacaggaaggggggcatgttaagttcacgatttttaccatggtttcagttgtagataagtctaaccagacaaggtcattagcataattgtgctggtatacgttgtccttcatatattgtgctatctgttttagaggagctgaaaaactcccaacaggggcacctaaatcgtgaaaacaacatcgattaatataccacaaatgaaagaaaccctttaactcggatacattaccacgtaatatataagctataagaactaaggacacaaaccttttccgacgtctgtcactattaattccaagacaaagtcatcctgggaaaatgaaagaacaataaaatatcaaaagagccactgcagcaaccttgatcttgaagacaacaaagaataaccagaaaatattattcataatacattttattctaaaattgtacgaaggtacatgtactaactaagattttccaagctataagcactgcagcatttaaacctgtttctgatttgcttgggtatatgaagctgtgtgattaatcaatctatgagattaatagtagaaatacaattaaaatggcgatggacatgaaaatccacagagaagaagaacatagccatttggaaaaataaaacaatccagcagtattcaggggatacaacttagttgtaggtcaaaaaaatgatgttagatatcatggaagagagagaataccagggagtcgattctgaaaaaaaatatttcattccagtcgaccacttctagctcagaggacaacatatttgaaacacttccacaagtacgtgcactttgctgacgaagctctgattcaacaggggaggtctgattgggagacaggcgtatgactcctgtgtattgatgcgaagacaatccacaagttcttggaagctataaacatatcaaatacaaacaactgtaagaaaacaaggttactccacataacaacttctccaaaacttttgtgtagtcaaataactcattaacccagtaaaaaagtcactagaggcgtaagccataaaggataaaagaaactgaaagcacattaaactcatttcctttctttatcagcatagagaagtaaaagaagacaataaaaggagatgcaggagcgcctgggaggtagaatatataaataagggcaccaaaacgaatgtaacctttgttttaagcagaaaggtacctgtgcatccatcacaataactgtaaccatgattctaggatttctgcatagttctcctctgaggtgagaatccaacatattggtcaagacgggaacttttacaggtctgacgtccccagatggcatctttacaatatccttaaatcctttgatttcggtggctctaatatatatatcttgcccaagtttgttttgtggaattatgaaatagtttttcttctgatgcacctcaatgacagattttccattgtcaactagaggaagtgctccctgtaaaaaatagcaagtgtaaatcaagagagaaagaaaacgtgacttcttcaaaagagaaggtaaagctgaataagcctctgcttcaccaagggagtggcacagaaggaccaaaagaaaagttctcactctctctttatggtatccatggacattgctaaggctgttccaactagaatacgcttggataattgtattagcattcgaaactgagatgttcacgttcaagtcctttgtagatgtcaagcgcaactgagaaaccgcaccaaaggatctagggttgaactggtacctgcatcatgatggaacatagccattatatatagtatactccacatttgttggattatataacaaccagaataaacagagcaaatcacccgctcccacaaagtgtttagacataaacatttctacactattgagacttaaaatggcactgcaattagaaaaaaaaccttaagaatccgtctgcaggctcaatgagaggctcccatgcttcatacttatcattatatgacctggccgctaaggagaagttgatggttgaatttgtgtagtcggttttgccaagtaatccaaaacttatattgttcaaagatacgttaaccaatggaaccatctgcaaagtacatagatacaccattattttcacacagataaatatgccacacagatttgtttggttctcttaccagtcccccatagtcatcaaatagcgcagcagaaaaagtcccaatttctgcatgaatgaccatgttatcagttcccccaggcaaaccctggtctgctagctttaaagcaaatctccttggtggttttttcaaaccactacggacaataaaggtcttcaactcattccctatgctccatatactaaatggttctaccctctgccagacatcagaggtatcccacaaactttcatccgcaaaatgatcaccagctaccatatcgctacgagcgcatcttaatttggtgaaatcatatggtttcggtgagcctttacatgcaacacaacccaaagaaacaaaacccggtggagcctgaggcatccagaaagatatactttctactcccctgtgtttcttgacacgtccaacaagttggaaatcaacagcggctttgaggatctcttgatcgctagtatcatgaagaaccacacaagagtttggaggttcatacctacacattcaccccagaagaaattattatccaacttgcaagtacaataggatgcactaaacgacatagtacataatattatgacttacccactaacagcaatatctccaaaataagccatcccttcagaaacgattggtcgccatattgaaacttttttctgcgagcctgagcccctattccaccatatcaactcaaaggtggcaacagcttcaaatcgatgaccagagttaacagaattcagtggctgtggccgtgtgggctgaataatatcatcaggagtagtacgatcatccacgtagctggattcttttggcaagactgcagtggatccaaataatatgtggcgtagctcatagggtcttcctaataagttgagcgtagagggatccgcaggtaagaaactgccaacagaattatccacgcgccaaaaagctaaacttgattgagatctgcattgtaagcaaagcaaacataaaaaatggcaaccctcaatggaggaaaatagttcaaaatgaaatgaccagcatagacacagtacagacatactacaatggaatcatttatgtattgggtaagaaaagaaaaataaatagaaccctaaaagagggagttataaaatccagttttcatttgagacttccgcatataagtcacatagacacaagcaaaaaacaacttatgatatatgtcaggaaaaggagatagtaagcatgtttgcacatgtctacacaagggaacatacatccccatatattttagtttgtgcatgcatcttgtccatgtgtatagaaagtgagctactcgtaaaagtaaaagtgaaaggttcatagcagcgtacatatctgtggagctgatagctacacaatctctgagagaacaaggggaaacagaagaagctaggatgcagaaggtagaggccaatgaaggcggtgtacttccacttgataccacacagcttaatgccacataaccctttggtgcttcagggaaccaaatggaacatgaactatctctttcatctttgtcatccatcgaagaaccacctaatcccccggaagctaaaggtgaccatatcagtttgaatgataaaggcctcttaactctcatcaaattggtgttgaccacaagaacccctttagttggtggcttgtccctgccatgtaatataccaattaattaacttgcaaaggctcttgcgtaaatagtatatcctagaatagtagactaacaatggtgtcaaatagtcgccgagactcgcaaaaccagggggtggatggggtctccagaatgcatatatttgatctgtacagggatctgcatgcaatataagtactaagtaccaggtaacaaaaacaatatgaactgataaaatttcaacaaataactctacatacttcttatggtcccaattttatcaaactctgagcagacgacagtcatttttctggatgtcatccttagaaatgataaaatgtcttcttcaacggctatgaacaatctcaagatgctgaatgaaaagttcataaatatgtttgaaactgaaagacgtatgttagtcttcccagaaacacttgaatacttaacaaaggtgtcgaaaggttccagaattttcactccattactttccatggttagacccaacgtatgagcactcattttaatttcatcattctttatgacaaccctgtaccagtaaaaaaaagacaaaggaatgacatagaaatatgaacaacagctgtgcaaggctgatcaatttttatgcaactaatcatgcttaaatttcagttcccaatcgcagagaaaccactgacctgccataagcatccaactgagcatgcaaaagtttgttggagagtaatggagttttaactacgtcttttgatgtgttgtagaaggtaagttctgggccgatagcctgcaacagtagaaacgagcttcaaacattaaaggggaatttttccttggcttattatgcacatacaaagaagaaagttggccactataagaacctgaaactcaatgatcatttccgtggacctctctgttgtggtgctgggagattgagaaaccggatcttccttcctctcagagtcttgttgtggggctttatgatatacttccaactcaaccccatcctctctagaaacagaatagctgctgcatgctcccaaagagatacatgaatccaaaacttggccattctgtgtcaatatgaaaaaagtgagacaaaataaaaggacaacagaaataaatttaagatctaacaccgagtaataaaattgaatatagaatttctataccttaaagactacattcctgaattgcaaccttttcccacttcctacatatataataggctctatactaggtgaagagaggatgcctccatttctatctttcaggtataaagttccaccattaccatcataaacaaagttatcaaatttttcatcttcagcgatcaaaggaccaagaggagaaagaaacgcttcagcagtttgttgcttgtagatagacttatccatgacaattgcgtcgaccatattaaggtttttatcttcttcacttgatagcacactgcctatagtagggacaaaaaactctactacggccagtagaaaatccaaagctacaagcaactgtggcctttgaatagaaacggaaacaaaagttgacaactgaccaaattgcgcatcaagagtgagcatcgaaggaaagggtccaatatcactccccgtggttacatgtgactgagttaaaccctgatttttatcagtcacagaatgtgaatctccaaaatctaaatctgcaggtcttcctacagccagtctgaactctttttcagttccttcacggttgtcaataacactgaatcccttcaatgttgcagtaaggaaaccctcatcgtgtgtattggatttgtagagaagccagccaccagagatctataagcatatacgaaaaaaattgtttagatgttaactatgtgccatgaggttgtttctgctatgaagtccctttgatttaaaatccctaggaaaaaatagatcacgagaacagaaaatggagccaaagaaatagagaagatgtagggtcccataagaacaatcacatgactaatcccaggaactagaaaggaatttcacaaaagactgatttgaataaatccatatcaatatagcggatcaacaattttgaaatctttttggggaaccagttccagagtgaggcaattccgcatgaagtatctatgcaaagggatcctctaccctcggctttcttcaagaaagaacttaacaaatgcatatgcccccaacttctcgctagttggtattacttatatccctcttaaatgtatcagctgtggcagctccaaaggacaaaataatactaaatactcctagataaatatgacaaatgaaatgaacatggtacatggaagcgtacctgtacagcagccaacggtgtatctcttgctgtcccagcatacaaacacaactccaccagattgatgacaacagaaaccttcattgaaatccaagtatcagttttctctgtctgagcagcattagtatcctcagaagtaagagtttcatgtaagtttcttgaagatgtcacaacatcaccactcaatggtggcacagcatgtggaagctcagaaatattagactgtgcacactctgtcaagatctggtattccctatttgagagggctgctcttagttcgtctatctgaaaaagcagatatttcgaaaaagcatgagtaagtaagtattaagttacagactggatataaaacatacctcaatagaaacctcaatgctcggtatctgatgtaacaagtctcgcagagatcggttaatggttacagaaacccccttcacatcttgaattatgctttcacctatttcagctccagaaccaacattaaggttgatatccatgacctaagttaatgttttttgggtcaaagaacaaaaacatttaggagagggtcataagttaaaaaaaaatgcacaaaaaagttgtaaagattaaagcgatatcaaccagaataaatcatgctcctcctaacagccaaataacgagagtcctcaccattattttcatagtttccacgtgaactgcattcagctcatttttgtctccagcaaaccactgaaaggtattgtccacagttatatgcacaatatctagcttcaggtaactgcaaaaacgaaaaatccaaagtggagaaagaaaaatcaaccactccgataagcctagtgaattcagaggaccagtaattgttataacaaaaatgtgtaatggagataaaatagtgggaaaattcaagatccaagcatgaacttactcagggctatcagtgtgacgaggcataacaattatgggcttcttaagagatagatccaacttaagtgccggagatccttcaatttcgctagtcgtaaaccacttctctgagtccgtaatttgatccttcatcttgacaaccccttttgaatcacttggcaccagtcccataaagtattcagcaacctacatggtggagactgattgtaggaagcaagacaaaaagttactcgtatctatgcagagagaatgaactacctcttgaataaagcgattcagataaacaatgcgcacttcagaaaactgcccagataggcagtagtcgaaaccttcataatcttcatcaatgatactgaatgatgtgaaaaccaactagcaaagaaaaaaaaaaaaaggtaaatcaagatgaaaaaattacatgtatctcatctacgcaatccattctcattccacaaagagaaaagtgaaaagaaacaaacaaccaatacctcaacaaaagaagttcctccagggtctcgcatatcacagatccaaaagtacatatggttgtctgggaggctgtcatcactgattcgtaaatttccaagacttgccttaatactgaacgagttcggaaagaccttcaaacaaatgggagtacagaaaatgcccacttaccttccaaaaattcactatactgaagaaaaagagatgaaatacaaagagcataatcacaccttaatatctgtcagcagattgtcttgtgacaatgtagcaaacttagttccattctcattcattaggaatatctgcgcccgagccatgttcaattccaagttgaaaatgattctagatttccccttccctaacaaacccttgacagctgcatccctagaatcttcaaatccatctcttcttggagaagtatgctctccagctacaggagagttgtcctcaaaagattcacagcttggatcctcaacattgatagcatttacaaactccaaaatagcaagaattgttggccttcgacagaaaaatgataaagtagctaaagttaccatcacctacgaaggcagccaaaagatgagtgatttagtaaggcttcactttttaacaatgaaacactaagatctccggattcgaagatgcaaaagcagaaaactatcaacctggttatcaatgtttttatattgaggtgacgtctgatggtatatgactatttgagccttcacgaaactatccagtgactcagttgtctcattgcttggcttagtgatattcttgttgtcaacagggagcaatccatcaatgcgactaaaactaggggtcctgagagatgtatagtcaatggaatcaaccaagatttctggtgcttcatagaacttttcctccccttcactagaagtaggatcaagccgttcagggctcctgctctcagcatcttcaaaggatggaagcatttctgaagactgaataaaagatcttgccaaataacaagactcgtttaaaccagaatggctcaccaaatcttctatttccagagatttcagtacagtcccaataaacatatcactccctctcatcgaaacttcaacctggttcgtcaaaggcaaacatactttcagtaaaaagaataagaaatgacaaaaagataatttagaagcataccaccatcttaccttcccacctaaggccctaaactcgaacaatttactctctctggcgagaagcaccgccatgaaagaagcatcatcctatagaaacatatacttagtcaaagcatgccccagctaaaaactagaaatggaatttatagtttgaatttacctgatgaccataactgaaacatattttgagttcatcaagcacaccggttacatatacactctccaagttagacaaatcgaaaccatctttctgttctgtttctgactcctcactgtcagatgaagtatcagaaagaccggctatgggagcagaaccctgtatattgaagtaaactttaaaattctttaaaattttaatcaactaaatagcataccgtcaatggaactgtctcacagtagacgccctattgataaatagacgtaaagttcaatatcttctgttaatcaaaattaaatttaccgaggcccgatagacagcgccctgcaaacggctatgccatgtttttctggagtcttcagaatcaaacatcaatatgagtgcatttacatcctccataacctagagacaggatatatattaaaagctgcagagccaaattttcattgaattttacaatcatcagaatgagatcgtagacccttcaatgatgaaaacacacaatgaaaacataaaaagcaggagtaaaatttccccacaatttaaagattcaactaaatgagatgtaaaccttctcactgatccgtgaagcattacgaatggacaagacatgttctactcctccagcaagctctacgggaactttgtatatatgcttcccgcgtaagctacataatattttttaaaaaatcactagacaagaaggaatatgacaaacaaagaaacggacagatgggattaggcaaatgtatcaaaacaaataggcacttcaagtgcttcgtgaaatagcatacaattttcggtaatgagttcttacagacttacactacagttatgaacgtagataaataacacttttagtggatttcagtaagacagggagagctagataagcccgttcaataagacaactaatagcataacattggtttaattttcaaatggctccgataacatcaaacattgagcacaaaaaggaaatcttgccatactcttcccacatgttgattttagtattaatatttcaagatgcaagataattgtaaacagacgcaaacatttacatataaacgagctgctctttctcgagttcatacaggccaatcattttatccaatcacctaatctttagagcctactaccatagccaaattgcaagagttgaaatcagacctggtatacttcttataagattttgagccaggactttcgagcacgtagataaatggaccaactaagcataaataccgccgctgccacgaagcttctcttccctattcatagaattgacactggaataaataactagtgtccaagtagacaaagagtttgcaaccaggaaatcgattctggtatgcagaaaggaactgaccttccagctaagaatagacaaccacccctcaaaatcagcttcttcccatggacgtagaatctgagagctctcatcatccttagtttgaaatatctgtgcaacttgcatcaacctatggtaccgagccggtgagaagtgaaagcctaatgagggtagccgcacagcaagtctggttgatgggtacgctgggtttggtcgacgaatctatgcagcagaacaagtaacaatgttgctacaaatatttagtctgaaacataattctttttaccaaaaatataattgccggatgtttagaattttacctgttgaagttttaagagtaccccacacttatcaataactggcaagaaagttacactgctttccctaccagaactagaagctctttttgaggataattgtttccaggaataatcaccatcaacaagtaaagcggacacatcactcaaaactaaatcaaactgcagatacatatccatttcctctgtcagttcatgcttatagtcgtcctgcaaaatttaaatacatagaaatttgagatactgcattagaatatagaaattatattgttaagacaacagatacttttatactttacctgggaacggatgaccaaattacccaggtctagaagaagctttgtagaacgatgattatcaggacgaaattctgttggaattgtgattttgggtgctgcaatatctaagtcgagcagaaacctggttgttttgtacaacgtcatttactgtaataaacatgacataaatttgaccagagagcatatgggagcacaaacagaccttgaatgatctttcaatgctctattcattccttcttgagcagtgcgtctgacttcatcaatagttgactgagaaaacaagtatgtggtttataatatgattaaagtggttctctttgggcagttgaatataaggacggttcagagatctaattccaacattttttaataagctgccagacaccattgtagctcacgtgcaaggagcagcaggctctataaatagttttgccatttccatcacagatattaagtatcatgtcaacagtgtaagctttgatttccagtataaaaaaagtcgcatgaaaaactctatagttccacagaattactcaggtgtcttgtacagtattgacaacaaacaaaaattgcttgctaagatcctaaattcatcatgatgatgattaccaaaagtagttaacaggctatataaccctaatatgcacttgtgtttcccaacgttttacaccatagcacataaaggacacacctgtacagcagctgcagtctccaaagctattgtctggctcacagcagtactgctttcgaagaagttgacaattccatcaatggaatcctttagatactgcagatggcaacacaatcagccacatatatataaataacagaactacttatacaaatttgccctagagagaggtcacgtacagtcatataacatggagaagcttttgcaacaagactccagtcaactttagcatcaaagggcttatagcagaagacagcaagtacagagtgagaggcaggtgcactctgcaggaagagagacatttataagagtctaagatacaactgataatgttttacagcaagcaaaacaaaacgaatccacgtaacaaacctcagcaagcagaccacttggtgatgacaagcgatatctccctaatttaatgtcagctatcttcgtttctgggaaaagcttaacggagcaattaagaccttcacatgataactcagcaaggcattccttctccccatcataaagttttgaagcactacgcttcatctgtacctccaagaaagtatggagagcatcaggttttgcattgttgataattgattgctcatcaccttctttgtaccctatgactttatttaaccgttcccaatcttcatctgtgaattgaatagattctccttcacctccagacacttcactcttcctgaaggcattcatacaagataattgagaataaattttgggaaaaaaagagttgtgaattggaaagaaccagaggagcattcaccctccaaacggccaccatgaacttttagcctgttgcttcttcgagtaattttctgcctgtaccgacctctcaacaaacttgtgcgccaacatcctgtagagaaactcaaggaacttagccataattgaaaatgattaaaatatttattcgtattttacattatatggagcagacctcatgtactatgatgacatatggaagtaaaacagagaaatttcatggaagcaaacacagaaaggaaaaaaaagaaacagtcctaacctttcctagaacgatacaagaccaaacctttgaaaaaactaactgatattctaggatgcaactaaaaattactattatttaagctttatagcttacctccattgcaaaatgacatcggtatcaagttcccgatcaagggcctcaatttcttcatcatcatcaacaactatcctactgatatcagatttcagcaacgaagcatactgtgtgatgtatctcttgcgtagactagtgtactttaaaacgtgctcccatgacattctcccgctgtcataaaagtaacaatctcagaaaatgtaaacaaaaccttacgtaaggaactgcaaaggaagatgtttccacaaccgatgcaaattacgcaaaaagccggcatcagttaaaaaaaaaagataaaggtttacatttagataccttgctatcttaatttgttctgaaacaactctgtaagcatatttccaccaagattttgcgtcgattttaactggaacagatggacggtaatgtgcatatttcaaacgctgattaaatgcagcaaaattatcagcaagtttcatgacatccctgtatcctccctgagtacaaaaaaagacacacaatcaagatcaccgggtacagccaaatagaaaaagagtagacgccttaaatgttttgtttcacctttgataaacaaagtgtcacatcgtctaagtttacatatgccttctgcaaaggttgaacagcatttgaagattcatttgcttgggacttagagtacttcgcattccctgagacaggttgcagaatatagaaatgctttctcgtgaggcagtcagctggcttaccatcctttgttccatatctaaaaatctagatatttgcatacaccgaaaattagattttgggtaagagacaatggataattctggttccactatatatacatgacttagcttgtcactacctgatcccactcaaaaggagttaaaacctcccatggtttgtcaatatgccacggagacatgtcagaatcaagatagaatgcaagccgatcaagttcaacagactgcaaaaaaaaaggcaaaagcaaacaattttagcaagaaaagataaatgtaaagtacccctgcttttgtttcttggcatgggtattcctttcccaatgcagtcatccagatattagtttcatacaaagatctgttacagaacactaacccttctagagagcagcccaattcaatttccgtgcttcttactataggcacctagacttaactgattgaactagattaaaatcataaactaccaagctactacctacaagcaagaagaagtgcaactgtgcaagggatcttaacataaaaccctcataagagaaacgaaactaggaaactgaggcatatgaccagaaaagcttgtgtcattcagatattcatgaacaaatctataccttttggatggagtccagagtcccgccagtaataaaagtttcctttccactctcatcaatggttacagctgagagtttctctagagtaacaccagctgagaacgggtggccgggattgctgcacttataacataggctgttaattatacaaatgggtagacaatcaagaacaaagattctgttataatctagttacctctctagatcctcatatcttatgtgaatatttgaaattgacagcttcaagtttccaacgatagtgttgatcactgatcccatccatgatttgttctttgaagagaataagaaaatacggttgttagtttagtacaatattattcgctacgttatctagtacgagcaagtagcactagccacaccatttctgtctgtagtcgacgagctctttcaactaatttagtttccatttcctggttaccacaaacagaaaattgattcaataactcaaataagataaatggaatatggtcataatatgagcgacctatctcacccgtattagatttctttttgcttcctggatagaatcctcactaagtccttcaacatcagttgcaggttcggctaatacaaaaattcggtcgagataaaccactacaggttcctgtccaagtctggtccatggtacctaaaatgatgatttttaaacatatcaaaaaatgggtctaactgagtttataaaactattggaagatgaattcaatgaagaaacttagtcccagaataaaaacaataaatattgtatgacattgagtaagatgactgatagagaccatgaaaacaagtgaaatactactcgtgagcaaatggaatagaaaaacgaaaagataactaatgcactcaagtagatattgtttaggttagataggatatatataagaaaacacacacacacaaaacacaccttgagtttgactgatccaagaaatccagctttaaccctcacaggtaatttcaaagcattaagtgcttctggttttagttgcatatttttcagctctacatctcctgcgaaatcaagttaaaccacaagctatattaaccaaatggaaaaaataaaagcaaatttattgacatgggtatgctaaaaccttctttttatttaatcatctgttcttagtaacaactgtgagaagtaactaagcaattataagtgaacaaccagcacaaaccaagataaaccatgagcgaagaagctataaagcctgaaagcaagcagcaatcctacatcattttaatcatgtaatatgccacacgggaaattgaacagttccgatcaactaaaacacccaacacatgcctgaaaaaagaaacactaaactcaaaaatccagaagtgtgactattgacttctccgtttaatagctagctacccgaatataactcgaagagaacccaattccataaatcgcagtcaatcacagcacacaaaacctaaccagttctcacattcgttcacaactcaaaatcgctactcaatagcacatttgaactttaaactcaaatccggacattacacaaaatcagcgagaaaatagaaacaatctaaccttgccaaacactgatcttaagagcttccttattcaatcccctcacatagttccccaagtacctttgtaacaagtaagctacctgatcttccaacatctttgaactctgcaaatcaaaattctcaccgtaaaagggaaaaaacaaatgtaaaatcaataatcgtgagaagagaatgaaattctcaaagagttcgatttcgatcggactagaaacggaatcgaaggagaggcatgaggatcgtttcctcaagagcacgcaagaggcggttggaaatgtgaaatagtcatgactcaatgacttgggggagagtttcggctctgtaaaaggaatataaaaatatctgctgttgatgacggtgcagtgcagtgtgttgctgtgttgtttatcaattgtcgacataaactttattattaaaaagaaaaaactaatcagtaactgaactaaaccaaaatttaattaagtttcaaaaataatttaaccggtggagaaattcctataccatataaaccaattagataaatcggatttacgcagcctaatttttgattaatcgaactaaccgaaattactaaaatatatcatttctagttaaacatatacaaaaagtttcttaaaatatgaagttttttaaattataaccaactaaaatctgaatcaaccaaaattatatacaaataggtgatcgaatttaattgaatagacgaattatgtgaagttgctataatatatcatgaattttgattggtttttccgctataactcgcaaacttgtgaacgattgcgattgttagcatttaaaacatatttagaaatttactttaaattattttgcaccactcaatatcgctaaatttcaaaatctcatttctagaaatatttgcggttgcagacgatagcggctagtcacaagaaaaaagaaaatcacataagcgacaaatacttagatcatatatatatatctatataaaaaaaaatcatcaaaatcatagtatcaattcaaactgaagaaagacaaaatatgaacataagtattgtaaaaatattgtcgatcttgaagatctacgaattcaaaacacaattttttttgtagtttgtcatattacttgatgtagtttttggtgatcaaccaaatgcatgaagtaataataaacatatcactatgatatttatttgttttttaataattttgtactactttatttatggtttttcttattagttttttttttttattaaagtttttcttattaattatgtttaaaaaattaatatttaattataataatataaattttgcacttagatggtcattggatgtatgtaaaaaaaaaaaaaaatcattggatgatctttaaatttgtatgtttttgttgttaaccattatatttattttaatttaaacatttcacccgtaaaagttaaaagtttatgtttttagatatttttaagctttacaggtcagtctatatcaggccacctagtgagctggagaagaaaggaacagcaaactcagaatgaactaaaaaggtcgagatttcttgatagcgcaatgaccacacagaccagagttcgaaccttcaaaagggaaatatataatttgtttcttagtttctcgagtatctaccacctcgagatctgaaaatctgattctacctttccattttctttctcaaaagtcgtggctttgagaatagttttttcctcttcttctcatcagactcggtttcctagttgactcattttcaagatctgggcatctgtcatttctttaataaaagctttctttttttatttatcccttttgttttcagctgctggttgcttgtagtaggtatagttttgggtggccttacttgcttttcagcaaaagctgggagattgagatttcttcttcttctctctctttagtctttgggatctgcgcatttctcagaaattatatgggactctcgaaagcatgatgctttttgttgtctcacttgtaatttgttcgggactttgttgctgaagaaaactaagcaatgtctgtagaaacatggttcatgattcagaagactactactagctcatgagttcactggtacttggaattaag

SEQ ID NO: 588 - DNA, 207674 bp, Arabidopsis thaliana
ccatgatttgttctttgaagagaataagaaaatacggttgttagtttagtacaatattattcgctacgttatctagtacgagcaagtagcactagccacaccatttctgtctgtagtcgacgagctctttcaactaatttagtttccatttcctggttaccacaaacagaaaattgattcaataactcaaataagataaatggaatatggtcataatatgagcgacctatctcacccgtattagatttctttttgcttcctggatagaatcctcactaagtccttcaacatcagttgcaggttcggctaatacaaaaattcggtcgagataaaccactacaggttcctgtccaagtctggtccatggtacctaaaatgatgatttttaaacatatcaaaaaatgggtctaactgagtttataaaactattggaagatgaattcaatgaagaaacttagtcccagaataaaaacaataaatattgtatgacattgagtaagatgactgatagagaccatgaaaacaagtgaaatactactcgtgagcaaatggaatagaaaaacgaaaagataactaatgcactcaagtagatattgtttaggttagataggatatatataagaaaacacacacacacaaaacacaccttgagtttgactgatccaagaaatccagctttaaccctcacaggtaatttcaaagcattaagtgcttctggttttagttgcatatttttcagctctacatctcctgcgaaatcaagttaaaccacaagctatattaaccaaatggaaaaaataaaagcaaatttattgacatgggtatgctaaaaccttctttttatttaatcatctgttcttagtaacaactgtgagaagtaactaagcaattataagtgaacaaccagcacaaaccaagataaaccatgagcgaagaagctataaagcctgaaagcaagcagcaatcctacatcattttaatcatgtaatatgccacacgggaaattgaacagttccgatcaactaaaacacccaacacatgcctgaaaaaagaaacactaaactcaaaaatccagaagtgtgactattgacttctccgtttaatagctagctacccgaatataactcgaagagaacccaattccataaatcgcagtcaatcacagcacacaaaacctaaccagttctcacattcgttcacaactcaaaatcgctactcaatagcacatttgaactttaaactcaaatccggacattacacaaaatcagcgagaaaatagaaacaatctaaccttgccaaacactgatcttaagagcttccttattcaatcccctcacatagttccccaagtacctttgtaacaagtaagctacctgatcttccaacatctttgaactctgcaaatcaaaattctcaccgtaaaagggaaaaaacaaatgtaaaatcaataatcgtgagaagagaatgaaattctcaaagagttcgatttcgatcggactagaaacggaatcgaaggagaggcatgaggatcgtttcctcaagagcacgcaagaggcggttggaaatgtgaaatagtcatgactcaatgacttgggggagagtttcggctctgtaaaaggaatataaaaatatctgctgttgatgacggtgcagtgcagtgtgttgctgtgttgtttatcaattgtcgacataaactttattattaaaaagaaaaaactaatcagtaactgaactaaaccaaaatttaattaagtttcaaaaataatttaaccggtggagaaattcctataccatataaaccaattagataaatcggatttacgcagcctaatttttgattaatcgaactaaccgaaattactaaaatatatcatttctagttaaacatatacaaaaagtttcttaaaatatgaagttttttaaattataaccaactaaaatctgaatcaaccaaaattatatacaaataggtgatcgaatttaattgaatagacgaattatgtgaagttgctataatatatcatgaattttgattggtttttccgctataactcgcaaacttgtgaacgattgcgattgttagcatttaaaacatatttagaaatttactttaaattattttgcaccactcaatatcgctaaatttcaaaatctcatttctagaaatatttgcggttgcagacgatagcggctagtcacaagaaaaaagaaaatcacataagcgacaaatacttagatcatatatatatatctatataaaaaaaaatcatcaaaatcatagtatcaattcaaactgaagaaagacaaaatatgaacataagtattgtaaaaatattgtcgatcttgaagatctacgaattcaaaacacaattttttttgtagtttgtcatattacttgatgtagtttttggtgatcaaccaaatgcatgaagtaataataaacatatcactatgatatttatttgttttttaataattttgtactactttatttatggtttttcttattagttttttttttttattaaagtttttcttattaattatgtttaaaaaattaatatttaattataataatataaattttgcacttagatggtcattggatgtatgtaaaaaaaaaaaaaaatcattggatgatctttaaatttgtatgtttttgttgttaaccattatatttattttaatttaaacatttcacccgtaaaagttaaaagtttatgtttttagatatttttaagctttacaggtcagtctatatcaggccacctagtgagctggagaagaaaggaacagcaaactcagaatgaactaaaaaggtcgagatttcttgatagcgcaatgaccacacagaccagagttcgaaccttcaaaagggaaatatataatttgtttcttagtttctcgagtatctaccacctcgagatctgaaaatctgattctacctttccattttctttctcaaaagtcgtggctttgagaatagttttttcctcttcttctcatcagactcggtttcctagttgactcattttcaagatctgggcatctgtcatttctttaataaaagctttctttttttatttatcccttttgttttcagctgctggttgcttgtagtaggtatagttttgggtggccttacttgcttttcagcaaaagctgggagattgagatttcttcttcttctctctctttagtctttgggatctgcgcatttctcagaaattatatgggactctcgaaagcatgatgctttttgttgtctcacttgtaatttgttcgggactttgttgctgaagaaaactaagcaatgtctgtagaaacatggttcatgattcagaagactactactagctcatgagttcactggtacttggaattaagatgattgatcagttcatcaactttgtaattcgacctcctaggtacttctccaccctctttagctctttcaagtctcaacttttttgcattcaattgatagctgttgggggtgttttgacagggctgagtatgatcctgatcagtatttgtgggagaaggagtttagcctcggtggcacaaagtgtaaaagacaagacttggaggcaagtatgggcacctaatgatttagtgttttcttattgtcctcttcaaattctggttcctcttgaggttaaccttataggtctcatgtttttgtactctcgtagcttacaaattcgaggggtcacactttgcgttgcagtcattatgttccctcatcttctcgggaggatactcctctcccctgtgttatatactgtcatggcaataggtacatagatacttgcacatctcttttaggaactaagaacttgtttatgactagttgaataaataagaacttaatccgtttgtttcggaatcttaccagtggatgtagggcagatgcaaatgaggcagttatggttctcctcccatctaacataactgttttcacccttgacttctcggggtcaggcttatctgagggtgattatgtaagccttggctggcatgaggtgtgttttcgggtcttactttctcaaggttcttcgtcttttccttatctaaattttttcttcttaaacttaagctagaaggatgatctcaagactgtggtatcttacctgagaaacagcaatcaagtatcccgtattggactttggggacgatctatgggtgcagttaccaggttacttcttgagctacttttcagtcacacttaaaagtagtattagtagttgtgttgactatagattcaccagctttctaaaggtctatgatctgaaaagtgtgtcaactctccacatttcatcttgttctctccatcatttgatgaagcgggaatataatgtgcagccttctctatggagcagaagatccttcaattgctggaatggtcctagacagtgcattttcaaacttatttgatctgatgatggaactagtggatgtctacaaaatccgacttccgaaattcacagtatgttctcctgctctctttaacctcaactggtattcgtcatagcaatatacacctgaaactggacactgagtttatataacacgaagaatgaaattaatttgattgaacctgctaataaaaatggaaatactaggaatgaggctcatatttccacatggctaaaagggtccatattagtctccttatccattacaatcaatggtagcgtattctagacattttcttatgcttgcaatgaaactttaactcctttttcaattaggttaaagtggctgtgcagtacatgcggcgtataattcagaaaaaggcgaagtttaatattatggatctcaattgtgttaaggtgttttataagcacctctccctattctttcttgtcatttactccaagtaaggtagtatgttaccattttagtgaagttttcgattttccctccaggtttcgcccaagacttttattccagctttatttgggcatgcaagcggagacaaattcatccaacctcatcactctgacctcattctcaagtgctatgcggtacttacataattgcggtttttatgttcaagcatatcaatcctttttcatttttatgtacctatcttctggaaatttgcagggagacaaaaatatcatcaagtttgatggtgatcacaactcttcgcgcccgcagtcttattatgattcagtattagtattcttctacaatgttcttcgcccgcctccaatttcttcatcttactcatctaaacttgaaagttattacagtttgggagatgtcaatagcgctactggtttggatgaggtaatttgcactccatggagcaaccctaaaattcagtcatgtgttgctttctgttatatttctgcatttaagtactatagaaaacaaagacattgcctagacatactgctagagtcactaaagaagcggctagatgtttatgatggttgagaagtggtgatctcagacaacaaacaatagaaattagtctccatcaaagttagcacggtaatgatcatgccccagaatctaactgcttggttaccttgtactgccagagttttctgtatgagatcatatctggtcttcgttcggcatgtatcgatgttgcaagttcttcttctgcacctcctgcccctctaaccacaaagccaacgaatgagctcctttcagaagctatgcccatgatagatacagtatacctgttctctttcttgctagaattttcttcccgttgcttggtctatcccttttgataatctatcaataatgaaacaggataccgtgcttgtggaagataatgatcacaacgtggacgaccctgaaaacttcgaggtaactggagcatgtgtaaaaaccataataaatggtgaagtagtagtagctcttaactatgtttccatacaccagttttgaagcttctgttaaagaccctcaagtattgccttaggagccctggtcacagtatgtattttgattgttatttggcagggaaagcgtattgatcagtttgaagaaggctgttcatttacaagctccaacagggaaagctggggcagatgctcttcactaggaggcactgaagaagatgagagtttgacagctggcgagggtgatcaggttaatgttctttgaatctgttttatgaaacattttgatatttggtgagatggggtttcgtttctgatatattacattccaggtcgagaaaactgctgatgtaaacacggaacgaaagccaagagattctagtagagaagaagaagaagaagacagtaaggagaagaagattaagaacggaggtgaaacagatgcaaagaagcctagacacgaaaaattggaaagattggaggcctttagcaaaagactgcggcattacatcctaaagcgagtaaaccatagaagacatcgttcaccttgacaaacaaagttgaagaaaatgctctaattgttgtatatctctgaatcttgtaatgtacacttctccttcgacttggcaaatggaatcacacgtggccagtttaacctcaatcatatccttaccattgtttcaaatgccatgcaaatgggctacatttcttagaaacgcaaaacacatcttcattttagatatgtgaatagacaaaaacatgtattgtcaatctgttctgaaactcaccacaacacagtcgctaaattgaactccaaaacgaaatacattacaacaagagaaagaagaaaacacattttttctatatcatatgtttcccatctcagccgcagcaccctcttctttgctgtgaggaggatgcatcttttccaccaaacggccctggagttattccaggctcatttgcctcatcaaccacaccatcttgaatccttttgtatattgttgcggctgtctcgacgaatgcctagccaaaaattaaaaaacacgaaacacgtcgacataatgatttagactttctattagtgtgttaggactggagtggaacaagtaagaaactggtggagatacaagaagttggggaacactagagaaagcatgtgtagagatctctgtttaagcctaaacatttgaatgaatgcatgggggcttttacctcctcgacattgtgagcagtcttagcagaggcctccatgaatataagaccatgctccctagcaaactgttctccttcctctgtactcactgtccttttatcttcaagatcacacttattcccaatgagcattgtcgtcatattttcacttgcatgctgtcttgcctcttctagccagctggctagatggttaaatgtctccctcctgtaaaaacggatatcaacaatattgtgagtctttactgagacaatgacattttcaaaaatatacaaatctagttatggtccctttatcggaaaaaaaaatgagaacaaagaaagcttaaatcaatcatgctcaactagtcaacttctagttagctattatatagtcagagcgtttttctaaacgctatcgtattattagataaatagcggttttctggtactaataatattcatttttccggtatatatacaactcaagaaatgaaatttctttcatgatcaagtcaactcttgataacaaaacaaggaaaaaaataagtgattttaccttgtgatatcatatacaagcaatgtaccggcacgccctctatagtatgaccttgtaacagacctaaatgattcttgaccagcctaccatgcatgccacgtatcacatagaaagattagtcaatgcaaaggatgggataggaggttcaaacttactttaaagtctaggctagtgactataatcccatgaattgtgggaaataaagacatgaaatcttgacgcataggaaatcaaattgcataatatatggtcaagtcggtggtcaaagaaaatcagagtataaaagatcaaccaaaccagggtatttcatttcaagaaaataagatagatttttgacgtgtataaaaagtcaagaagtaagttgaaagagaccgtatcccagatctgaagtttgatgggtttgttgtcgatagtgatcgtcttggccccaaattcaacaccaatggtgagatcatgcactgcttgaaacctcttgtcggtgaacttaagcagaaggcatgatttccctactcctgaaaccagattcaaaactcaatcaacatcacaagcccctcgagccctaaatgtttcttgtccaccaagaaaggttggatatgaattagattcatatgataaggattgaaaagaaaaagaagcagaaggagttaccagtatcaccgatgatgatatacttaaatctataagcataagacattgaagtggacgaatctgaatccgtaggttcagacaaaaacgaatcccttcttctcctgatgggtaaggtcaagaatccgacaatgtcttcacttttaacgtttttgaatgtttctatagagtcttagaaacttctagattgtgtcacttagagatttggtgtctcaccattgggatgattgtacaatgattggagattgatgagtctgttgtgaaggttgatacgtgccatttcttttcttcttaaataaggcaatagcctcttatttggggtcccatgatttggatcaaaaaaaaaaaaaaaaaggtcctttgataaaatttaatatataattaataaatttcaacataacaaaaagtacaaaaatatagaaaattaaaaaaattatcctctattatttttctagttagctaaattaacaattttaaaaataaatgataatcaatttttagtgattttataattttaatcataaaatagataaagatctaacaaaaaaaagtttaataatgattggcaaaatttagttaaaaatcttaatataaattttgcctcaggcctccgaataacttgtcatagcccttgtaagttgtaagataaaacagtttcttttgtttgtgactttggctttttgttccttttctcaatttgcatgtctttctggtccaatattatgattgcttgagctcattttacccccttgttcaatttcgttgtcgtctgttctggttcacactcaaagacggttggttttccagcaaatccagagaaatatcaacctgtattgtcgaccattgcaaacttgctggcgtttcagtatttggtaggcttttatttgaaagacaagacagcacgcggaacaaaagccaatagactctagtaaagaagaagaagaaatcatgtgaaacaactgcaaaaacctagacacgaaatagcgggaaggagggctttgttaaacgagtaaaccatgaaagacatggaaggcatcgttcatcatgacaaaagctaaagggattactttatttgttgtataacacggtaaatggaaccacatgcagccaatacaattttctccacaaacactgaacttaccttcatgatatgatttatatccttactaccttttccagtacaatgcaaatgggctacattcctacctccattagatccttacgcaaacacatcttaatttttagatatatgaataggcatacacgtgtattgtcaaaccgttccaaaaccaaccacaacacagtcaccaaatcgaattccaaaacgatttacaactatagaaagaagcagagacatttttgctatatcatatgtgatcatttttacataatgacatagacatatttttcccatctcagccgcagcaccctcctccttgcgaggttgatccatctcttccacctgatggtcctggaattcctccatatccaactttgattccatatgactcatttgacacatcaaacacaccatcttgaatcttcttgtatattgttgcagctgtcttaatgaatgcctagcaaaaaatcacaacaccagtcgaaatcatgttaagtaattgggtaattggcaaatataccacattggaacgtatgggggtttacctcctcaacattctgagcagtcttggcagaggcctccatgaatataagaccgtgctcctttgcaaactgctctccttcctctgtactcactgcccttctgtgagcaagatcacacttattcccaatgagcattatcgtcatatttgcatttgcatgctgccttgcatcttctagccagctagctagatggttaaatgtctccctcctgcaaaaaaaacggaggtaaaaaatatcgtaagtgtcttgactgaaacagttataaattcaaaaacacaaatctaattctggttcagatctttaggagtcgaactccaatctagaaaagaagaataacgtctagttactacttacacaaaaaaaataatttgcttccctgatcaactctacttttgataaacatacagaaagaagcaaatgatttaccttgtgatatcatagacaagcaatgcccctgcagctcctctatagtatgaccttgtaatagacctaaaggattcttgaccagcctgtcattacagagagatattagccaagacaaaggatatgaaacttcagaatagccaagtcgcctagtcaaagaaaatcaaagcatatatgatgatgtgcacaaaccaatccaggtattcatgaaaacaagatagagatacatcatgaaagttgaagaagtaaggagaaagagaccgtatcccagatctgaagcttgataggtttgttatcgatggtgatcatcctagccccaaattcaacaccaatggtaaggtcatgcaccggctgaaacctcttgtcggtgaactgaagcagaagacatgatttccccactcctgaaaatcagaatcaatatacaaaaatcaacatcaccaaagcttctctcgacccctaaatccactaaaaaaagttggatatgacacagattcagatcaattcgcttttcaattttcgcaacgaaacatatataggttttgatcatctcaattccaaatggattgaagaaagataacgtagcagagaaggagttaccagtatcgccgatgatgatatacttgaagagataagcataagacattgaatttgaagaatcgaaaaatccgcaggttcaggcgaaaaatcgaattccttctttaagacgatgatgagaacgagaagagaagagaatctttttttctctataaagacggagattgacggtttgttttccagcaaatccagcgatgcatcaacctgtattgtcgccaaatttcaatctctatgtcgtttcctatttagtaaccgcactgcttgacgtttatttaaatagaaaacgacatgcagtctgtttataaaaataaagctgtaacctttaaaaagttgctatctttgcacccgagagagagctcagtgaaaaagatgggaagcggtgtaggtgtagctctctttgccctctcccttcttctcgtctcccatgaggtggaatctgcaatcggcgtgaactggggaacgttgtcatttcacaagatgagaccttccacagtggtggatctcctcaaagcaaacaagatcaccaaggtgaagcttttcgatgcgaatccagatgcgcttcgagcgttaatgggtactggaatccaagtaatgatcggcattcctaacgagatgctctcaactttcaattctgatttgtttgtccagcaaaatctctctcgcttcataggcaaaaacggtgctgatattaggtatcttttctctcagagtatatgtgtctttaagctatgattaagcagaggattttaccaatatatctgttgaataggtatgttgcagtagggaatgagccgtttctgactggttacggtggtcagtttcagaactatgtagtcccaactatggttaacctgcaacaatctttggttagagcaaatctagctagctatgtgaagttggtggttccttgcaacgcagatgcgtatcagtctaatgttccctctcaggggatgttccggcctgagcttacacagattatgactcaattggtttcgtttctcaactccaatggctctccttttgtggttaatatctatcctttccttagtctctatgggaactcggattttccacaagactatgccttttttgaggggagtagtcatccggttccggatgggcctaacacttactataatgcatttgatgggaactttgacactcttgttgctgctctcaccaagcttggatatggtcaaatgcctatagttattggtgagattggttggcctacagatggagcagttggtgctaatctcacagcagcccgggtttttaatcaagggctcattagccatgtgttgagcaacaaaggaacaccgctcaggcctggatctcctcctgcggatgtatatcttttcggtttgcttgacgaaggagcgaaaagcacactgcctggtaactttgagaggcattggggaatcttctctttcgatggacaggccaagtatcgtctcaacttaggactaggcaacagaggactcaagaatgcaaaaaatgtgcagtaccttccttcaaggtggtgtgtggctcacccatcaagagacatgacccaagttggtgaccacctcaggcttgcttgcagtgaagcagattgcacaacgctcaacgacgggggctcgtgcagccagcttggtgaaaaagataatatctcatacgctttcaacagttactatcagatgcagatgcaacatgaaaagagctgtgactttgatggacttggcatggtcaccttcctagatccttcagttggtgactgtcgatttcttgtgggtgttactgatataggcttatcgtcaagtactgagccaatggcaaggtggtctatctaccacatttgcattggactattgatctggactctcacaatgtagattagggaaatttttcagtgttacattatttagcgatatagtagatataggacggagaaattgcataaatatagggtcagatgtattttattgttaagctgaaaagctgaaccagtgttatctctgtaatatcttcttggggtctatattagaaaatcagaaccactaaaactatggtacctttgttgtcaatgtactgtctaagatgagactcaaatcggttatcatcaattagattgtgatcatcactatagattcatttccactaatcttctcgtctttatctattgtaacttcttaagtgcttcctggagctatctgttacacatgtccttgaaaattcttcttctccaacaatggtccctaatttgacataggaccagattccccaaaccctgtttcgattttgcaaggtgatgtaagctcaaacagcctcaggtccttccaaatttctgttgcaccctcatgtgacacaaaatttttgccacattaacaagtatcaatttatcactgattgcacattttttattcagaaattaaaagaaacatagacattttctaagtctctatactataagcatgaacaagaatctcaaattctattttcggaagggaacataagatctaaggcaaaagaagtcatgcaccaatacataaatgtcagaagaataaaacggagagaggcccgagtatgtctctacttctgcctcttgtagatcttagccaagaaagattttagcactgcttgaattgctttactctggtgagcttcgatcaactttgtcagcttctcatagctttccttctcatattccatgaacgctccctatggaataatcaagatcaaacgcagattttgttacatatatatcacatctctcatgttctctactttcataagcaataattacgttctcttattctacttggtctaactaacgaaagggtttgagttaatgcttagtggcaaacctcgagatcaagctctttgtagagagctttcaccttagcaacgtttgatggttcggctttaccatagttctcctgaaacattgaaaatttattcagtccagtaaacatgctgatcctgcttcaaaactagatacaaatcttatgcagaaaatgatcctcatacgcatgagaaagaaactgaatctcacgtatagtatcttagtttgttcttcactgcagcgttccaatgccttaactaccaaccaggagcatttgaaatcttctatgtctgtccctatctgtgatatacgatgcatgcttggtaagataaacacaaaaatacaataagatcagctttgaataccaaatgtgttggcataaattttcaccttgccaagtgtctcaggatcagcaaaacagtccagataatcatcctatggaaaagaaacgatatcaacttaataatattgctctcgcggatcctgaaatgagccttatgtaaactctcgtgtattagtatctaactaactacctgtacttgaaagtaaattcccatgtcaacaagaacagtcttcacatcagtatggttttccaaattttctcccgccatgagcaatgcgcaagcaacctgagtgcaataatcagtgaggacctctgttcacaacagacttaaaatgtttcatagactttaaatgttatcaattgcctagcaaatagcaatgtttaacagatcatctgattacatccaatggtatcggtcaaacagaatgtgtctagcttacgaaataaattatgctgcaacctctgaacctacgtgtgactctatatatatatatatagagagagggattcagagtactcacaggaagataaaatgagtaataagctgttttgtactcaacaatacgccgatggctgcacgttttagagcaaactataatcatcagtcaaacacatgtaatcctacttcactacatcatccattaaaaatttgaatgatatctctcacatttgcaaggagtacttagacaaatctttttctccatcaaaggtggtgatcaaatcaatcatctggccgcaagctgtttgaaactctacctagaacaatgtaaagaaactttgaacaagctggtgataactgtaagtcgtaatattaagagaaggatgaaagagataaacctcgttaaacaaatcaacgaggtcaacatagtaaggcatttccctgaagtgctttttgagaatcctgtggatatgattgcgaagtagaatcccatcgttaatggcaatcataccaacctttggctttctaaaccaacaaggctggccacggcgtgtgacagagttgtccatgatgtcatcaagcacaaggaaataagcttgaagctgcaaatgcaagcaaatacaaaatgagcattgagatgaaagataagaagagaagtaaaagaggaattacccattcaatgcaccaaccaagagcacatgagaggaaagtctctttctccgtcaagtcttgaccttgcttcaacagcttgtagctatcaaccacagagagaccacgatttagcttccctgcaaaacagaacacacacaagttttgtttatgagctgcttaagtttgaaggtaatgtctgagtgaagcttctctcacctccgcgtacattgtagtcaagcatctgcaaaaagaggttccaatcagcagaaacaaattcatcaaaggatctgagtttaagtgaaaatggaagtgaatcgaaggagtacccgttcaagccattgacgagattcgtgggtgaattcaaaggaaggatcttgaagcagatcagacttgagaacagagtaaacgtcgaggaaggttgatttcagatccgccattgataggatcaaggaaggtgtgcaaagccaaatgtggaacctgattgttttaagtgtgttcctcggatcatgcttatatcgcgtcacgtgacgttctttaaatgggctttttgtggcccatttaattgagccgtctaaggcctgcttatctcagaagtacagtatataaaatgtacgtgaaatggggaaaacatttttaaacaactctaaacccctaattttgtattgcagagtttcaaaggatgacgacaatgtctgatctttcaccagatttggtaggggagattctcactagggttccgatgacatctttgatttcagtacggtgtacttgcaaaatgtggaacgctttatccaaagaaggtattttctttaaagcagcaaggaagcagtttatgggattcacgatgatggattctagggtttgttcaatgaagtttgatctccaaggaatccgaaacaacgaacatgactttgttgatccatgtataaagcaaattgctaaacttgatcaaatcgaggtatctaaagtccttcaatgcgatggtttgttgttatgcgtcggtaaggacaactcgaggcttctagtgtggaatccttatttagggcaaacaaggtttatcaaaccaagaaaaaggtttaacaaactcgaatggtacgctctcggatatgacaataaccacaactacaaaatcttgatgaactatgatacagggcacctttttggttacgaaatctacgactttagctctgattcatggagggttcttgatgtcagtcccgactgccatataccgtttcatcaacagagcgtgtctttgaatggaaacacttattttcttgctcaagagaagataattgtggaaggagaagaagaagaagtagtagatgagattgaaaagtttttactctgttttgattttactacagagaggtttggaccgcgtcttcctctgccatttcactctgatgttttggaaactgtggctatatcttgtgttagagatgatcagcttgcggtgttatatcagcggtttgaaacatgggagatttgggtaaccactaagatcgatcccactgcggtgtcctggagcatgtttttgtcagtggatatggaaccacccactggttgtcagttcgatgatgaagctgggagcttctttattgacgaagagaacaaagtcgctgtattttttaattcagacttgtttaacccaagagtagaaaaccgaaaccgccgctacccgacagcttacatcattggacaagacggatacttcaaatccgcgactctccgggaagctcccgatctcgtaaaacctgacccctacgtgtattgttgcccacttgtgtggtcttcttatgctccaagcttagtgcaactctaaatcaaccagccggacaaagagataattactccctttgagtcgttgacgtatactatttttgtgtgtttgcttcttccatctagtcccttactgtttttgtgtgtttgatatttatcataataataagtatttggcttttataattctagtttagtactttgtccaatttcacatccaaacaagaagaaaaaaagcaatgttccatgttaatgcagttcatgtatttactgttgaaatgagatatatgaatagtcatcaatctctcactaaagacatattggtatggacattctagtagttccctaaacaacctaaagcatatttatatctgctacaagtcttgtggtttccattttcttagttcagcatcaacaatactgtgtgcttcctctgcaatctctgcttttcgcaacgcgccatcaatcgcagcttttaactcctccatctctttaatcttctcctccaactttctttccccttctattctgctctcattgatctcttccagctgagccgcaaccgttttcgctttaaactgtaccattctctctgactcttcatgctttcctctcaattcttcgtactctttcagtgatattctaatcttcttgtcaggctcatcatgtgttagactctctttcttctcagtaaggactttcatgtcttccacagctcttttctctgcggttttcgctttctccaccgctcttccaactatctcgagctgtttcactgcttcacccattaccatatgttttgctgctgcttctctcctgagttcatccacgttcatcctcatctcttccgcttcttttcttgttttctctgcttcacgcatgatttcatcaactttacgactcgcttctacccattctccttcttcagcttcttgtctctccttctcctttcccttcaattctctgttttctctctgcactccatctaattccacagtgagtgaacccaccaagcttttgtatgaactttcttcatcataaatttcttgcatcgcactctttgcctctttgagctcgccagaaagtttaatctcctcctgtaacctctcgttttcggtagatatctccattaactcctcaatatctttctttagctcagggtcacaatctcgcttgagatcctccagcctttgcttagcttctagcttcttacacacgtaagtttctctcaaggcaatactctcttcctttatctgttcctcttcctcttttttccttgcagcatcagaattaagtcgctcagcagcatcacgcatttccgctatgtcatgcgacatgtctttgatcttgttggagttaaccatagacgcacactctgcttcctctgccctctgaagttcagctagtctctcttccacggagaggttaaactgttgttttaattccgcgagctcgtatttcgccatgaacagctccgcggtaatcaaaatgtaatcctctcttgtgctctctgtttcttggttttcagattgaagttgttctaaccgttgattcatggtgtgtttggtagagatagcacatttccttgaatgtttgatggattctagtttaacccttaaatcagcagcctttcgttgagcagagtcgagatcagagagagcttgtgctttagctgcgacagagccatcaagacatatcttgactctatccatttcttgttcggctaacagaagttgcatctccttatccgacacatccgttgttgtgtccttaacgaagaaagaaaagatatttatagagagacacgttttgtaaaatgagagaaagaggcatgcagagaggaagaatgtgtgtatacctgagactgagaagaggaggaggaggagagacgaggtggttgcttcttggaaaagctaacttgacggaataaactaagggcgtctctaacggattggaagggagcgcgggtgtcaatctctcccacctcactgctccgaggaggagtctccggaggcatcaccggagcatccgttctgatcttcgccatcaatcctctcaacacaaacttttacgtaatgaagcaaagagagagagggtttgatgttgatccttaggatctttgtcttccaaataatgaactagagggtcgccatgttttgcgctcatgtcttttgtcactctaaggtcttcctttatctatttgtctattttcaattttgattattaatcttgttttcttttgttgggggcatgggcattggtaaactcaaaacatcaatatcttgactcctaaaataagaacatgtctatatactgatatatacattatagtatttagaaataagataatttcgttattaagatgaataattgaatataacctgagtctagaagtttattagtaaagaatctggaccggctattctaaacttggtgcttggtggtcattttgtggatttggttcggatttgtgtaccgtaccgttcacctaaaccccttgcttagttattccttttgggtttatttgtgtaacacttttgaaaactatttaagaaatcaaatttgttattaatatgtttatagttgtgcaactgaaatgaaaattttaattaattaagatttgatttaaaactattgaatacattttgtatgtgttgatataatttgtttatttttatttttatttctatcattttatcaacagttgttggttaataatatcttttgtaagaaattatctatagaaaataatttaattaacaaaactatatatattgcattgatacgtcaacaaaaaaaataactctactttaaaaataacaattagatatttccttcttggtaactatcacaattacataacaatgacatatacaattatatatatatataacaatgaaatatacaattatatatttatatatatatatatatatatatattggctataaataataaaagcctgatgcactttttagttaaagataacactataattatgtgaaattgttgatctttttgtgtagttataattgagaaaatgcaataaatagagattgaatgaaattataatattgataggtcatcatagacacatcattcaaataaacatttttgtatttatccttggagagattattgataaccaacccacacaagaactctcccaaaaaagttgtctttgggacaaagacaaatgtctagaagaaaagaaaaacagttggggcaggcttgattatttgtcaattgtgactttaaatttaggttagactttgaaacataatattaaaaaaataaagacatttgtaaagaagaaacgtcgcataccgtactgatatttgaccaaagattgatcaaagattgatcaaatttattaactagaagaagaaaagaagaagaagaaagaaggattaggcaaacaagtaatttctactattatataagcaaggagatatataattaaggagtcatataatttgaccaaaaaagataaaagtcaaattatggaagaggcatttttacttataaaaaagcaaaataaggatctcatattcttaatttattcaactaatccattcatttttgtgtgtgtatatatataacacatccttgcttgttccatttctaagccagttggtagtttttcacatatatacgaccttgaagattaaagatgaggttcttgttgatgagcatgacgttggtattaattgtgacgtttggggaagcatttagtgatagatggagcagagatgagatggtggagatggctggctacggcgaacaaaaactctcctctgttcttctcaccgcctctcttctctcttcctcctcctcccctattcatggtacgtaaccagttggtaataagtggattggtccgtattccttatattatatactacgagatttctaacacatcatcatcatcatacaggagctactattggcttcaagtgccatactggacataggaggagatctaaatggatcaaagctgtgacaaatgagttggggcaattcgtcatcgatcttccttctcacctccacgcgattcctgacttagacaaggcttgtatcattaaaacactctctgtccctaaaccgtatcgatgctcttccaagattcacagaggtattcaactcctctcctcttccaacggctctcgtgtctatacagctggaaatatcaccttacaagagagcaccatgtaaaagagactgtaaattaatcttgctaggaaagatcagtcctgactttatttctatatggttccttctcacttcttgtgagaaagagagatagtctttgtaaatcttgttcttcatgctcttcttgtatataataaaatttatgttttcttcaagcttggatcttcttgctactacagagatcatacgatcctgtaactgattatgatatatatattagatgcaaagtttgttatgttagcctaacaaccaaggcaagaccaaaaaatctgagagaagacatatatggttatgtatgactttgagagagaatatgcatgtttttgtgtttagctgattctgatttacttataggtttccaagataattgctaacattcaactaattggtaggagaagagagaggagttttgtgtcatcatctggaaacatggctttgcaatccgatatacataacacacatacacatctcttgatctttagttttcactttcttataatccatcatccaatactcaatatgtacagtacaacctaacattagaccatattctttagtattcaatcccataagcttcttcttcctctactggcaacgtggattgggtatgcggctgcacaacatagcataaacatataaatatcaactgtcttgatgtttgactatgtatacttctcaaaagacaaagacaaacaacaaaggatgtgatgaccaaaccttctcggtagttttgcctttctacatagttttgactcttcattcaacattgccaatgcgttttccttttctctcgctgcggcttccctctttgccttctttgtctcaacttcaatggctttcgttagagcatccaccttcttcaacaacatctaaaaacagaggtatcttaagaggtttcatatagttgaggatcttaaacaaccacaagaagatgatgaagttaccttgatttcttcatttttggcatttatagtaccctctttactctcacatagcttccttaaagcaatcacttccttctgaagcctgtcatataaaaaccctgaaaccatatcttcagaataaacatttccatcttcctctgttttcctttcgctatcttcttcatgttgatcagtcaatccgtttgcagtaatctttgaattctccatttcatcactttccccaactctgtcaattggctgattcatagcatggattctgcctgtaactgagcctcttagctgagaactagaccttttctttgagccaccaccactggtcaagaatcctaaaatcttgccagatttttcagtctttgtagttggagagacgaaaaacgtgtttgggcccttcaagccatcttctatggttttcagcctaagctttaacctctcctataatgtttacttgcattagaaactacactttttaccaacagaatattaactacataagcaatcacctttagctgggactcagccttagcggttctctcggaaacagcgagtttatctttcaatttctgcatttctccctgcacacagacacaaagttcaacactaatgtttcccatataagctagtcagtgtgtattaactggatgtgtaagtgaaaagcagtgagtacatggagaatccttctctcttcaagccattgctttacaggcatgactctatcgttctcatctttccactcgttagcaactgcaagtgccactctacttgctgacactttgactctggctagctctctctctaaggttctcttctcatcctggtaacgatgaaaaaatcatgtgattttcctttaaaacaaatgtgagaatgaagtacaagaaactaaacagaacacttgcattgagctgggagatttggcggcgatagtctcgaactgcattggcggctgttcctcctgccaagatcgcttcctccagttctacaatgctttgggagagcttctcaatctccaacactttctggcggttaattttctcaagaaacttgttctcatcctggcatatctcaatctgtcgtcgaagttcaaagttatggttctggacctcttcaacaatcaaagcacgttcaagggcacttctcaagattctctctgcttcaagaagcgccgattcttttgattttgttagacgttccaacgctttcttgtcctcttgaagtgcagaaatctgtcaaacagtagcatgtcaagaaaatctggcacttcacactgatacaagaaagaaatttgaaatacatatagtcttaagaacctcatgcttgtgaatcttgatctgagattcaagaggagctatgatggattctaggggtagagagtcatcgtcctgttggtgagtgtaaaccctccttagtgcttcttctgcagcgtcctgtgccgccaatgcatcttccttctcttcttctagcttcttcctctccaactcctacaatcatgtcacaagcttaacttattctagtcatttctaatgttttgacatgagtccttcacaaagatggtctatagtatttgagcaaaacctcaccttttggtcaacttgattctcggtggctccaagtttctcctccaacttcctcacgttttctctaagctgaaacaacaccaagtagcatcaatagagctcaagaagctcaaaaaggacagtttgaatatggaaaacattgatcaaaaaaacttataggtaagattgacttaaagtttttgtagaacaatcacaaacagagttgatgatcatcatgcatgttacctccttaaagactctgtctttgagctcttcatttgttctcaaagcctcaacttcagctttagcagccaaaagctctttctctttttctgcagagtggaattaaaagaaagcagaacaacctcaacatcaagcaaattactcataagggttgatgaacaataaacagaaagaaaaataagaacctttaagctggctttgcagagaagaggtgtcagatacaaaagggttttctgctgcagtcattttgtagtctcaacggctcctccttctttgttgcagtatagaagatgagttttggtctaagcagaggagaaatggagtcgtttaatatatacacacacactttcagagagagagagaggccattccttaaaggaattgacgttgaaaaagagagagggagagagaaagagagagttaaaaacttactaactctttttcctcattctcaagcaaccgtctccatttcaaacccttgagacagtaaccaacccttccctcttcttctttcactttcattacccatttactaaattcatattcatcctcccttatctttattttcaattctgaaatgcttacaagttattgacttgttctgtttcactaattatcttcttagttacaccgagcttgtccttaacatttggttcatcatcataattacctcattcatgtttttcatgttccaacattagtggtgtagttaatattattttaaagggacacggcgtgaaaatacaaaaaataaaacagctaccacaaatggaaattaaaataaagagaagagaatataatccaaaggaagttggaaggagaagcagcatatgacagatataaagacactaatcataaggataaagataatttaaatgattgaactaatttcgtttggtgaaaacccttttctttctttcctgtttctttataataaaaacctatattgtatcccctttttgtctttatcgtttttgataagattatatgaatgtaggtaacaacagataacaattatgataatcttgaaataaaactaaagcttaatcatcttctaaacatgtattatccaaatgatttttgtgttgcagtttgattaatagaaagagtaagaaagaaaagttgaaaacttggaagaaggaaagcaaagtgtgaaaaggtgttgcctcagcaattaatagcttaaccgcaaaatattgcacaaaccaagctttctttgtattagtggaagtcactcaatatctctctttgaattattaaaaattaattgggattttctctcttctttgcttccaagtcttaaggtttggttattattaaatcaaacaatgatagagaattagacaaagaacacttagcaagtataatatagaatcaactgaggtaaatgaccaaatttggagagaaattaggtgaataacaacaattaagtcaatggcaatattttatttatatgaatatgattccctaacaaaaactaaaatcatagatccaaaattctaaactcttaacacataaaagtaacatgttagggcaaaaaattactctcctgaattttgttactgagtgcaaaatactcattagtatattgttattaaaggcaataaaggaagcttgagccttagaaaagtaaagaataaaatgaaggcaatgacctgtacttgttcaatccatggttttgtgggttggtgagctcctttttaagaccttatcagaattcagaacccaatctgacctgtagatttgtctcatattttgttacctcacgacctttgttcagccgccagttgacttataccggtatatatagaagaagatcataaaatgacctaatcaatgttttggttatatttcattactagcaacccacccacaaccacatgacaatttacaagagaaaaacaaccaccaggtttggtttgtatacatatataacttaggttgtgttacaacttaaaacatcattgcacatcctaaaaaatttacagcgacagatgtgtttttgttgtgctcttctttatccactcaagtaaccatcatcactataacttacccaatctagtttgggtttggcttccacacggaacatgtagccatgggtcgtctcttccagaagaggtagagcgctccttcatggcctcccagtttgtagtttttgtcataagctttcagcatctcactcgctgcaaacgctgcagatgtgctgaccggccaacccgtgaacccagccatcatcattctgaccctccatttcccagtacctcgtgtctctctactctctctgactcctcacatgctatcatgttcactatgtctcttgctacacagtgttgttctgcgctgattctctgcttatcatcccgtggccgtgctgcatctatcgactcaaacatcgctgtgtagtaatccagtgtttccacaaaccgtgacaggaatggcgaggtgtttgtgttggattcttgctctactagagtaaccagttttggggagaggctcttgatcagatgcagcagcctgtctctgtgattttcaacacttacgctctcgtctggcatgtggtgtaatacatatgggaagttcacaacaacagcaaagccaggttccaacccgagatgttcccgctgcaccttgcacccagacatgatggcatcgtgaaactcaaacgggacaccacatgactgcgccaaagttgcaagcctctcacctaccaagctgagtcctcccccacgagcataggtggactgtgaatcatccacacccgtcacacgcagcaacggcggcccaccagggtgtttcgcaagctcctgaatcaaaaacatgtattgtgatccctgtgcaatctgaaaatcgataatgtggactctggtttccccagctattgcttccaagatctcaacattcgcagttgtgtacgcgaatttccagtaggggcagatttcatagagaacactcatgtaagacatcagttcccttcccgttggttcattgcatttcaaggatttgtatatattgctcccagacccctcaagcctcgctctaagcccttctgccatgtaagtgcctagccgttggatcggactgcctgagactgacaccatctgttccaagacatcaaggaatccatacgctgtagcgaaatccccatcagcgactgcccgagcagcctccaccagcacctctttcaagtccaactgtggagtcaaagccaaaagttcatcccagttccacgacttcccagcagcggggctaaaacctgagaattcttcaacttttgtatcaccactcagcagcgagacctcaagttcccgaatcttactcttgactccagcttcatcataggcaagagatgacaccccactcaaaggtgatccatagacgttgtcaggggaatgatggagatccgagatgcaagactgagagccctgaggagaaacgggctccggccagatgtaatgctcacagaaggagagtcatacgaaggaagactaccagaagcagtggaggattcgagggtaaaaaagttttctttggacgggatatcagagaagcctttgttgtctttcgcttgaaactgaggtgaacagtagacttgaggatacagcatgtgcagtccagccgcactgtgatgtttctgagacgtttgcattggaaaaaccccagcaatacactacacagctcctgaatcaatcttcttttagccaaatcactctctacagtgtaacttgttcaaaccaaggagaataaaaacctgcctccatgaaaacatccaaaaacaacaagtgagctacaacagagtaaagcaactaaatacagacactgtgatttgtgatagaagaagaaaaaaaaggtctagttgtgaatttttctctaaacaaactcaaacatatgcgacaaagtctgctctcacaatcaatcactcaagtcatcatagggttatcagaaaacagatctgacatctttcagaaatcatatatcggtttttgctactgccttcagatttctattgccagataaaaggaaccccaaaaaatggaagctttacactctctatatatctctctctacagaagaaattacatctattcgaaggttggagtcataccctaaagcagggttttttaccagaatcaggttaaactaagggatttcaaagctttaaaacctaggctccaagtcaagatttttacacaatcatcaggataaagtttagtacttttgaatcaacacaaggcaaacaaagggacaggtagacaaatcgatgttgggttacagggaataatcgctttttgcgccaaaaccaaatcaaacaagtcatatcctttcaaaaacaaacaatcaaaaaaggcacatataagctcagattcctaacccctaggaccaaaagcttaaaaccagatgagagcagagctaaggaagaagcaattgttcaatttagaaacaaatgaaattgaatcgttttgacaagaaaataaaaaggagaaagtgactacagagatcaccatgaaagctaaccttttgaaggagagaagctgaagaaattttgttgaatgggagatttttgttgacaaggggacaaaagagaagttttccttgcatactcaagaatcagcttgaggaagaagaaggagattgagatataataaaagtgcaaattgtcatgactctcttggagctaataaaatgcccccatttatgtggattatttacttgaatgccactctgaccattgacttttggacggcagtagctgcactaccactgtttatttattaattactctgttaacgtctaattgcttaccattaatgaaatgcttaagtagagtaatcataatgtgaagttttgccgaaatagcgtgtggacataaaacttattaacttagggtagactaatatactcttgtaatgtgttttctactcttgtcgctttcgttttttttatttactaaagaaaatacatttttaaaaaatttacttccataatagaatattttgactgtggcttccatggtcatgtaattttttttttatgttaacttcataaattaaatcaaccccctggttagttaagaaacaaaaaaaaacttgttagtcagttacatcataaaaaaaaaaattaggaaggaatcatcaacaaattcaagcttaacatttataattaacaaggataacatgatatatcaaacttatggagcatactaaaataaatgtaacatttaagtaaaaaacactttattttatcgacaagcattataatatacccaatgtcaaagttaattttttcgtttgtatttaataagacttcggcttttaaaaacggtttcgaaatagtcccgttgaaattaatgtttaagactataatttggtcaatttttagaatattttgtcctttatttttcccatattgtcaagttttataggtttatgtttcaaaatggtttgacttattgttaatgtaaaaaatttccaatgcatgtttgttgatataagattggatgaaactgatcgcagtggttttgaaaatctttgaatgcggaaattaagatgtatacacaagtaaaagttgcacaaagatcaaatctacaacaatgatggcaatatggatagtgtgcacctatctagttttagattccataaacaaaagtgtgtgcctcaaatccaagataattctttcaccatccaaaaaaaaacaaaattagttgtcacgtacgaatttttcaaacgaaagacttttcccaaatatcatgtttatataatgttaataccaaataaaaaaatgttataaatattgttcatatgaaaattcatagagttaatccaataagatattccgactagcgcgtgtgtggaaaagacgggagtgaggaagcgacgcgtggaggcgcgtaggggatttgtacggtggtgggatggcataatcgtaaaaaaagaggagaaacgcgtttgcgtcacataatatctcgtaagtcggaaaaatccaaagattaaggacgttcgtggacctcccaatatcctctgactaactgacacatgtcttttgtccctttgaacttatttgtttttttagttagaatattgaaacaaggtgatgagataatggatacaaaaactgtgacttgcatggaaaagatttgtgttttggtaccagagaagagacagactatataaaattataaatagtgaaacaaatactttattaacctttccttttttttttatctttcttgtgttttcaaaagaagtaaaagagtaaagaaagaagagaatgagatgtaaaagcatggaattgtctttccctttgtagagatggcatcttctttatttatgtacaaacacaaaattcttacaaacatgaaacagtttttacaaaacagatttgtatctcagatgtttgtaaatatgttccctcaaaggaaaacttgaatattagttgcccactcctctctagtctctatctatgagaagttcttaaatctgatgtacaatattgaaatttctaagaagaatattgcaaagggagagcccattgtattaatttttataatatttctgggtggacaggagtactgtgttcgttcactttgtcagtacccttttttggtcctaaaaaggagctagagcataataaagcaagcaacttcggtgaagctacaattattcagaaagagatcagaggaaaggcctacgtaagagtaggagacgtaataactaacgatcatgagcccccaccacacacggttactctctttgctttcttctttagtacatacatacaccattagttgattcattaatatccttatagtattagagttaattttcggaatatcaatgggaaaagtttttgttataatgttgttctttttaaaagaaaactttgttaatagaataattaaaatatattggtatctctgaaaattgtttttattgtatctttggtaattaacgagatctaaatcgtgttaattatagtggtaaataaatgtctagttcatcacttgaacctccatacataaatgtaaaagtgacatctttgtgatgaaattttgggtgttggaggttaatgtttatttgagaatcaaaaataggatgtcaaaattgatagtaaacaaataatcatacttatggaggaaactaagacagaaatgagggagacattgagcatgagaagaaaaaaaaaaattgggagtaataaggaggagggaaaggaaaatgagtaatgtaaatttaatgtttgtctcccaatttaccaatattaatgatattgcaaatattgaaaatgccaaagcatgtatcttgaagaaagggatggagtatcaacatcatctctagactctctaataaacaacactactaatgataatttaatcaatgagatcatcaagtgagaagaagggatgcaacggaaacacatattctctcctcacctactaagtacaccattaacttattttgaaagacttctattttacatataacaacactcttctcttattcaactcaatcgtggatcatggctccagatggttcctaccaaaaatcatactactctctggaggttgaagagcaagagacattgtacatcaagtggaaaaaatggaacaagattaccttatatgaggcattttctttttttcaccttaaaacatcctcccacctctataccatcctttgctctcctctgatctctgccctgcctttccctctgagctccttgacatctttacacttcttgaactcgatttgactttaccgcctgttgttgttatagtgcttctccctgataaactctcttctgctgagtcaaccctctcatactcctgcaggacatatcaaagcttaatttcacatcttatcttgtgagctaatgaaccaataacatgagctttgtctctcaaggctaagaagcaactaccttgggcttcttcttggtataaggagttaggcatggattcaaatcttccagagccaatccatcagggctacctgagctgaattcctgatatgcatgcaattctaataagaccattgccagtagttgttggttccaaactcagattcttcaaggttgcctacttttgatctgatttacttaccagtgaatcataggaagaagtctgtgcttgccagtaacagctttctgacaagtacttgttcgctttcacctgataagaaaaagtaatttcagattactattaaataatacattaagctatatagaacttcccaagagttacaacttggtttccattatattcagattctaagtcccacaggttacaaatcaaagaaagtaaaaaaaagaaacaaaattacctcagcaaggtcttgagcaatgcattggagctgtccattaagtgaaatgacctgcttttgaagattaggtataatctctctcgcctgattcagctcctgcatttgattgatttgactattcatcgaatccggaaacagaaccgcactcttcagtgactttatctcttccctttgcttcagacacagatccttcaacttctccacctgcaaaaacaccttaatttgattacaaacagctaatctttcgtggatctaacacagggacacattccaaaaccctaaacgactaaaaccaaggtttaaagagagaaagaagattttacttctcggttcttctcttcaagctgaaactttagctcagctatttcaacctcctggtccttgttcatccccagaagctcccttttcgctttcgcagaaccatagacaatgtcctagtgttactcttaacctctgtcaatgccttcaccttctccttcccgaatagcttcctctgcaatgttcccaatgtactcttccctcctcctttgccagtatcaattttcttcagttcctcgggaatcacaagctcgaccctcttgctcttggaattagatttcttcatttccattagcttcttcatcatattagtgaggtttccaggattactatcaggctttatgggcttcgttgttttggttaagtaggagatttggatctgacaatggctttcgatgaaattggcttgttcgatttgaattctgcggaggatgatagatctgagtgaatcgaggaggttacggatgatctagaatcgtaggaattgtagcgagacgccattattgatggaaggttcaaaaaagattaggatctgtgaatttgaaattgaggaagaagatgaagcagagggaatttggtttttctgtttccaatgtcccactctcttcttttcaaatttcgtattctctctgttctaaaacggacttttcatctgtattgggcctaactatgggctttaaaagtttaacggcacttttgtgtttatttgaattttgttattctgtttattcaaataactaaatactaatgagataattaatcatttgctctagaaaattagaaccagcacatatctacacttttagctttcctttcatttttgtgcatttttttcctttctaatttggacttttgttacttccttcttttttcttaactgtaaaatgacatatacaaagtgaagagactttcatgttccttttttggggggtttatggacgagcattttgtatttttgtggacagtaaataatagcgaagaagttggcgttgattgaggcaggcataaaggaaaagatggaatgaataatgaagttggctttggtccatattgtagaacccaaagcctaataaccgtacactaagcccttacatacatgaaacgctgaattgtcattggtagaaaaggaaatggaagagtagtagtaaggaattatatcagttaataagagttgtaatgtgaatagaacacgtaactggactagtatgcatgtgtatgagaagttcaaatctttaactctcacaatatcgtcgaagacaattgtttaggataagatagaaactaaatgagcatttaaaatttaaagaaaaaagggaactgtagagttgccttggcaggaggggaaagcattatcatgaagaatctggtctacaagaatgggaaatggacagatgtatctgttcaccaccaatccatcttcataactcaagtggtccctttctctcgacccatccacgtctccttcatcacaagtaagaccaaattaagccaccatttggtgtctgtcatcttctctttaatgctctcttttgttctttctttataaacacaacaagacatgaaaggtttttgggaacttgtctgagttccaatgcggctgctgctatcatctgatccccaacccgaacttacgtctacatgtacctctcatagttgcggctggaagccttactctcattccaatgactttgctgccaacgcgttcctccttctcatcatcctcttctgttctttcatatgcgtcctctctctccacgctgctatccgttgttgcctccgtccagtcctccaacatgtccctaagcccgacccggaccttgaggccacccatccagacgctcccccgacacttgtctactccccgggcctaaacctagcaggcaatgaagcagagtgcatcatttgtttgtctgaattccaagacggtgacaccttacgcgtgttggagagatgcaaacatggattccacgtttattgcatccagaagtggctctcctcatcccattcttcttgtcccacttgccggacaaacatcttctcctccccacctcaacttcactcacaaagcttaccactaacgagtacaccttagtcagatggtagctagttcctggtcttgcccactttttttttatctttattttctttacaacttcacaccactatcatgttttacaagttagtttattttttacctttctccttttatattccatgaaatttgcacagtctaaaattgatatgaagtcacttttgtgaatcatcatttacaacgtataacaaacaaagaccaatgtgtaacgaagcaataacaatacctcataatatagagggaccaaaggctttatttaatgtcggagttcaagatatatgaggtcttgactggtgttaggtacgttcccacttgttggataagataaagaaaagagttgttactagataagataatggataaatatagaggatgagaaaaaaaaatagaagtggaatgacgacgactcacattacgagcattaactccattgcccattggcatggaatgattctagctagcagtaggagaaaattccaagtgcgtgcaaagttcttcaatgaattcctagaccccctaaccagagtcatggatgcaatactggaaaggcaagactatgctcgctgcatattttcaggttgctgacatgttcaagctcaaaacacaatcaagcgatgaagttagaggagaagatgattgaacaactttgatctggtctcaaaggtcaaagccatgcaatatctcctcgtatgtactacattgttctagatagcctaatgatgcacatcgtgagttatgttaaaaaactatttttagaaaaagttactgagagttctggacaaaaagttcagggtaatgatatttaaggtgacaaaaggtaggagatgttactattcacaaaaaaaaattaaagggttatcttgtaatgcgacttgttcatgttagttgttgacaaaaaaatagactgttgtagattatttgttatgagggtaggagtaggatcgtgtagtggagagacgaacacgtaagtagaaagaaagagccttgttattagattagagctgtgttaatgtgtgaacgcaaccaacagttcgtttttgaacgagtctaactagagacaagtcaaagcttatgactttgagtggacactggacagagctagtaacttctttgaagattctgaacaattttataacatcaagacacgactctgtcgctctctctctccatagaagaagacgaagaaatagaagaatcgagagagtgagacaaatctagtgatgggttgcgactcacatggaaatctaagcgacacagagttcagcaagccgttgccatccataggtgtatatgtcgctgcagcttcactgatctgtggagttgctatgttttccgatcttcttcacggcttccggcaccgtaagttctggtttccttgcaaattcttctctctcaacgctaccactctcacctttatctctgtatgcgtcaaactctcattggatctcaacacttctatgcctagtcgccaagatcagcttgctaaactcagcagcagcgtcttcgtatgcaccgtgatggctaattccatgccttctcttggttacatggtcacgcaagatctcctcatgaacctcacggctcttgggattctagtcatcaccgatgttgttaacatctgtatccaattgggtacaggagctatatatgtgttccctcaagaacacgctctggtcattattctcatgcttttgatgtttatgatcttgagtttctctgctatcactgtcccagccacaaagcgtttcttggagctcaagtacaagaagagatacgagtttgctttgaagcagtgtccttcgtatacagagagaagaagaggggttcctaagcttaaagaagatctgatgaaattctggatgatggctcacacttctagccctcagtttgtgatggctcgctctgttacttgcaccaccactggtttcctctgtttcttgattgcaatcacattggctgaagccatggtccggtcttactttcttcaaccccggtcactagggttctgcaatggagattctgattacaaatggtcaaccactttggttctagtctcccagacagctgcagtggccataggaaccgttgctccagcgagcagatggctcaaggcagtgaactttaggtgtccatttagaaacaagaaatctttgaaagatgagttaagagtagagagttattgggtagagtgtctcgctgagaagaaagaacgtcccttgaacttttggatgctccatggtcgctgcagcaggaagcttgcacacgacttaaaccggttgatgcttgatatctgcattgcaacacagtatggtatagtgctggctagcaagtttctccgtttcatcacggtctattgttcgagtagaatcttgctatgttgttttcatttcaccttcaaaagtgattctgttgcaaacgctgagtcctccgggttcaaatccatcaaccagacaattcgttctgcatcttgaaggagaggaggagatggtggactacatggcacgtagcaaccgtgtggccacagaccacttgatacaaaagggtcggaagaaccaacctgtaacttgatagagctcttggaggcaacaactttcatctcaaaaggatttgaagggattcgagattttgacagcgacgaggtttcttctctggcctctggagagccacctaatagttgggcccttccattggtaacactgacgagtatcgctgtcgctcttcctaacatcaagccttgctcgctcaagaagttagtgaaagctgtaaacgaggcattggtctatgtcaacaagttcgaagaggtcttagacatcgaaggagagttagctaacagcaggaaagctgcagaagttgtttggttaggagttgatctctaccataaatggctcaacgtggatcttcgaaaactatccaagcaacatagcaaaacaccacaggaagttcttaaagagctggtagatatagcacaaaaagagtttacagagtcatgggagaaaaatcggatactatgcatgaagcataagccctcgcactggcccatcaagactcaagcagcaaactcaatgtaccgaatcagccaaacccttttgatgaagtacgaattcaagaaacatttgaaacagaggagactctgttgaaagatgtggaaaagatggtatcggacatagtatcaggatgcttttgcaacacggcacaagttattggaatgaagtgtttggttacagcagtggaagtgagggaagcgtcggtgagagaagcggcaatgcatttggggagaacagagaagatacttgagatcgtagacaggagatgcatgcctgctttgtctcatcacaaagtggcaaagattgatgaatggagagagttttataggaccaataaatccatcactttcactcatccttcgtcccagtgtacgacccgtgaactcattatcacctagaataacacattttcttgtcacatttaaagaattaattacgttttgtacatgataaaccctaattagcaaataaaatcctttctttgtcggttgatctaactattaacacttgatgccaagtctaaagagtttattagtttttaaaacccagtttaccaataataagtttcctttgtcggttgatgcactagtcaaactatcaaagtcgtcaagtttgctttgttgacaaggcaaagctactcttccaaaacattgatccattcttctggaaatttgcaataacgtctcaagaccaatgcaagtaataatttaaccatgccatgttatcaacaaaagctgcttctctgatttctagagtattattttttaaccattattgaagtttgaagatttcttattattgctaaatggtaaaaccatcttgaggggaacaatttgataaaactgtgtgctgcttcctgtctccgaccaaaacatgtttaaaattagattcggaccaaacaagttgtcaatttttagtacaaatcaaaggttcaaatgtcaataaataatcattacattttaaaatttcgaaataaaaggacaaacatgtaaaaaccaaaaaagtgaagcactgatatttgtcatttctgcctataaaatgtacacttcccactcacacggtcacagaaaccaaattcgaagaagaaacagagaatcatcaaatcaaatccctaaaaattgatttttgaaatggagaagaacgcatcgacttcgtcgttgaaggacttgggtccgagtggtctagatctaaccagcgcctttttcaaaccgatccacaactccgatccttctctcccttcaaaccgacgtaccaaagtctccgtcgtcggagtcggaaacgtcggaatggccatagctcaaaccatcctcactcaagatctcgcagacgagatcgctctcgttgacgccaaacccgataagcttcgtggcgaaatgcttgatctccaacacgccgctgctttcctccctcgaactaagatcaccgcttctgttgattacgaagtcaccgctggatctgatctttgtatcgtcactgctggtgctagacagaatccaggcgagtctagactcaatttgcttcagaggaacgtcgctctcttccgtcatatcattcctccactcgctaaagcttctcctgattctatattgatcattgtttctaatcccgttgatgttttgacttacgttgcttggaaactctctggctttccggtgaatcgggtgcttggatctggtactaatctcgattcttctcggttccgattcttaatcgcagatcatctcgacgttaatgctcaggatgtacaggtcagttccaaccaaaattagggatttttgttataaagctgtgatttgttttggttaaacattgcgattaaggagtcattagctggatttaatggtttagtatgataaaaatctatgctttagtggttttatactgtattgttgagaagatcaattgaagagcaaaagtgtgtttggattggttgttgtaggcatttattgtgggagagcatggagacagctcagtggcattgtggtcaagcattagtgttggaggcattcctgtcttaagctttttggagaagaaccagatagcttacgagaaacaaactcttgaggatatccaccaagctgttgttggtagcgcctatgaagtgattggactcaagggttacacttcttgggccattggctactcagttgctaatctggctcgtactatcctccgtgaccagcgcaagatccacccggttactgttcttgctcgtggattttatggtgttgatggtggtgatgttttcctcagtcttccggctttgcttggaaggaatggtgtggttgctgtgaccaatgtgcatatgactgatgaagaggctgagaagctgcagaaatcggcaaagactatattggagatgcagagccaattgggactttgaatatccacatctatatatgcatcaatttcaattttataactagtatcccacgggtgatagtgtcgatgttgatcactatatgttatgtaaatgcttgttcatgcagagtaatcccaactttgagttctattttgaaatagggtatttgcttacaacacacttgagttaccacttaccagtaatgtgaaaatgcgtggttttggcatgaaattattgtgcatattgcaaggcaatcgacacaaacattagtatatcaaaaaatatgatgtgtagaaaaaaagaaaagaaataaatttcttttaaaaaatggaaatagattttgtaagttcttaacaatcttttttttttggttcaccaagttcctaacaatttaacttcatgattccgatatttttggcgcgaaaatacctttttcgtgttattgcgtttattgcaagacaatcaacacaaatattaatatatcaaaaacatgatgatagaaaaaaaattggaaagaggttttaaagttcctaacaatctaacatcatgaatactcacgacgattttggcacgaaaatactattttctcgtgttattgcgtcttttacaaggaaatccgcataaacactaatacgtcgagaaatagaaataaatagattttatttatataaaaaatccctaaaatcatcaaattccagattattgtaattagattatctctcttataattgttacttaacagcttgatgtggctgtgagcctgtgacatttactttggagtctatgagagcattgaacccaaccaactaaaacaaaaaatatgagatggcaggcaagaccaagactcatatagtaaaaatgttttgacaatcaaaaaccaaataagcaaagagatctctgactctctatctgaaatctcaaaacggagaacgcgagggaacaagagattaaagcatagtgagaccctaagagagagagctttaggtctagaggggatcttcacaattcacacaacaactacgagataggatcgtgcgcgtcaaaagaagctggtactgctgattccagccgaagattagtctccgcttctggttgttccggtggagactcgtcggaaatgagaggtcttttcaaatccaaaccgcggactcccgctgatattgttcgtcagactcgcgatctcctcctctacgccgatcgatccaactccttccctgaccttcgagagtccaaacgcgaggaaaaggttttctctttttactttcgatttctcaaatctgaaaactttctgatctgatttgaattgattgaatccctgaggtttgattttctgataattgcttgtgtagatggtggaactaagtaagagcatacgagatttgaagttgattctatatggaaacagtgaggctgagcctgttgctgaagcttgtgctcagttgactcaggagttctttaaggctgatactcttcgccgtttgctcacttctcttcctaatttgaacttggaggtaccatctcttctcatgattcaatccaaagattgtctctttttgttttgttatgcaattgttcaataaagagattgtctttttgtttaggcgaggaaagatgctacacaagttgttgcaaatcttcagaggcaacaagtcaattcacgtcttattgctgctgattatcttgaatccaacattgatcttatggattttctagttgatgggtgagtttaggagatgtaatcatgtagtttgaggttgcattatggattttgttaatggctcttttaagattttgatcatgaggtttgttttatcattcatatgggtttctgtgatatctctcaggtttgaaaacaccgatatggcgttacactatggtactatgtttagagagtgcatccgtcatcagattgttgcaaagtgagcaaatcttatattttctttgattacgagattaaatcctatatgtttcaatccataaagagacaatctctatcgaatttatatagtgaaaactgcttctctttctatggttcagatatgttttggactcggagcacgtgaagaagtttttttactacatacagcttcccaatttcgacattgctgctgatgctgctgcaacttttaaggtttgggaacactgcgacatatttggagttccctcataatcacgatctgagtatatctctaatacatgccatcataactccagttccgtgattattttcttgcaggaacttctgacaaggcacaagtctacagttgctgagtttctcattaagaatgaagactgggtaagttctcttacaatgtaccaaaccataaaattttgcttgagagaaaaattatcttgaatcaatctggtatgactctcagctgttttgatttacagttttttgcagactacaactcaaagcttcttgaatcaactaattatattacccgacggcaagctattaaggtagagtaacttagaggagtgatgatatcatcgatggttaatcacgaaaaagatagcagtgacagagcattctgatggattgtaatgtgtaaaattttacagttgttgggcgatatattattggataggtcaaattcggctgtgatgacgaagtatgtgagctcgatggataacttgaggattctgatgaatcttctcagagtatgatgctttacccgccataacattaaattcttaatttctggctctgccagacagagttaatattggaaacaaactgaaacctgtggtcgaaaactctcaaatgcaggaatcaagcaagactattcagatagaagctttccatgttttcaaggtatatttcttgtactctaaatacatggagtaaatttacccagtgaaacataatcatcagtcagacgctttggcaattggatttttcggattttttaatgtgattgtagtctgagttttgataataaagtcatgaaggggcaaccaaagttcactgatattgttgtttctgtacagctgtttgtagcgaaccaaaacaagccttcagacatcgccaacattctggtggcaaacagaaacaagcttctgagattgttggctgatatcaagccggacaaaggtataggacttgtgttatatgaagccttgtatcaccagagaatggatctgattctcaccgtaaaacgagtttcttatatttatgattcatgtctgttatgtggcagaggacgagaggtttgacgcagacaaagctcaggttgtgagagagattgcaaaccttaagctgcgagagcttgcttgagcatgcacatatacacagaagctcatgatttctgttaatctttgaaagacatttttggaccatcaaagattgttgttatttattaggtactgtttcttttctctctctcagcatctacgctgttgactactctggatttttttagatcatatgaattcacatgtacactcctttagtgttgatcaaataaaaatggcattataaatcctaaatcatgaatgtaaaaaatcatcattgcatatgggaacagatagataagcagataaataactgtgtctctatgcacaaagagaaaaggaagcaagtctgttgctaatcttaagcatactgagaccgagtgccgttagatgctccatgctgagccgttttagcctccagtttccttcttttaatgactacataccaggtgaaggcttcgagtagggtggccacaatggcgagaacaacaatgataccgatgtaggcatttttccactgcttcttgggactcaatatgcctagccctttgaaaacgttcaccacccctaggatgattatcgtgtagccgatcgtgtggtggtaaatgttccagtagagcctatgcttgtgctctggttttggcctcagaaacatcgcaaacacctaatgttttcaaaacaaacgattaactggtgttgaaacctatatattttactggtttcccttttgatgtgaagtgtgtaatgtacctgaactgtcgctagagagaagagagcgatcccgatggcacggtgggtgctgtactgaatccctggtgagtcgccaccgagtttgagaccagtggcccatccggcaacaccgatgatgtaagcagaagcctggcagaaacgtgaatgtagaaccaagcagggtctgctgatttggctactctcaagtatcgagcaatgattgcccctagtggcatcatgattccccagctcactccattcaatattccatgaatctgccaaccatttttttaccaaaatcaatcattattcgttgttgccaaataaaaaattagggaaagagatgtgtgtccacaaaagattcaactcacattgcgtttgcgaagcttggaacttcctccagctcctcctgcagctgctgaaacaccggataccagattgagagttgacactgatcgaacattgttgccagaagttggatgaggcagaagactgttcccagacattgacccatcttgccacactgtgttaatggttccaccattcccaagatcctgtgcaagcttcagacttgccaacacaacgatctcattgttctggtaagttgcagacaaaccagagacattgaaactcagatcaccctctagtagactcgtctggtagcttctgatgggagaagtgtaaaccctgacagtaccatctgattgtggataagcaacgatggcttgagctcccaccattcccgtagacgttgggttcacagcccaagcaacccatttaccagaggtgagcttagtgtggcgataagcaatgtggaggctcccggtggaagactcgtaagtgtaatggaggaaggaatcaagaaaaggaagatcgttgcaagagtcaaagacattgttgctggagaacttgtatttagaacatgtctgagcaaaggaaagagtagtcatggatatggagaggataagagagagacagaggatttgattcaagaacttcataatggacatatgattactcatgaatcagaaggttagaaagaaaaagactcagatgtaagagcaggagatatttgttgaagaaaggagagaaagagagattaaatatgaagaggaaagtggggttagctttgttggttaagctgtctaatagagatcataacgtttctcttttgttatatgatcaaattatgcttaccttgctaatatctttttgctgttattttttttgttctagtgtgtagaacctgttttctttattagcataagtgtgtgatgcaacaataatgtggctcattattacacaaggaaatgcaacaataatgctcgttgacttaatcacagttattcaggtaaaaaaaatgagaaccaaacttgtttacagaggatatataattaatcgggttaattataatggtaacctaattaagatcaacaacaaccggtcacacctgtctcgcctgcctttgtatataccaaattctctctcattatgagtagtatatcacaactactattgggtagcatcttcaacctaaaagtaagtaaataattgatatttagagcttaatttgtttggttttattgtgttgtcttttacttacattaacatgtggaacaatagatagattagatagatgtgtacaataacaaaacgaaaggacaatgagaagtgaatgcaggtgagcaaccgcaccggtctgtgagagatccgatgccaagtggttggggttgtgtttttagagttttagttgtgtacctttttgggtcaatatctcaactgcttccatgtggatgtgggtctctattactttccacgtgtcaactaaagattgttgacattcgtcaacgcatatgagtgctaaaacccaaagcctcttaacaatacatagtaccctataatgagctgcttttacttttccagatcatgtgacccaacaatcatattgcaataatactaatttttgtatccatacacttatgctccagtttgacacaagacaattactaaaagacacactgcttggtggtgacttaacttttaaatgtaacaataatgttgctgctaccctgaatttctatctttctaatggcaaaagatttttcttttcaataggccgattcatagttgaaaacatttgtaggtgatgggcctctagactctaaatgggcttatttagctaaaagtttacagggcgggttaataccaatcttggtcgggttaaccaacttgggtcgggtggatgttccaatatgaagaagaagactcgcgcaatcctaaaacagtgaacgattcgattacaatggcggccacgtttctgccggcgacatctctccgtctaactcaaaactctactctccgcttcttatcattcttcaccatttctaacccttcttattctctcttccgtcctctacgccgccgtgttctccctcccttcgatgcttttccggccaattctcgccggagatgcttttgcacagctgtttcggaatctctcggctccggtgatggaaataaagttgagagttacgagaaacgatttgggagtaaagttggagaattcaggaaaaagttgaggatagctgaagtgaaaggaggagcggacgaaggactgagtcgggtcgggcagagccttaacattatgggttgggttcgtacacttcgatctcagagcagtgtcacattcattgaggtaaattctcaacctttcttcatctttttatcaatctcttgattgatttgctgacaaagttttggtttttattttgttgttgttgttggaagataaatgatggttcatgcttatcgaatttgcaatgtgtgatgacttcggatgcagaagggtatgatcaggtaatttctgtgacttgagaacaataattagaacttaggagctttgaattcttgtaaaccttatgataatccttagacatgttttgtttgccacattccatttgggtggataataggtagaatctggttcgatcttgactggagcatcagtatctgtacaaggtactattgtagctagccagggaacgaagcaaaaagtggaacttaaggtggagaaaatcattgtggtatgtcttttcttcttctactttggatgctgaactttagttccttaagtttgaaagtatgtttctttgaatttttgtcacttattagtctcgttttatcataggttggagagtgtgactcttcctatccgatccagaagaaaagggtcagccgggaattcttgagaaccaaggctcatttacgtcctagaaccaacacttttggggcggtaactttccttttataccttcctgaaattccatactgtatacgactcttgttagcttcttggtgatattatgtattatctcacgcagaaacgtgtctcttgttagaaactgttgtttgtctattttatgtgaacactgcttctactgctcacctttcaggcttcactttagtgaaacttgacggtgaacttactgccttgtgataatcaccaagttctatatttcttaaatatgcaaaatatcttgtttaggtggcaagagttaggaatactctggcatatgctacacacaagttctttcaagaaagtggatttgtctgggtggcaagcccaattatcacagcttcggattgtgaaggagcaggagaacagttctgtgtcactacacttgtaaggaccttagctctctacatctcaacattctgtaataacccattaaaagttctcaactccacatggaagaaagaataacattacacttaaactatactttcaatttttagattcctagctcccatgagaacaccgatacttccattgatgcgattccgaaaacaaagggagggttgatcgattggtctcaggtgtgttccagctccatatattttgtagcttaagaatggtagaatataaccttgcagctgtaacgaatttcatggatgtatcactcctcaggacttttttgggaaaccagcattcttaaccgtctctgggcaacttaatggagaaacttatgcaaccgctctctcagatgtaaaagttgactactcgagtgattgtgaggtagattttggttagtaagtatctgaatctgtcatctgtatgacattgcaggtatacacatttggtcctacatttcgagctgagaattccaacacgtcaaggcacttagccgaattctgggtcagcattattaaatcctccagccaaactcacaattaaatttttcttacctaagtttgattttctgaagacctctctttctgccatataagatgattgaaccagaacttgcttttgccgacctggatgatgacatggcctgtgccactgcctacctccagtacgtagtatgttgctctttcactttatatttcctttcaaactgtaaatgtcatttagaattaatttgattgtaatctatctcttgatattctgataggtaaagtacgttcttgataattgcaaggaagacatggagtttttcgatacatggattgagaaaggaatcattcgccgcttgagtgtatgttcgcctattctcactctgtgatcagaaaagaatactatgcagtttgcactgtctgatattctgattaatttacaatatatcttgtaaaggacgtagctgagaaagagtttctacagctggggtacacagacgccattgaaattcttctgaaagcaaacaaaaaattcgattttccggtaaaggctttattttctcctttcggacagatttgaactgaacttttggactaaatatgcaaacttgcataggcatttctttttctaactgcttttgacctctgagctagtagtctacctgtttgtgtttttgtattttctgtgttaaataaactgtgattatatatctattttgaatgggtaggttctttaaaatgagattatttcatgatcgcatgtgagtagaaacgtcggattggttgcctgatagagctgcatgttgcaggtgaagtgggggctggatctgcagagtgagcatgaaaggtacataacagaagaggcttttgggggtcgacctgtgataataagagactatccgaaggagatcaaagcattctatatgcgggagaacgatgatgggaagacagtggcagcaatggatatgcttgtgcctcgggtaagattaagataatacaaaatcttgttgataatgagaagttgttgatggtgaatgatgatgatgggttttggcctgaaaagataggagagctgataggtggaagccaaagagaggaaaggcttgaggtgttggaagcgaggcttgatgagttgaaactcaacaaagagagctactggtggtacctcgacctccgccgctatggttcaggtctctttcttcttcttttcccttcttctatgaatcaaaagatagaaactttgggaggctgatgaagtaagtccctttgttattgtgtgtgtgtagttcctcatgcaggatttggactagggtttgagagactggtccaatttgtcaccggaattgataatatcagagacgttattcctttcccgcgcacacctgcctctgctgaattctgatactcgaccctctcattgctcaacagttttctcttcatttcctcaaaattcttgtactcttatgtgccattatttatttgacataaacgaaaacctcaaaagaaataattatttgattcatatatagaaatatatttataacagtctctccctttaacaaaaattgacttttttaggtttttattttgtttcatgcagacattgatattttactttcgtatgtacttcattacataaacttatgtaatcaagataaacttcaaaagatattgatagaggatattaaaggggggaaatgtttagtttgaaaggatgatgatgtattatcatactgtgtgaaattgtaacaaaatagttatctacataatattagtaacaaaataaagtatacttatcacaaaatattttgtatataatatttctctcatcataaatcaaagtacatgagattgtgtaatcaataatacttatatgtcacaaaaagaatgacagacacttcttttctataagtttgacaaagggaagaaaagaaacaactctttgtgatcctgcccctttcataattccatggttcaccttcatgagggtttttgagtcaccttggaactgaaaggccaagttctagagcaacaaaacataaatgatcaccacgattaaattagggcactgaatgaggtgaagaaacaaaagatggatgcaaatggcttaatgaatctactataataatttagcttgacaaagcaatgctaccttaaaactagacaataaaatctcgtcttaaataacttctcccaaaactaacttgtcagagatcattattcacagaacccacctttaaaaaaaactgcaaacacatctcacgtgccatcgactccatctggacaaagagcattgtacattactatgttactgtgtgacactcttatgcacagagcacgaactaacttgcagaaaccggcattccagttaaaaaaacaaaagaaggaaatacaatgagcagatgtgatgcaacttgacagtatgtttactaagtttccaatctaagttgtacacgttttcagtgacttaccccacattagttaccccaatccttaatttccctgatttcgtttcaactattggagctatgacaaaggttcgtacttgataaagatgcaagagggtccacatggtaatggtgaaattatgtgcctgcatcaaccaggtactcatagttagacactaaacctcgaaactctaacattcctccacaaactctgttcacttagccgtataagttctctcctacttgttaagacccaaagagataatcttacagcactgagccacactaagtaactaattcaccggacaaaaaaagacattcaggagtactttactttccacttaaccaaataaactagtctcaaaagcaagaaatgtcataaggccaagattccacgcagctaggaagaagcaaaggtatcaaacacatacagcgtttcattgtagcaatcaattagctcctaagatcaatttagccataaatcaaaagcaagcagaaaagagcaaaaattaaaacaaagaaggagagtaaatgcaaatggaggaaagcaaaaaagtgaactcacaagaaaagtaaagagaaaagcattagagatcgggagaggtgcagcagagtgtaccctgagagagagctcggctactccttgaagttgtgcttagacatgacgtcagcctcgccgccgccaccgtgctgtgcagcggtaacagcgactgaacacatcccagctccgaaggacatctaaagagatcgagaaatttgaaatttcagaaacaaaggagatgaaattggctgaatgagtaaacggatgcacagatgcaaacctggagaaggagaaatggcgagtgggttgagaaggaagacgaaatccggctgatgacgcagccgacgtagatccggtggttgatctgagggtagatttgagggaagagacggaagctctgttaaaaagcttacgacaagcagaagccattgttatcaaagagaagaagaaacacgacgatgtgatcgatcgaaagaaaggtttttctactgtctataaggtttttaggcaaacaaatatttcgctccttttgggcttttattggagttggttatatttggtttacattattggttaacttaaccggatgtatagttgtggattagctttagtaccaaatgtatatatatagcaatgtaaagattattctgatcgagttgatgagaaaatcatttcaacaaactttctctaacaaactctctcgttctctcattcgtaatatggtatcagagctatcaagctcagatctccatagattttgatctgatttctttgtttttgagctcaattcgttctctacaatggtaactcgttcgaagtcttgaacgagtttttcagctcggaaaagttcactatccactggtattgtcgtttctatttcgatctcgtgcttctggagcttcgcgagctcacgattcaccggatatttcaaatccgaactagcttttaatggcatttataggattagaaagcttcacttttgggaatgtgtgtagcaattcaatcaaaatcataggatagtttatggtaaaaaacgagcttattcatcttttaattgacttgaaattatcataggaaggtataaagacaagaccaaaagggttcgattgagagaacaaatggaattagagaaatgataatttgggaacaatcaaactactacatgtacaacttcttcttatctctctgagacacatagagtcaccatgactcgtgagagatggagatagagagaacatctaactgactaaattatcaaaagcaaataactcacacctacaataacaacatcactagagattgacccgcggtacactgcgggttgatatatcattagaaagttaacgattttattctaattaatattatattatatatatatataacatattaagagatataccacatgtgtatatttttatcaaaaatgaattttgtctttaagatgatatatagacatatgttacttttttaacgtataatacaccttggggcaattttagaacaaaatttttttaaacttttaagttatatatatatatatatatatatatatatataatattgttactttggtttagtttttaaaattgtataattatattttgattgttaattataggatttcacccataatatataccatcccgtattaatatcaactcaaactcatcccaccatataaccccatcacgtgaaattaaacatcattttgtcattttttctaaagtttaaatatttatggtattgaaattaaaaaaaaaaatatcgatccaaactttataattgcattttgattgttatatataggatttcacccgtagtatattgtcttgtattaatattttttttaataaagtataactttttaaaagttttaaattttttgatatttaacttttaagaaagttaaaatatatataatattttgaaactttaaagattcggttatttaaaatagagaatcagagtaaacaggataacaattttatttttggatgcatgataaatcaaagttccagttcattcttattcaaaattattttgatatttttataataagactctaaaccattgcccaatttcttaagcaatgtgaaactttttcaacttacttttttttttcgtcgattgaataatatatgtctgtttttaaaattttgagttaatgatgcagaaaaaatataatatgttattaactatatatattttatataaaatcaaataaattagatataaaaacaactaaaagtgaaagaaaaaacaaatatttatatttaatgtagataaagaaaatttaagaaattcgtaattaattgaatgtagttcaataatgataagatttaattaaggatataaacttaaacacatattttttagatagattttgtagaggctaaatatgtaatataggaaagagttaatttaagtatttaatgcaaactaacaaactataaatttttagtaatagaatatttggttgagatataatttgtaaggacctaaatgttattagtaaatagttaacggatttttggccaaaaagtctaccaaaaatatatatgtagatttttcttcttctcttcccctactttttttagtctctcccaaccaacaaagagttatttttttcaaaagcatgaaactaaaattacaaacaacctaatagcagccgatactgctctgcttttgtttcctccacttgcgtttatgtgcacttgcttcttctgctccttttcacttgcctgctaacaacatcatcaacagtctcagttatgtatttggtttacgtccaagttatttcacttttggacacttatatacaacaaacatcacctctactgctactttttgctttgacttaggtgacttttgctgtgtgataccgaaggaatcttcgaggtcatcatcgacgtttgcagaccttcgagtagctgcagaacacagatacaggttttaaatgaatcgggcatgaccagaaatcagggaacactatgcaaacttccacacataaatgtaaatcttccatttacttactctagaagttggctggatcctgcggatagatctacgtggctccattccctctgatgtttttgaagaattttcagccaacgccttgtcctcttcgattttggctaaccttcctgcagtaggagccactctccctttattagtgctcaaggaggaactattcttcgaaccagtatcatgagaggatgatgtggtttgctcttctactgttcccttaaatgaaacaccagatccaggacccctgttttctgcactctcatcagattccatatctgatgctgttgtattacgcgagtccttgcggggaattatcctagccgtagcacccggtttctctttgggcttgggcgcaggtttgaaagtcttgggcctagatattgttgtctgtttctctatggagatagttttagaaggcattttccagctacctattccagaattttggggcacaattgatctcacaggcttaactggttccttcctttcctgagttttagtgcttgcctctgaaacatagtgtttgctcacgtccatgaacttccttttctttccaggtttagggacaccaaaaatcacttttgatccttgcttttgcaaaccggttctcttcattcggagtggatcgggtttgttctcctctctggtactctttccaatgttaaaagtattctctgaaacaccgaggttaagaacaccagtctgaggcggtttccccaagtctggatcatcaacaatcttcatactcgtgtcttttacttcagccacaagagcgggagttcctaatctaggacgcttctcctttggagtatcaccctgcaattcaaatttttgagtctcacaaaatgccaaagcatccaaaagagaaccctctagatccataaaagggtgaaaatacctcatgtgacgagctgatagtttctcctgaactagaacattcaatccactttccatctttccacacaagagaaggacgaagattccaagctttgatcgtcaaagtttcttcttccgctgcagaaatatgttttagaaaataagaacgttttgagaacagtggatcagacaagcagtttagagcacaaaaatgaggtatattcatcaggcacattggcctttttacgcaccaggaaaatgcacagtcactgtgttttcatctttcttgttcttctctgtgataacaccctccaaccaactgaagaaaaacaaaacaaatatagatcaaagttccaaacttcgtggaatgaataggatttccaaaacggaaaactgaaattgatatacagattttgtggttttgtctgatccctgttaggggagaccaataaaacagctagttatggagacagtactacctgtcatgcacccacgagtctaccctatccccaattttccaaatatgatccccaagagcagctctacgtctcttcctggttccttcatatggcaaggcagtaacagaacgagcaggtcttattttaggggcctgatcaccttcccctttgagggctacccactccttaagcttgtctgttcctgataaaagataatatcaaacgatcaaccaatcaattaataaagcaatggagcctcttcgtaggagcttcggcaatcagttctgcatccttttaaataattttacatgcatataatataataatggaaaatgggtgattgcataacctatttacttatacttggaagaatttgagcagtaaaagatctattgatgataaataagatttaaagaaaaccattgatgataaatacaaaaaccttgttctacagataggtcactgaacaacacgtaagctttatcatcctctaagctcaatacattggcagagtaccatgcggttcttaatccaggttcttctttgaaaaccttcaaaaaaatttatctccgttaaaaaaaatgacaatcaaccacgagcagttagttatagacagtgtaaatgtagcacaaacctctacattagaaccctccttgatgtcctcattctttgttgctttgatagtctgttgggcgtcaattgaaaattttgacccaacttctggttcaaaaaccacatcattgtttttagccaagtctgcatatttatcaccctcctgtccctttaactttccagtggcaggaactggaccggacacaccatctgccgtattcacagagccaccaaactcagtctgcacaattttgggaccagcaaaagttccctcactagtagacacagtttctttttctaagacaaccgttttacagggctgtacttcctgagattcttgagcctgcctccagtaattacttggacccgcctccaccagcttattgagcaacggaggatgacccattgaaacaagtattccagcttgagaaacagcctctgatgccaattctgctgcttttacaatggagtccatattttcagcacgcttggtggccgctgtagcagcttcaaccctcttcttagatgcctctctcgcagcaataagaaccgaactggagttcaccactgcaccttcacccttcaagatagaagcaggggtaccctgaccgggtaatatgctatcatatgactttgggagtccctgatcagaagcatttggaagggatgcttcttcagccattaacttggcctgcaatgcagcattagctgcaacattggcggcagcagctgcagcttttgccaccgcagctgcagcagctatggcaacagcagccgaagctaatctgtcttgagtttctggctggaggccagcatgactttgttgctctatctgcttccatacatattcgctatgactaacagctgcagtagcaagagcagatgcatcctctgcatgcatcttagcctccttaagtttttcaatagtatcctctgacaagacagatctctgctttacttcacgtacaaggttaccaccaaaaattggagatgggaaagatgattttattttcttcccggggaacgtagataccaggtccatagggactgcagtcatagaaacaacactgggcagggtgccagcattataacccagattagccggagtaggtgtaaaaggcacaagaggtgaggcagctaattctgtctgctttaacgaattcaaaatgtttggaccagactccacagagactggcatcttcttccgtttccttgattttacccttgtagaatgttgagcaggtgctacaactgtactagtaggctcaagtgttggtgtcactttggaaacattgctagaagttccactctgaacatgttttgcgccagaaagagtcatggatgattctttcatgggagtcaattttacagggtcagtgattggatagacggggaaacgggaaccaacatcaaatccactggtttgctgagaagcaagccaagcgttacggaaagggagaggcgacatccaaggggtattatgtccaacaatattctgagttggtggagtttggtgagcatgcgatgcagaaagcaatggctggtgagtagcagctgaacctctctgaacgctacttgattgtaaagtatctacggaagttgataaactccataaaggtgatgagagtggaatcatggggtttgtccctgaactctctttgctattggtgtgacctgctgaaggggtctctgtcttccctggaaatgcagttttgggtatttagatcagctaagccaaccatgagagtttaaaatgcagaataaatcaatgtagaaacctggacgtgattgcagtggcgtttcaggagtagcaacaagcgatttctgagcccttacaacacaagtacgccatgatttctcccagctgcccttcccaccatctaaagaaatgcagattgaacacactgtctcgaatgtggataacaaaatagattaaagaataacaattttacctgcaccaccaaatgcagatatcatataagcttcatccggtgctgttccttggctgtagcaaaaaaacaacaaaagaactccaaatcagatgctctcaagtctcactaactcaacaagacttaagaacaaataaagactaagaaagagcttacatcagagccccgtatacaaaaatctgtgcacgtagttgcacttgttgcaagtccgtgaaaggtcgacgcagaatacttgagagagcagaagagttcaaatccggtagacttgccgtaggggttgaaagggacccaaaagcttttagagcagggctctgaagacttcgctgtttctcagtagattgtgtgatctgaatatgagaagccaaactttgattaacagcatttgttttgcctccactttgaaactgttcaataggtgtagccccttttacactagttccttttctagaagtctcttttcctacagatttagatgttcgcctgggtttccgctcagattttgctttggaagactttgcagctgttttatctaagctagatgttgaaggagatcccaccacaatctgaataaacaaaaacaaatgctatgtaaggacgaaacatactaatgccacagaattcaccttcaacaactgatgaagatatgtaagagatatgtaccggggagacaagggtagcttgtgaaaatataacagctttggaaattttccctgctttcagctgatcaggagttaagttcatttcactgctggaggtctcatttctattcaagaccggagatccagcagacataaaacccgaaatattctgatcttctggctttttgacactgtttgtctctgtgttattaaattgaagttcggaagtcttaacagtggggaaagaatcaagaggagtctttaaattagtagcagcatcttctattgcagttacataagactttacagaagactcagaacatgtagaagcacgggagtctcctagtacgattgcatcacctgcaatatcatcaaggacaagtacatatttcgatgagtgtgagaaattaattgcacggatcgagaaaaagagaagtcgttccaagataaagatctgataaacttagtcatgagttttccaataagtgtatatttttaataaagagcctttttactaaaatattactcagagtgtatactttatcagtaatataactgtattcatacatgatacacctaatataatatgtatctccctagtaaatccattctaaggaaatcagaagaaactgcaagaaagggaagtttcttgctgctacgaagatcatacaggcttacctttggggtgtgtaacaggagtcccagctgccataatcccaccagaagcagcagtattatcctcttcctggccatcttttccagcttcactcccaagaataggcaaggagctagtaataggcatttcatttttgttatccttgtccagaactgacagagtctctgcggagtaagacagcaaaagaaaaaaatgttgctacaacatgaatcaacccatcgaaaggtaaacaaatctggtaaggtctccatggcggggcaatatacaaagaaacaagctagtgcaattactatggcccaaaatagaaaaatcgttaccaggagcttttacagcttctgttactacattctcttcaaaaattaattcctcagactgctgctgcaaaacttgtccaacaccatcagcatctactgcatcctttgacccttcagagcgaggacagccttcaacagagtatgtactttgcttagtaccttcagcacgcttcctagcttcttggtccatctgactccctgaacaacttgcatccacaggtggaacggtttgaccattttcaggttcaccataaaccttcttggtttcagagtaactgccttggtcactgtcatcagaggatgtctttaccatatgtaaatctattgaagatgtgagactgacagcaggtgctccatcttgacttagaggttgtaattcttcgagattgagagaactgtcaatcatagtctctgtggaaaacatttagggggaaacaagtaaattacttgaagtaatcatgatatatacatttacagtggaaaggtgaccccgacagaagcaaaaaaaaaagctgaacaagggctacttagagaacgagaaggcaaaacgtaaaagtacacagtatgaaaatagagtatattaaaaggattagaaaatatgtttacctgacttgtctgttggaatgctgtcagattgagattctgactccgccaactctgaagtagagcctcctgaaacatagccaacagaaccagacacaacgctttcagataggatctgagagttcttgacatcttgatctctatcattggcattgacaggcagttccatgctttgctcgagattagaagtgcgagcactaccttcattgtcactcttcttagacacaccaccttctctagcttcaaccattgagtccatcgttgaaatataaacactctctgaagtttcaaatacgtgtatctgcggatatgtctcagtctctatctgaaaagtagactcatgttcacttgtaataacttccatatgttgatgactaagcaactcgggcttctcaatggaaacactgtttgttatagttgtcaattccccagcaagttccaaagacgcttcaacagctacgctagtatgaacagtgctgacaaggagatcttggcattcggtcccagaaacatcttgtccacctacctcaagagtagagggagcttggtcccctctttctagtactgtgacatcagatagctctatctccttcaaatcaggctttgcagttttgccaatattttcagcttccactttttcaacttcggaagctgagtctatatggctatcagaatgaccttcaaccaaaattgaccgtgcatctgcagttagatcattgcggttataactactttgaatgtggtcgctgataacattttcatcattggaagtctctggaagtaaagtgctctgattattcaactcaccgctacaagtaataatagtctgtacattcccatcgctacaatcatcttccatccttgattctacattggctttctcttctgtttggtcaagaagattatccgtcgtctcagttcctattttaccaagatcagtagtatctatagcctctaccgtcgcggtattagaagtcaagatggaattcttttcctccacagatgcctcttctacagccgttggtgagtcatctttaaccagaacctgctcctgtccatcatctgtctttaccacagaggactctcctggagtatcatccacagaggggttgggttgtaagttcaccgtttcctctttggaaagacttctttcatgggatgtctgaccaggctctactgtttccattgtgcagcctagttcatgagaagtgtcagatttcttgatagtatcctctcttacaataacttcgtcctgtccaactgaattcaaaagcattgcaacagattccgacgaagtagcctcagaccaaacattattgtgcctagaaatggcacaggactccgttgcacctgaactaaacactataccactacttccacgagagaaatcctcaatccagttattatcttcgttaccctcaataccaagaaaagcttcagattcacctaaactatcaaacctcagatgcgtgttgagtgtatcatcaaaatcaaactttggaagagcataaggctgtaaaactggtggaaatttgttgttggcttcaccagctaaatggagattctggttttgaaagtcactgtcatcataatccatgagtttattcctgaaatcagagacatatataaacatcaaacaaccaaaagaaacaaaagcataacacaacaaccgtgaaacatatttaaagaagcgactctggtcattttcttgtcgagtggagtaaaacagtaggaaagcgaaaagtaccgacacaagagtgtatggagacgctacctccctccattcggtgacaagaaaacctggccgtcagacctcaactgttacctaatcgcacgttcatctactactgctccaccaacaacaaaaccatacgcgtcaattataaaatctcttccttctcaaaattcaagggcacacgaaaacctaaaagagtgaactttcttaaaatgataaattgaaacgctagcgaagaagttaaactcaccggaaaattcaaactgacggaggtgacctagggttccggcgaagaaacgaggtttggcgagtgaagcagattgggagagaaatgcccgataaattatattcgctttcctcggcaaatgaaatgagtctggtttaagtaaagcccaaaattaaataaatatttggagagaaaataaagatggatactgatgccgcttaatccatagtgacacgtgtcgaattttctggatcgtgtggctaatattgaacttaaacaaaaagacgcgaaaggttttttacttttaaattaacgtacgttaaaatttagtgtaatttactggctagagttccgttaaaagaaaattaaatgaccaagaggtaaaagaaaacaacttttgtttgacgtgactgtggtaaaagttagaagatttattgttgaaatgactattgactactgattagtgtaatgaagatgattggttggctaaacaaaatggaaagtgtcttaaggataaaattagagaagagacatgtcactcactaactaatagatagaggcttttgtgtgttaggcaattgacggattggacttttggaccatcagatcaaaaggaatccattgggatatttatatgggcttaggcccactttataatttttttctgttaggtttttttggtattttggtttatgaatgatagtatttgtaccatagatggtttggtacggtttcgtattggtattggttcgacttcaagttttaatcaaatgtttatttaacttgaaaacaaaattggatttaaaatcaggtttttctttctgtttgtttagtttggattcgaattcaatattttgaataggaaaaatgaattcataattttaaaaaaaatatagttcattttcagatcgattatttgagtttggacgtttggttcataatatcagtttactgggatggaataattttcaacttttaagcggtagtgggtggaaaaacatttgtcagggatcggtttaatctaggattgagcattccacttcgttgttctatactgcaaattaaattcatgataataaaaaactatccataaaccatatactaaaaatattacttttaaaattcatggggcggagaaagtattataaacaaccatcctctctgcaaatttttatttaatgtcaccactactttggatcacttttctaagatcttaagttttctgtttgttgcaattttattacatgtatatgccaatatctcttacacaccaactccaaacaaagcagcggtggtacatgaattaactcctaatccctattaatattttaggcgtttagcacctcccaaactaaaaaatacaaattgtaaccaaaaaaaatatatatagatataaaagaatacgaccatctatcataattggtgtgagacaacattagtttaaatgcaggatattaacatgacaacagaacactcttatcttcacatattatgaaataccttatccatcattttcatagcattataccaattggttgtctttaatcatcttcgatgtcactaaccctcaaaattcaaaagaaaatgaatagtctaaataattggcggtttgggcggcatccaattgtgacaggccacgtagagtgggaccaacaacttcattacctcgtttggctctttgctatatataaagtcaagcattagtatgcccaaaaccacacaaatagaaataacttgtaatcaaccaaagtcgaaaaacagagttattttgtcggatcaaaatggtgaagattgagataggaagtgtgggtgactcctttagtgtagcatctcttaaggcttacttgtctgaatttatcgcaactcttctctttgtgtttgctggcgttggctctgctcttgcttttgccaagctcacatccgatgcagccttggaccccgctggtcttgtcgctgtcgctgtggctcacgcctttgcccttttcgttggtgtttccatagccgccaacatctccggcggacaccttaaccccgccgtgacactcggtctcgccgtcggtggcaacatcacagtaataaccggtttcttttactggattgctcaatgccttggctccatcgtcgcgtgtctcctcctcgtcttcgttaccaatggcgaggtacacaaaaacattcgtaatttattcaatactatttatttaagtcatgtgttatttctgattatgactgttttgtccaaacgaccgtgactaaaaaatgttatgccggtcttaagatccagtttgattttaaaaggtatatggattaaccgagaatgtgtttatttcccggttatgcagagcgtaccgactcatggagtagcggccggtttaggagctattgaaggagtagtgatggagattgtggtgacctttgctctggtctacacagtctacgccacagcggctgatccaaagaaaggttcactcgggaccattgctccaattgctatcggtttcatcgttggtgccaacatcctcgcagcgggtccctttagcggtggttccatgaacccggccaggtcatttggaccagctgttgtcagtggtgacttctctcagatatggatctactgggtgggtccactagtcggtggtgcacttgctggactcatctacggagacgtcttcatcggatcctacgctccagctcccaccacagaaagctacccttgatcaatcctatagcgttttaatttgcttggcttgctttttgttgtatgaaaatgtttggtcctcgtttcttccaaaaatgaatgattgaatgtggagaaaaagatcaaagttgtactttgtgttggttataaataagaattgtatattttcaaattttatatctctgccttgtactttcttgcatgtgttaatggctaaaaataaccggttttaactgtccaattaaacacttccaaccttttgatattaaaatcacatcacacatgtatataagaaaatatgttttggggaatctttcaaatatatgcttgaaaggttgacaaaaaaatccatagattcaagatatcccaaattgctcaattttttgttttgtggaaaggccaatatttccttatccaaggcctaatactgaaaagggcccattagaatccaattaaaattcataaactcaagctaatacacaaattggtcttattggctggagacactactattgtttaaacaaccgtttaagagtactcaacttaagtgatacaaatagtaatgctagaaagacattttaaaaattcgttatcccgtgaaaccaaaccaaacgatgaaacgacagagtacattaatagaaaaacgaaatggtctctttacgtatggtttattatttgaaggaagctggtcggttgtgggggaatgaatcgtgtgagagccgtccgctcaaaagacaaaatgctcttaaaccaatgcctttgtcgtctctttgtggtttcacaaaccgtcccaccagattaagatattacctgaattcatggacattgttcttaaccataacattatcctctctttctccacacctatataaagaacatggagacgagttcttaaaatttgcaagactcttacggtaaattaaacacttatccagatttttattgtaatctatattattgattagtctgcacgtacttttgggactcgtggtttgaataattctcttttctcatagaaaaagaagaaaaaagattctcttattgtataagttaggtttatgctcttcctcttctcttccacctgagtcaacatcatccttttcatcttcaaaagctttttccttttaaaatcattttctttatatttttctttttctcagttttacagttcatttttttcaagttttaattctgaaactcagagctggttctctgttttgatcacatggttttgttcagaacataactcttgttccaccaggacaataaataccatcttctgatcacacgtcatctttccatattcaagaaaacttcattttccatcggaagattcgtttaggagagaaaatggaaagtggcttttattcagattggaaagatacttcttcttcttcgttctttggatcagagaatatggaggaagagttggaagatggagttcttagagctgaagagcttttctcatcgattcctcaacctcagacacctaaagagccaatggagtttctgtctagatcctggagtctctctacttctgaaatctccaaagcacttgctctcaaacatagacaacaacaagatcagttttgtgttggccagaacagtcctcctgttttgttccctgatgctgctgcagatccactcgtggtacgatccttttatcccttttccaaattccaatgaaaccctttttccaactatttcttagaattatgatgagccttaaaagtcagagacttttcaattgtatatgattgccattgcaccagttcctaacatagttcttgggaattggaatggataataatagtggactcttttcatattttacaactttgggattttgattctaggctgggaagatcatgaactctgttggcacacgtagagcagggacattgtctaaatggtttcaccacaacaaggaacacagcaccagcagtactactaccaatctcaagaagaaagataaagtgcgtgtggagaacgcccacgtgcattctgccgtctctatagcggctctggctgcaggtttagcctctgtgacatctgctagcaattgcaaagggtcaggctccaagatggcactggctttagcctcagccactgaactgttggcctcacactgtgttgagatggctgagcgagccggtgctgaccatgcacgtgttacttccacggttagatcttctgtggatatccacagccccggtgatctcatgactctaacagccgctgctgcaactggtaaggctttgttgcagcttcacaaggctttttcagtttcgttgatatgcatttgatctgactttgtttaaactgacactagctttgagaggagaagcggctctgaaggcgaggcagccaaaggaagcaaggaaaaatgcagctattaccccttttgagagaagtttctctgattctcattggcatgcaaattttcagtatagattggaagaaccaaatcttccatttgaaggcgaactgatgcaatgtgcacgaaatggtaattgtcttctgtcaccgagtctgatcactttaagagttcactggatctgagataagacagagagcttaactcttcttccttgtgctttaacttgcaggagtgcagcgaactaagcgtgtctgtgtctatatcaacaagaagtctcaggtatagcagatttgattagtatctatatataacacataacacaactcagttcacttttgattcaatgcttattatgctacttatgattttgcaggtaatgatcaaactcaaaagcaaacatgttggaggggcattctctaagaaaatcaaatgtaagcatttactaatctttcagtttggataaattacctgaaagacgacactctgaacttgttcttcctttctgaaggcgttgtctatggagtctgcgatgagaaatcagcttggccttacaggaaagagagggaaaattcagaagaagtctacttcggtctgaaaaccggacaaggtcttttggagttcaagtgcaagagcaagattcacaagcagagatgggttgatggggttcagtctcttctccgccaagtaaattgctttgaggctgccaaatgctcgctgggatctctgaatctcactggtcacacgtgatgcaggatcctgtatatatttgattatattcatatatataatatccaaatttttgctgttgtgaggtatttgcaaaacctggcaatgtaacctcagaagacttttggataaaacaaagcaggttgttcaaatgatcacaacaagtgttaggaacattgctatgtacagaaagacatcagaagaatgatgaatctcaattgaactttttatttccaatgattcagtttctatgaagagtcaaaaaattgtagagaagtggtatgtatatttttgtttgagtgagaagttcatatgaagaatcacgtgagagacatgtcagagatattcatatagaccgtattagaatacgacagtcctttgtgtcccataaggcaatactcgcagttcgcagtaagattttatagctttcatgagacactttttctcaaggtcctctgatttctggacaaagctcctcaaattgtctcggtgggaaactctctcaacctgtaaaaactcaaattgagacgcttctgaagaacaatgcaacactcaaaacaaataaactagttgggagatgaatcaccatttgctcaatgataggacctgaatcaagctcctctgtaacaaagtgagttgttgcaccaattagtttcacacctgcatcaaatgcctaccaatacaatctagtaaagtaagagacagggacgaaaacttgagacataaggacgagctaaatataaacctgtttcacgggatttcttcctttgaatgatggcaagaggccatgatggatgttgattacatcttttccataacctttcaagaagttaccggatagtagctgtcaaaggaaacttttccagtaaacatcatccgtcaatataataactaatgctaagaaatatcttttgttaataaagctgttcctgcaaagaagcataaacacaaagcaagaacagtctgaagagaagatttgattcattttggcgcaaacaaagtgtaatgagactattcaagacaaagaaaacgagcctaggatggaacttaaaagctgatatacctgcatgtatctagcgagaactagaaaatcggtacccttaaccaattccaaaatctcctcttctattttattctgatcggttgttggtaaataatgataagagatgccatgcctctggagaaacctcataacatgggtgtttggagctctttcatgattactgaagacaccaaatattccggaatcactagtcataactaatatatccatttagttcgttggaagagatatatgcaaaccttatcacacatgttatatcaacgggaagttttccatcctgccatttatgtaacatttcaaccagacaatgatcctacaatacaaaagaatcacacaactccaggaaaaagaaggcacagaataaaaaggatcttctttatgacataaaatttacctgtttcgacagtagaagagctatcttgtatttggggtctaaagagggcactcgtactactgagctcaaagcactaaacttttgtgcaatagtttgaaaatcttcatccatctgcctcctcggccattttactggatcaaatataaactcactgcccaaagaaattaccttttcatcacaactaaacccaaaaatagaaacttttaactgctccaagcttttagtattcactttaaagacattgattcagaaagaatctattgaagtaacatcaaaggtaagatttttcaaatgggaaaattggaaactttaccttctagagtagaagacgttcttgttctcaggaaccaaaacatcataaccaagaatgttacctcctttagcagcaatacaatctgaaagtttcgctacaatcccaacgacatcctaaacttcaaaaagaaaaactggattcagttagattaggaccaaaagaaattatggggagacatcaatgattattggattcatatacgtaccggacaatggaagacgtggaagccgggaatgagaagaggtgagacagaggaatcgagggactcgccgtgaaattgagaagatttaaaggaccatttggtaaatgatctaaaagctgtggcggagagacatgaggtggtggagactcttcgtatcattgccgctatttcttgtcgcactcttttgaatccgactcatccgtcgttataaacattctcacctttttatcgttagattatgtgtttgttattcacatatcattctgaaattttagagcataaactcaaaactctacaaaatagagtgacttcactgtttacttcgtcgtattaaaaaaagtttattatattttccaaattgagcaggaattgtttttgataaaattctcatttttatacatataataacaacttttctaatgaaattattttatcttcatactctttttccactcctttcaacaaaaatagttaaagatgtatttcattatattatcaaatgggaattgcttaagtaatgttcatttcctaaattatacaccattttatggtcatttacccaaattgcaaaaaaatatctttgagcagccagccatatcctccgaaagcttccaagtttaatttgtacaccacaaaaagataaaagaaccaaaaaagtaacatcttcttttccagatatggtctgtagtctgtgctattttgtaaatatgactccatactagatttgtgtccctcaccaaatcggtctcatcctagaaacataccatttgcacacaaattattcatacagatataaccgtacaatatttgagataggccccatcgacgtcgtttagctcaaagcaagaagggagagagagagtcagcgagcttcgttaatggcggatgttaaggactcagtgattaccaagtacggaatcgtagggattggtatgatgggaagagaacatctcatcaatcttcaccatctccgtgaccaaggcctcgccgtcgtttgcatcgccgatcctcaccctccttcacagctcctggccattgaactcgctcaatcttttggatgggagcttaaggtattttgaatttaccagaacaatcaaccttaggagttaggacttacttagagcggacccttttgctgtgttttctatataatgttctggtgcataattgtttgattcctagtctttgtacttgataaaaaaatttcataccttgattgtggaagagcttaggatttgagatttttttttactttgttgtggttaaggttttctcaggacacgaggagttgctcaagagtgagctgtgtgacgttattgttgtctcttctccaaatatgactcatcatcagattcttatggacattatcaattattcaaaaccgcatcatgttcttgttgagaagcctttatgcaccacagttgcagattgcaaacaggtcttttttctcttcttttctgtttggtaccaaattgatcaattcatccaactttgtctggaatcaggttttggaggctgcaaagaaaaggtcagatatggtggtgcaagttgggttggagtacagatacatgccgccagttgctaagctaatagaacaagtaaaaggcagagactttggtaatgtcaagatggtagcaatccgagaacatagattccctttcttggttaaggtaggcttaaacaagatgggactatgtgtagtgtttacgcttcacatttttatatgattgctgagagaacacatcactaggtgaacaactggaatagattcaatgtgaacactggagggaccttagtggagaaatgctgccacttctttgatctaatgaggctctttgccggtgcaaatcctgtctgtgtgatggcttctggaggcatggatgtgaaccacaaggatgaagtttatggtggaaaggtacatttttatcccaagttacactcaatcaacgtattgcgagtttcatactagatgtttctctgttatataggtgcctgatataattgataacgcatatgttattattgagtttgacaatggatgtcgtgggatgctcgatctttgcatgtttgctgaaggaagcaaaaacgagcaagaaatttctgttactggtgacattggaaaggtgagttcctttgaaatattatgggccatttttgtgtgtgtgtgtgcttatttatgcgcttagtgtgataggattttaggtttgatatgaaaaaaacagagctgggtgttctttcttttttattgacttctctgaaccattcgacgttattcccaagagtacataatttccatttattcccaaatcacatggcatatctacatgctcttgcatatagatggaagatgagcataaagtgttctcaagactatttctttggagttgttcatatgatccatgagttttgagttttgtcaatatgtccttttgctttcttttcaactgacgtggcaagcatgttgcagggggaggcacttgttccagagggtatagttcgatctggcagtcgtattggaggaagagaacacgttcaaacaataaaagcagaagatgaaagaataaagtaagctatatttatctacatatcgtcttacactcttaacaatgtattatagtctcacatcgcatcacacgatgttggtttattcagatatgaagggttgcatcacgggtcaagttacttggaacacctcaccttcttatcagcaatcagaggtgaaggaatagcagctgttgatttggaagacggattgatggctgttgccatgggagttgctgcacagctctccattcaggagcgccgctatgtaaccattgacgaggtcttgtgatttgtgactgtcagataggtaaataaactaaaatagaacctttgtattattaccgttcaaatgtttgccatacaacactgtttattgtaagaagagagtgatcatcaactgttgttataagataagccaataaattgaaatagcaacttatttgtactgcttggcaatggaactggatcaaacagcccctcaatttctctacaatccggataatagaaacagattcaaactctgttgaaccaaaataaccgaaccaaaccaaattttaatttggtaattctctaatttttttgtttttaatgttctttggacaaatataaaatataaaaatgtcgattgaaaattgaattaattaaatcggaaacaaagaattaatccaacaaatgtatatgtttgattttggctggatttcacaaaccaagtaaattgaaccggaaaccctcagcacagtttggtcattgaagccggtttaccaaattaaaatcggcgtggtggagtccaaaccgattgatagaattcacagtggcgcgcttttgccttcattttcggaactcgtgtacctttcactcaattttcaaattctgatctgtggagcgaaaatggaagacgacggaggagagagatcgagtttcgtcgccggcctaattgagaacagagccaaagaggtaggtacggcttctccattgctcggatttggcaggattatgatatgatttgtgttctctttgggtatcgattttgcgacggcgatttctgggatcgatatcgtagcttcaaaatcttgtttctcgcttgatatttcgattgtgatgttggattcgattttggatttctctgttcaggttggaatggctgcttttgacctaagatcggcttcactgcatctatctcagtatatagagacaagcagctcataccaaaacacgaagacgctgttgcgtttctatgatccttctgtgataattgttcctcccaacaaattggcagccgatggcatggttggggtatcggaactggtggatagatgttatagcaccgttaggaaggtgaaattttctgtgccatggcccatggatagtatttctgcacaaattgggaaaattgaatgtatttgtctatagctatagcagaatctattgactgttactatcaattcccttcttgcaggttgtgtttgcccgtggctgttttgatgacaccaaggttgatacaagaacttcttattgtagaaacatccattgatccctgtagtcatgtgtttctaaattgatatgcatttttggttatatgtttcagggtgctgtgctaatacaaaacttggcagcagaagaacctttggcgcttggtttagacacttactataagcagcattatctctcattggctgctgctgctgctacaatcaaatggtgtctaatcccgaactttttgtctcattacattattagttttgtgtttttgaaatactgagttttggtgtgttgtgtcatgactcatgtgcaggatagaggcggaaaagggtgtgatagtcaccaaccactcactgactgtatgtgtttggttatttacaaatctgaattacatggttgtagaagttttatatgcattagtttcaatatttcttgcaaaatgagtcattgtttctttctatttttgggtatttatctgtttcttctttggttcaacctcttctttgctgctgaagggtactaatagtattttttgtggattgtgatgcctatgtctaggtaacttttaatggatcgtttgatcacatgaatatcgatgcaactaggtacgattaccttgatactattcatgtttgtctattaaattatatagaatgttagcatcaaaactgtttatcattctgattcattgtttccttgatttgatgacggtagtgttgagaatctggaactcattgatccattccacaacgcacttttgggcactagcaacaaaaagaggagtttgttccagatgttcaagacaacaaaaacagctggcgggtatctggaagcgcatatgtttgagttgaaattactaattagtctttgtctcttgtgaaaaatattttcttttggcatttttgcaatctaatgataatcttcatagtactgttctttagtcattggcatatttcatttattcttcaactcactagtcattttatttcatgcatgctatgttggtcaggactaggcttcttcgcgcaaacttgttacagcctctgaaagatattgaaactattaacactcgcctggactgcctggttagtaaatctaagatcatattgttttaaggaacttcttaaggcatatcagtttccgttttgtgttaaatatgttgatttacagagcttgattattgggtggctaccagaaattttacatgtatgatgatgcattaatcataaagtttcctcttcttgtaattgcaggatgagttgatgagcaatgaacaactattctttgggctttcacaagttttacgaaaatttccaaaagagactggtaagtaatcaagagaaaagtcgtaatatcttgaacttttctcgttgcatccaatatatattgagcttggttcttctcttaatcacatcatctcaagagattcctgacaatcaaccttaactatcagatcgagttctttgtcatttctgcttcaagccaaagaaagtcactgaagcggtcataggttttgaaaataccagaaagagccaaaacatgatttcaagcattatcttacttaagactgcattggatgctttacctatacttgcaaaggtgtttttctttctcattttgttattagtttttttttgcttgagttagctattatgtctatgacctacctctaaccttaccagcgccatatcctacgtaaaaaatgcaggttctgaaggacgcaaagtgttttcttcttgccaatgtttacaagtcagtgtgtgaaaatgatagatatgcttccatcagaaaaaagtacgccattgtgggtctggctagtagatattaaatatgaacttcgtttctcctataaggtttctagtaattagagtttcaaagtaactagactctctttgtttcagaatcggggaagttattgatgatgatgtcctccatgcacgggttccgtttgttgcccgtacacagcagtgttttgctttaaaagccggaattgatggatttttggatattgcaagaagaaccttctgtgatactagtgaaggcaagaatttgcttcattttttattatcactgctttctccttttaaaatcttgtttgctaatctgcaatcttgttaacactggcagcaatacataatctggccagtaagtatcgtgaggaattcaacttgccaaatttgaaactccctttcaacaacaggcagggattctttttcagaattcctcagaaggaagttcagggaaaacttccgaacaaattcactcaggtcaaaacgcagttcaatttgaaacttaatgttctctatatatatcgtttccctgactttatttttcttgtacgtcgtatgtaatccaggttgtaaaacatgggaaaaacatacattgttcgagtctggaactggcttctgtaagttgaatcatcacaatttcagatgcctcgtttccttggatcattctcttggtgcttaatcatatttagttgttcaggaagtgatatagttcaggattacgttacagctctctataaaaagtttataatgttttgctgcaaatgatattaaatgaacaaacctccctaccaaggttttaatccagcgaagacttgaaacaccatggatctttttgtgcagttgaatgtcaggaataagtctgccgctggagagtgtttcattcgaacggaaacatgcttggaaggttgataattgctctcaactatatgtcgtcacacatattattataattctatcatgcttgtttcgtttatgcctattacacaaaatgttgttcgtatgtatgcagcactaatggatgctataagggaagatatctctgccctcacactcctagcagaagtcttatgtctcctagatatgattgttaattcatttgctcatacaatatccacaaagccagtggatcgatactctagacctgaactaacaggtagctgattctcttactatcattcctcaaacacctaccatcgtatactcagatattccttatctctaaaggcttctacaacaatgaaaatgaacctttaggtgaaataattgatcaacgtttttttgtggaatttacttgtctatatattgtttggcagatagtggcccactggcaattgatgctggaaggcatcccatcctagaaagcatacacaacgactttgttgtaagttgttagtgttatttctcatgatactatcatccctcaatttattcagagaaatcattttggtggcaaagctactaattctcactaacatcagcatccaagaaatttgaagaagtctatatttatgtgttctgcagtttatgctctctcttccacaaaataagccctgtccacggttttttaactcacaaattttctcttttgcagtctaatagtatattcatgtcagaagcaaccaacatgttggtagttatgggtccaaacatgtaagggaactcttgccttacttcttctaatgctgattagttttccagaaaatcctcattgactcatatttgaatttgttgcattccatatctcaaggagcggaaagagcacatatctccaacaggtgtgtctagtagtcattcttgctcagattggttgctatgtcccagctcgctttgcaactataagggtggttgaccgcatatttacaagaatggggacaatggataaccttgagtcgaattccagcacggtaaaactttaaatactcgttcagagattctcccatactagtatatgatcattatcaatatgataatttccaaagatttggcctgttgatgaatcccaacagttatgatcacaaggagagcaatttacatgtggagaagtgatatcacaattctcattccttactttttaatgtcccagtttatgacggagatgagagagaccgctttcataatgcagaatgtcaccaataggtagactttgggaaagcaattgatacaaacgaacctcccctcagtttcataccttttaaacgtctcaaactgtaggagtctgatagtcatggatgaactcgggagggctacttcttcctcagacgggttagcaatggcatggagctgctgcgagtatctcttatcactcaaagcgtaagcatttcacactgagtttttcccactgttgaaaggtactttataagtaactgcatatgtactttttgtggctttcaactttcaggtacacagtatttgcaacccatatggacagtctcgcagagttagcaaccatctacccaaatgtcaaggttcttcatttttatgtagacatcagagataaccgcttagacttcaaggttctgtctgtcttcctttcgtatgagttcgagactttaggtactgctgctgaatgttacattgttctgatcagtttcaactgcgagatggaaccctacatgttccacattatggccttctattagctgaagtggcgggtctgcctagtacagtgatcgatacagctaggatcataaccaaaaggatcacagacaaagtattacccaaaacttaataaatatgctagcatattaagctctattgttctcatttcatgatgttgaacaggaaaataaaagaatagagctaaattgtgggaagcaccacgaaatacatcggatctaccgagttgctcaaaggttgatatgcttgaaatactctagacagacagaagactcaattcgtcaagcactccaaaatctgaatgaaagcttcactgaagaaagactctaaatagtttataacagaggacactaggatacattcacgttttaattgcaatgtctataagggttctacattactagtcccaagtgagctttcgatttgttggctttcagaggctaaaggtaggagcaaatctacactcttgatattaagtagggaaaaattaatcatcaaaaataagtaataactaagaaacattgctttatggtcagaatcaaagaactcaaaacttgaaacaaactcttgaatgtgaaagtcttccatcccaatgtaattccagaattccgaaacacaatccacactgaagatataccagttcgagaaaaaacaaaacataaaactgatcaccggtaacgacggagagagatactgttgttcttcttccaggttgccctgcgggaaggtctgttcttgtggttgttgtgaccctttccacgaagaccacgattcttctttccttcggaggtgagacctctgagttctctgtgcttgtgcacagggttgcagatccagttgatccttggatcatttcggacggcattgtgtgcagggtctacaaggataatctcgtagtacttgtaggtagagtcctgagaaaaccagagaaccaaaccattactcacttgattccatactattaacacatttacaggatggcatagcaactagtaactaaaaacagtgtgatgcatacctcattgagccagtaggagttaacaaccctaaggcctcccagtttgcgaccagcacgttcctcagcaacagatctcttactacgctggaatttgagctgtgtcactccctggttggtgggtttaccgtacacgatacccttaggcactggcctcttgcgtccaccacgtctgactcgaacacggtagacaacaaacccctaatacagagaataaagagaagtcagcaacacagagagtgaataactcatcaaacaaaagtacaatttttttgatccagggcttaaaaaaaatgtatcaatcttagacaggaacagagtccacaaaagataaagagctgttcagtcagaagaatgaatctatgtagctgggttcaggaagtattctatcataaagcgcagacataaatgactacgcatcaagacaccgcttaaccagcaatcaatcgataaggcttgattcaacaacattacctaaacctattaaattgataaccaaaatgaagagaagaagaaaaagacctgcttggccttgtagccgagacgacgagccttgtcgggacgagtgggacgaacaagacgaacaatggaaggctgctggcgatactcccaacacctaaccctctgaagaaacctcatcacatccgactgcttcttcctccatagctccgacacgtatttgtacgcacctgtaatcaaaaatcacatttcatccttaattaacttctagaatctaatgaacaatacagaaacgacatctgagagagagataatagtgagaaacatacccattgcgattttccggcgtcgcagtcacttctttcttcgaattaggtttgtgctttaaatagatggctccatgggaattagggtttccatcagacaaagaaagcccttattgggcctttttccgttagctttatgtattgggccttcgctacaacataaaacatctctaattgaactgtatggcccattataaatttatgtaaaaggagccaaaacgcaagagaattaggtgaagagtcttttggattcggttacgatagttctctattcctcttcaaaccctagagttcgtgtttctgcgatatccatcggtttctccttcatatatccatcaaacgccaaagattctctaattctctctcgagatcgtctgcaatttcaccgtgaatcatcagggataccgcggtggtttcgattctatttcctcgattcgaagcttggagagtttcagcttctgaattgaagccagtgattcaattgtttggagatatctgagcattgtccctgcgatgtattcgattcaatccaacacgggcgttctcgtttcgtttctgagctttgtgggaaattctcgttgatttgatttcgtcttgaagagcgcgtgagaggtttcttctgtcgaattttgttgaagtccaaccagagaagtaaagaatcatattttgtaattactttttgtttttgttttggaaatcaactttctggcctccatttttttggcctgggttaaggtttttttcaaagagagtagattctggtgtgttttaataaattagtaatacagattgtatttttattcattatcagattaattccaatggcaatatattacaagtttaagagtgcgagggattatgataccatctccatggatggtccttttataacagttggtttactcaaagaaaaaatttacgaaactaagcatttgggaagtggtaaagaccttgacattgtcatctctaatgcccaaactaatgaaggtttgtcttcctccttcttatcctattcacctagaagatattgtgcaatgtgttttgttgttatctaggttggattctggtctgattgtgatcagtattcacttatcaaaatatatggttattacttgctttgtcaaaatttccatggtttatggctttcttccgaagtaatcacatttagcactgttaatctggccatggattgttcagtatctaactgcttcagtaaaatggatgttatgtacctggtacttccttgttagttgaataaaaaaaataaaagtgaagttcttgcgtactgtattagcttatatgttaaatgtgattacttctgagactactgttcttgattggttgtggttgtgaatcattagaaagaaacccttaactacgattctctgttggtatagttgcaatatgtggtggccttcatacttatttttttttttgcaatttcagaatatctggatgaagcaatgttaataccaaaaaatacttctgtgctaattcgccgggtccctggacgccctcgcatcagaattattaccagagaagagtaatttctctataactttaatacctaatttctcaactgagttgttcaatctttgtgttctttcgctctaagctgcgcatttcattattagttgtgtgaaattataccagattcccatgtgtcatgatgtaaatgactacattttgcaggccgagagtcgaggataaagtggaaaacgttcaagctgatatgaacaatgttattactgctgatgcatctcccgtgagttggctttctcagtttttattggcatggaatccttctacacaaatattgatttacaacttaatctaccttataggttgaagatgaattcgatgagtttgggaatgatttgtattcaattcctgatgccccagcagtccattctaataacctatgtcatgattctgcaccagctgatgatgaagaaaccaagctaaaggcattaattgacactccagcactagactggcatcagtaagtaatcttcttgaactgatggacattagcatgctaaatgagatcttgacatacattttgcataacattcgtatttttctttcatgttacagacaaggtgcagatagttttggcccgggtagaggttatgggaggggtatggctggaaggatgggtggccgcggttttggtaattatattcctgtatatgattgacttatatgcttcagtctccccaagtatttagctttgagactcggatgttctgttaattattattgtccaaatattttgtttgctctttcattgaaatgtaagatatagagactgattgtatttgtttgagtaggaatggagaggacaacaccgccaccaggctatgtttgccatcggtgcaatgtttctggtatgactgacttagagaatctttatatatttttaatttggttaagtaatgtctcgagtgtgtacggttattaccgagaaatgaatgttctgaacatcattttctgtctcaggacattttattcaacactgctccacaaacggtaatcctaactttgatgttaagagagttaaaccacctactggtatccccaagtcgatgctgatggcaaccccaaatggctcttactccttgccaagtggcgcagtagcagttttaaaaccaaacgagtacgttgtcactaaattaacatggcgagttgtttgttagtaccttcacataaattattagtaatgttgatcacttatgtcaattgacaaatttagggatgcgtttgagaaggaaatggagggattgacatcaacaacacgatcagtcggggaatttcctcctgaattaaaatgcccattgtgtaaagaagtgatgagagatgctgcactggcaagcaaatgctgcctcaagagctactgtgacaagtgttagttctcttgtcaaattgccaatacttctgattccttttgctgttccacaaacgcctttttatgtaatcattatctacaattcaggtattagagatcacatcattgcaaagtcaatgtgtgtttgtggagcaactcatgtcctagctgatgatcttctacctaacaaaaccctaagggatactataaaccggatattggagtctggtaacagtagtgctgagaacgctggcagcatgtgtcaagtccaaggtatttcatactctcattcgcagtcttttatatttgtgtgtaccatcattggtaaactaatgagtattaaatctagatatggagtctgtacggtgtccacctcccaaggctctatctcctactacatctgctgcatctggaggcgaaaagaaaccagctcctagtaacaacaatgagacttcaactctaaagccgtcaatagaaatagcagagatcacaagtgcttgggcgtctgcagaaatagttaaagtggaaaagccagttgatgcatctgcaaacattcaaggatcctcaaatggcaaggaagcagcagtttcacaactgaatacgcagccccccaaggaagaaatgccgcagcaggttgcttctggggagcaaggtaatcactggctattgtcccattagcacgagaaacttatgcatttaaagaagagaaagcatcaccttttacacattatataatatacattgatgtttggcgattagtatcatcagtaaagtaataatgcatacttttgctcttcagcaggaaaaaggaagaagaagaaacctcggatgagtggaaccggtaggtttttcttattttgatgtggactacccatgctctttcttcccagactatgttaactgtatagagaggcttaacagattgtttgtcttccttttcctttgccagatctagcaggccctgactatatgatgcccatgggcccaggtcccggtaatcagtacttcaatggtttccaacccggcttcaacggcgttcaacatgggttcaatggcgttcaacctgggttcaatggctttcatcatggtttcaatgggtttccaggcccttttcctggtgcgatgcctccttttgttggctatggatttggcggtgtgatccatccagatcctttcgctgcacagggctttgggttccctaatataccaccaccttataggtactgagaagctgagacttgctctctcagttcatagatagtttgtgattttgtatcttcattatagctattagtaaccaggacatgtgacttgagcagggaccttgcggagatggggaatcgtatgaatctccagcatcctataatggggagagaagaatttgaagctaagaaaactgagatgaaaagaaagcgtgaaaacgagattcgacgatcggaagggtaaagcactgtctgtgcattcactagtttcaggcttatgtatgtatactgcagcatgttgactagttgtttgtttttgtgtggtacagagggaatgtcgtcagggacagtgaaaagagcagaataatgaacaactcggcagtcacttcctcacccgtgaagccaaaatctgtatgtatcattttgttgtctcagttctctctcgctctctctctctctctctcggccaattggtttggtttgcaagagatgacgttttctcagcaccctctttctctctttttatttctatatttttcgctctctgcatatccttttacgttaaaaagaaaggggttgattccacaattgctaaataggcgtctgctttatagttgatttggtttaggggtaaaactcaaaggagagacatttaagattagaatgaggtagatgtagaaattgaattgacaccataaaatgtattgacttgcgatagaatatatgcataaatgaaatgaattgaaagttatttccacatagtcttctcgttggcagtttggtcacaagtaatgctcgactgatcccataatttttggcctcttcaagacagaaaaatttgtagggaacaaaagactaaagtagaaagtcgtaggaaatgtttttaatttcagggtagtatatcttatcgtacgggttaatatggccctatagacttacatgaagcgtggtcccaaacagaccagttggctttatattgccgaccttataaaatattatttttctaacattatattttacctaaatagttttttttttttttttttttttgacgaaatttttttttacaatattaaatttttgttatctattaaaatgtagatatttgatctactttatttttaaagtaaacgttaaatactgatatcaaaatcatattaaatcaggactatattaaatacgtctttttatattttgaaaccaaaacacgtttgtaatccacgtgtaaggatagtagtggtcactctttatcctccaaaattaagattttactgggaagctataaagtataaacctttgtttgctttctcttttctttgtttcttcgttaaataagctatttagagtaaagtaaaagataaatgggttgggcccaatatatctcttattgggctcaagatttaaatttcttttctgttattttaccaataatggccttgttcttgaataaacagagacaaggacctccgccgccgatttcgtctgattacgaccgtcgcaggcgatcggatagatcgtcaccggagcgtcagtcatctcgaaggttcacctctcctcctcgatcatccagcaggaaatctgagcgtgatcgtcaccatgacctcgattccgaacacgaccgccgccgtgaccgtcccagagagacagatcgcaagcaccgtaagagatccgaaaagtcatcatcggatccaactgtagagatagacgataacaataagtctaacgtgttcactcggataagctttccagaggaatcttctggcaaacaacgaaagacatcaaagtcttctccagcgcctccagagagctcagtcgccccagtttcatcgggtcgtcgtcatcacagtcgaagagaaagagagatggtggaatacgattcaagtgatgatgaagacagacatttcaagaggaagccatcaaggtacaagcgatctccttcggttgcaccttctgacgccggtgatgagcatttccgtcattctaagcgatctaaaggagaaagagcgcgagcttgattcgaagaatgaagaagattcaaatgtgtgcgtaaatgactaaaacgcccttcattatcttcacggagacgaacccatggcctggtactatgacgagaatgccctatgactcagagatggaagatgactagatgttttgttgcatgagttaaagaaaaaagtcatatgtaatcgaatatgtgtaatattaatgggtctttatttctcactatcttcggttttttatttagaaagatttgtatgacttcttatttaattaaataccagccgggtcatctttttgaaataatttgtgatatttgattttaaacttatatgatgttagtatatgttaaaatactggttgaaattgagtacgaattagcctaatattgagtagcatacgtttaagcacttcattcttacatcgtttgagatgcaatttcagatgtacacattggaactcattaatagagaggttttgtcttacaagaatttaacacttgagcatccattttggcacattagatttaacaacaaagttttaaaaattaattaggttgataccaaatgttaaattaggcatttatttgttttcgtgtaagggttttaattgaaacataagacaaatttgtcttttgatatttcaagaatttttttttactctgctgaagctaaggttaagatattgtgctctagcaaagttaatcatgtggaagatgatgaaagttttagggatctcaaaggctatttcgactatatgaatgatttcaagtatctgttcacaataaacatcccagccactgctgccaacatgaatctgagaaaggttaatagcaaaagagaatacaaaaggtgatatgggtgtagtaaatcccatatatagcaaaagaggatacaaatgtgagtgcacctctgtatttcacatttcagtaaggattaaagaggacacaattacaacgtatgcaagaaatatgaataaccctatttgaactaataatcttggattttctctcatatttggggacgtcaccgacctgcaaccaaaaacccttgctgagtctagtacaagaaaccatagttatttataccaagaggagattgtcgattcttaaccttgcaattcgctgcgagagtcgatgaaacggtaaactttggatgaacacgatgcctggtcccgttagagttgctgttactacattatcaccctttttttgacaaaatgtagatgatttgtaagtttgacacaaaaggaccaaccttaatacatattgtttgtaatggataaggaagaaacataacataccccgaaaactgcccgtcttacaggagcagcattgtatttgatttggaaattgatcgacggagtgagagcggcaatgcaagaaacgtcaatggtgagaacttctcccacctccaggtttttctgtacaactttatgaagcaaatggagtaggatcagtttaaaaggcctaaacctaaagagcagtaagttgagataaactttagttgcataccagagccgccagcgataataaaagcaagaccctgaccagaaagcctttgtctcagaaccccctacaacaacgactctctgacttcaagccaaacatatataaaattttcacatagtagcatctacaagaagtaactaggaaaggtataactcttaagttttgaatgaactgtgccaaaagccaatgcaatgtattgttttccttacctcagccccagctgcagcaatgtttcttgctcgatgtctctgatacacagtgtttacgaccttcacatcatggacagaacagagaaatgcatctggctacacaacaacaagaaaaagtcacatcattgaatgaggaggaaaaagctgagagccaagcagctaaagattgacggctctacctggcataagatgtccccaccaaacattgccaaatcaagcttcacggaaagaaacaagccaaaggtcaccaaaacacataagaacgagataaggagatatacttatatcaagcaagatactaaatactacggaaggaaatcatggcaagtaagaaccactaactgggagaatccttgccaaagaaggtgcagcgataccaacaaatccatcgttttgcccagtgttacgaagaactatactactaacactctttcctaaaatccattgtacaactccaacttcttgttcaggggtataagtattatccatctcaatggacccagacatgtagcacattgaacctaaagaaccatatataatcagttaacatatacaatccaacccaacagatcttacaaaacttaatgaggaatcataatatggaaattaccaggcttagcaatgaccttctcttgtggttttaacattatctgtcaaaaaaacaatcaaatgcttgagtatatatgtcaatcacataaacacaaaatgcccagactacaaaataaaatgtcgacctacctgaacaacctgtgcttcaccacccaaaatttggaaaggtgtgatcgtatcttcttgactctgcatcatataaccacttgtgagattcatactcccacagacacattcaagagatcaatttctcacccaggaaatagcttattagcattatcactgaattagatgtaagtacacatcacattactcaacacctacatgagaaaggatcctaaaatactcgcgaagaagtatattcgaacactagccttctcgatagtgacagacaagaatacgaatctaagaggcgagaagagaacgaagatagaagacaaacctgatagacataaggctgaaatggagtagagaaaaacggagcagccatggcggtgaaaaccgcagaaagatcttccaaacaaaaacctccgaatccaaatttccacagaaccaattggattagaaaacctttcacgtcgatgcgagacgatcagatcgcagatccaaataacacactcgaaacactctgagctctctcaaaactccggtcgaaatgttcgcggtggatgtcaccgacgggaacccaacaaaacgacagattaaattcgcttaaatcggcctgaagctgcacgtggaatctgtttacgtggagagatctcattggtcacaaaatacacatcgacgtaaaatttcatttccggtttaatataattacatttcttctcaaccaaccctctttcactagatttatttggtacaaaatttcttattcaatagccggtttaaagacattggtacaacaattacaaatcttgtcgaccactagagacatctacagaactcacaaaacctttactaagcaaccatcccacgcaacctttactcttccattgttgtgtgtgaataatcagaaaggaaccaagtagcttcatctattaataagaaacttagatagtttcccaaataacttaacaacacaaaacaatttaagagcctgttttcatcaccaataacttcaagtggagacagatgacagatctatcatctatctctatccatctctatacaaagaccggcaaaacttaataaaatcactacacattggctcatccaccagatgaatccaatagaaatgcagtctgagttcaactactactacacgcattgtatttcctcatcatctctacactatcagctattgtagaccctggagtaccaacaaaacccagtgaagcacagctacaaacagcttcctctatgtaaagctgcacattggatcctccatgagggtaacaatgggtctgcatcttttttatactatcaagactcatcggaatagacccaaatttctggccgtgactcgctgaatcaagttcatgctctgttcgcgctaagaattcatcttgttcccctataaagtggagcttgaaatttgtagagttcttagacaaatcacccaagtaagttccggtccagttaaattcaggaaggtctgtcattacaaacacattaattagaccaggattcttaacgctcaaagcttccaacttctgatataaacccgtaaaagtgctctcccgatgattcttgaactggccatctagtaatctaagttgtgcacaaagaaacggcgcctttatggtttctgaagcaaatttctttcccgcgatcattatctctcgaacaaaaggaaggaaatcgaccttctcaaccaaagattttatctttggagatttatggatatcgatatacagctctgagcctttgtatggagctgtgaagaggctcccaaatgctagaatagctgcagactcagcttctgtaccatgtccaagagtcttatacacatctcttcgccttctcacgttggacaatttctttttcttcttgagcttctcatcaggctggaacgaatctaatctcccatcagcttctccatttttataagtccaaacagtggttctacaatcttcatccacagcatacaaacatttatctacattaccacgaactccagataacaaatagccacactgtttcagtgactcataagcctgagactgttcagctaaatcatcagtgcatagagtctccaagtcaacaccacactgtagtgatgcaaagtacctaaaatcaatgactcgaacagccgaagaagataccagcgacgaaatgtctacaatatcagccatcgaaacgtacctataaacaccaacatttgtcacccacattgatcaaattactaaaactcattacgaaaaaaaaaagagattttgtacctgtcagtcttaagaagctcaattgaatgattccaaactgagattcgtatctcgctgggactcaaaaccctaaatttaggacaactaccgagagcaacggcgtgatgatccagaatcggaggaataattagggtccgattaagaattcccgccataagaagcgcattcttaaattccgatagctgattactgaatccactgtgaggagcgtaccagagaaacttctgacctagaagagttcgggttagtatctcggatctgcactgagggaattgaacggatccagaaaatgcagagattgagaacaaggacttgggcatctcggagtaagtgatgaagaagacgacgatgaagaacacaacaagtatagaaacggagcaaagaaatatcgcagatttgtcggtttgcttcttcctgtttggccatggacgtgggcttggtctactgggattgaagaagttgttcatgttttttgctctgaggttttagtcgccatcattgcgttgcgtctagttttgctcatgtgtagaagatgccaaaacggtgagtgtcactgttttgggcctaactaatattctctgatgggccttaactaaaataatacgaacttaaacatagttaattttagaaatctttttgtaacataatctatacgaagctatttgcgcgtccacataacattttaaacaagcaatggagattagatatcttgctaattaatatttatgaacttatttttatttttattctttttaaatttttgtaaaataaaataaaaaatatatgaaaataaaagaatatttaaaaatataaaaaatttctaaatattttgtcaccaaaataatattaaaaatatcaaaatgtaaatttctattttattaaatttatacacaaaaataaatttaggtctttggacctaactaataatattctttgatggcctagagaaatcgaattcactagatgatctaatatttgttgatttttagtccaaaatcgaattcactagagaaattaacctatttagcacttacatgaatatattgatcatcattgatagacttaagcagttgtagtcttttaagctttttacgggttcttttttttctcttcttttctttaagatctctttatttatatgtctaaatctaaacgtaattttctggatttattgttaacatatattaatccccatatcagaaggatgataattgatgttgatatatcaggatataaaataattaactaatgatttattttagccaacaaaatataacatacttttaacaaatcgtgatcgaataacaataaattctaaataacactttaaaacactaaaagtcttttgaaatcataaaccaataacaccccatgaataaaaacataattagaaacttacgcatgcatcagcttccgtaaatctcctacatctctctctctcctctctgctttttaccttctagggtttttgatcatctctcaggtgaatacgttttggtataatctcataccaatgtctgcgaattccaagtcggagaggtctgcttctcaatcggcggagacggtggctgtttctaaccgtgtcgtggcgtcacggtcaagtcgtcagccgcgtctctctttctcctcctttgctccctcatcagagcacgataacctgaagaagctgaaatccgatgagatttctcccgcgagagaggaagtgccggtgtcggtgaaggagagagaagaaacggaggaggaggaagcgaagaggacgtggaatcttcgtccgaggaaggcttatggtggttcgaagaaaggaaacggcgtgttcacggcggaggtttgcggtggcggcggaggaggaggttcggaggtgaagaatcagaaatcaggcgcaggaattgagccgaaatcgaacaggcagagaggaatcccggcggaatcacccggattaggcggtggtgaggttgcaaacgagaatcataggctttgggttgctctagctcgagacgagatcgaagaagatttgttcagcatgagtgggaacaggtcatctcgccggccaaggaagagggcaaaagctatgcagaaacatctcgatgtaagtcaccaggtgttcgacgaattgcctcacagagaattcaaaacaatgactacgtttttttagtgtctccattttcttaggcaattcaatgtctgccattgtaggtcattttccctggattgggtctcgttgggatgaatgctgattgcttcagagtagccacttctccggctaaggttagctttgatcagtccacttacttgctcgatgaaagcttggatcaacctgccctttagctacattgatctgtagatagtatgaaatggatgaaagtctagacctttaggtgctattacagattttatgaagtttcattctatgttagctttacgtaacctaatggtactgctgctttaatgatacaaaacccgtaacagcgattgtattccatttgcagtgatgatcgatgcaaaggagtcttttggtgaaggaaaaaggtgaagtcatctccctaattgaaacttatcattttcatggatatatggtaacgttgttatgatattacattgcttgatcttgttgaggtttgtgcttaagtagttggattttgtttctgctttgttgcagggtagataggtatgctggtgatcgagaatccagatacatcacagtagaagctaggaagaagatatctcaagagacatgttcttgtctcatatcaaacttagtagtaactaaactataagtaaatatcggtaaggtcatataattatagatatatataaagagagagagcgagaggggtttgtttttgagttagtaattaagatgcgtctaagtttaatggcagaggaaaacaacataatctatgtttaaaaagggttttttgaaaccatttataactcttattagcacagacaatgatttattaaaccatatataactcttattaacacacatagttagaaagtgtattaagatccatataagtttttttaagtacaataaggtttctaagagaataaaagcaaattaaaaacctgcagataactttgagaagacggctaaaaatagttacagttctgcattaatgtttctaattattccaaaaatgtgaaactaagagtgtagtttttgcttttacgctggtttattaatcacacagttgtttcctctgtatgactgtattttttaaaaaatctgcatacccacttaacaacaacctgcataaagaaaatggctcacagttcatattcatgtgattgcatcttaaggcttgaagtcctaatgtgagaatggagtacctaaaccacaataagctaaatgggctaatattcatgatttcaaatccaaaaggccctagaataccaccagttacgacttctctttcttttttaggaaaatgtgatttcttgtaaattttagtacttaatttgcaagagcatgcttactttgaagaaggtttgttccattaattatgaactcttctcattattactataatgggaatgattatataggggttagagcatataattggttatcttaggccttttgtgtttcattttcatcacatgatgattctagtccacaatcatttgactctcgccatttatgctcttctacagcgaagccaaatggtcagtttgtcggttttaattgtttctttttaagaaaattaaaaaattagttccgactcaaaaacttaatcattattacatgtagttctttgccgaataatcaatgaagagtatcattctcagtgggctcctcttgtttccaaaaagccaattcattcgagaacaactttcaccgattacatcacacacagccacaaaagtatcatatacagtttcaatcttttaatttaaaagagaaaaagtgatatcaaattttaaacgtaattgaatccaaaccaagaacaaaaccgaagatgatcgcatgtccatttatttttttatcatattatgtagcttgtcttttacttagagattaattgttgtgatagaagttaatgattatgtggagtaaattaagtacttttctaaacataacattaggaatgtaagataatgcaatgacgatgatgatgatactaataaattaaatgatgtgattggtaatatatcatgtgccattaattgctttatcgacgtcatacacagtcctcgttgtacttgagatatgtattctttcaacgaccaaccacacacaatggcacaaaaaaacgattccttactctgtcacgcagtggaaaattaggggctaaacctaaattccatgagtgccctccatttctactaaaatatccaaattattttcgaccaatcaaaccataatataatttcacgtctaccagaactaggacctgatagagaattgtgtaatcgacgatggtttttttaatcatcagttaactagaggaagaacatatatattaacaacacataaatagtgacaatctacaaaagtcaataataattacaaaaatgtagaatttttttgttactactaattagaaccataaattcatgggtttagttctattttattttacttttaggatggttcattttaatttggtggccattttaaaatcatgtatataatttctccataaaatggtacatcagaatccataagataaactattagagttcatttttacctcatttttacccagtaattattttaaagcaatcgttagatgggagtattatttaaaggtagttttttttatttatttatttaaaggtagttaaatgagtccgtatgtatatattagtgcacgtgtcattacaaccgaaaaatatcccaaacgatttttggttaaccgatgaatccacatgaccaccacagctcaccgccattagaagaattaaaatatgtaactaggaaaccatatgttttcggagaacatgtttcaaaactattccacttttatgatcaagccaattttcaaatcttatagatccaaaacgaacgaaattgagggaaatattagttggtttcattattcaagatttctgaatggacatattagtaatattagtggcttatcaacctgtccaaggggctgaacctgaagccaattagtaaaaagaactaaattatagcatctgaaactgataagccatctttgaaaatcccaaagagaggaagccacattcttctaatgagagagttggctacttcttcctattttactcaaccaaataaaattatagaagtttgaccattgactgaggacaaccaagagaacataggaatattttgaccaagaatgcacgtgtgggtggacaagagcacacgtgtgcttcgctgtcatgggtggtgtggttctcttaggaatgtgtgcgccacgtcggttccacatgggaggatatatcgcacgagccaacttggtcctttcttcttcttttttttttttttaattacaagcattccttgaagcttcattttgtacaccaactatttctttatttaaaaacatagattcccaaaaccatttctgaataatcatgatgctagaatctcaataattatgcatatgcatgtagcagtaatattcataccatttgatgcgttaaaatcatgtttaataatcaagaatcaaacattttaactatactatatgaaacgtcaaattcaaattacatatcattcgttttattgctaggcctctttcttattcattatgtcgatgtcaatgagtattttctttgaagtgtttaaacattcgcattattacatgtactagagaatatataatattcgactataatggggaagttaggtccaaacatataaagttccccaatgatgacattaacctacagccaatttctgtagagaataattaagctacgcatcaaatatgattatgtaaattgataattattagtcctactataaaagcaaaccatatatatacgcctcaaatgattacaacattagaaaatacgatttgtattattaaagtttttatacgtggatcttaatttactttatacgtaattacgtatattgaatgagactacatgtgttcaaaaaaattcataatcgaagtgtagacaagacctaaaggctaaagtattatgcacaaggacctataatgtcaattagttataaacatccatgattttcttttttttctaccaagtagtgcttgatctttttaaaagagtgattagacgtcatttcttagcttcaaattacattgtttaaagggggttaataggaaccatgctcgagagaaaattggtaaaagctcaatttctcattaataatcttgaaagtttgttacaatgttgtatagacaacaaaccaactaaaccaataataaaccagagattcaccttaattagatgaataaaccgggattataccgagcccttaatcactgctattatatacaagtatagactaagtatatacaagctaataccccccctcaagatggcagtggggcaaagatgttgcacactcccatcttgccaatgagcttatgaaactgagctggatggatagctttggttagaggatctgccacctgttctccagtctccacaaacatggttttaagaaaacctgattcaactgcttcccttgtcttgtaacagtcaagctccacaaacttggtgcgctcatggaacaccgaattgttgacaatgtgcaaagcagctgtattatcacaatagagataggctggaggaatgaatggtaccttgaaatcatcaaaaagtctggaaagccaaatcatctccttagtgccctgtgacatagctcgaaattctgcttctgcagtactcatagagactgtatcttgcttctttgatttccatgagactagataatctccaatgaacatacaataagcagccacacaacgcctagaatcagtacaagaaccaaagtctgaatccgtgtaacctcttaagtcaaacttgtcatctgcagagtagaaaagaccctgtccaactgtgcctttgagataacgaagaaccttatgaacagcactcaaatgaacacttgttggagcatgagaaaactgacacaaagtgttgacagcatatgcaatgtcaggtcttgtaatctgcaaatacatcaactttccaaccaactttcgataagaggtagaatcagtcaaaggaacaccatcttctttattcagcttaacacttggatccaaaggaatcgaagacggtttactaccaagaaaacctgtagtagataacagctccagaatgtacttcctttgacaaattgaaatccctttttctgaacgtgcaatctcaataccaagaaagtacttagctgcacccaaatctctcaacttgaaataagacttcaattctgcagtaaactgtgccactgcatcatcactgttactcacaatcattatatcatccacgtaaaccaaaacacccatcaaaactccattagcatacttgataaacaaagtatgatctgcatttgacttctgaaaacccattccctttagagtgttagacagcttaaggtaccattgccgagaggcttgtttgagtccataaatggacttgtgtaaacgacaaatagcatgaggaggcaaagcttcaccaacaagatctgcataacctgggggaatcttcatatatatctcttcatccaagtctccattcagaaatgcattagaaatatcaagttgatgaactgaccacttcatcttggcagcaagcaacaacatcattctcactgaagtcaacttggcaacaggtgagaaagtctcttcataatccaaaccttcttcttgagtatacccttttgctaccaaacgtgccttgtatctctcaatactaccatctgcattatgtttgatagtgaagacccatttacaaccaatagctttcttattaggaggaagacttaccacactccaggtattagtccttaccatagcaccaatctcctctttcatcgcatcacaccatgccttaaaatctttagcttctgaatatctttgtgggataaccgcatttgtgatattattaataaaggcatggaaaggctcagctatatatgaataagagatataatctgtgatgggatataagatagtactagtattattatagcaatgaaaatcctgcaagtgttttgggggtttcttttggcgtttagacaatggatcgaaaggaaccaaagccttggaggatgacacatcttgatgtggatgtgtatcaatgattgatgtttgctctagaggcaaatcatcggttctagcagggaactgtaatagaggaaagaagtctttgatatcatccttgatagtggatgatatgaaaggaaaaatatcctcatgaaaaatgacatgtcttgaaatagaaacggcatgtgtctctatatctaatagcttataccccttgtaacctaaaggataacctagaaatacacaggctctagctctaggttcaaatttatgtcgctgtttaggagaagttgaactataacacaaacaaccaaatgtctttaaagactcataagcaggaggtatgttcttaagcttctcataaggagacttattattcaaaacaggagtaggtaatctattgataaggaacactgctgttaagacacaatcaccccaaaactctagtggtatattggattgaaataataaggctctagcaacattcaagatgtgttgatgctttctctctaccacagaattttgttcaggagtttcaggacaagaatgatatgcaacaataccatgtgcagcaaataaatcagtgaatttcaattcatgtgcattgtctgatctaacagatttgagtttagtctgatattgagtatgaaccatattaataaaagcaggaaaaacatgcaaaacatctgatttgttctttaacagataaatccaagtagctctactaaaatcatcaactatagttagaaagtatttaaaaccatcattagtagggacagagaaaggtccccaagtatctatatgaactaaatcaaatgcagcagaacacatgttttgtctagattgaaaagataaatgtttttgttttgacaaatgacaaacatgacaaacatgacaaaccggggaatgttctttatttatctttttaactttaagattcaacacatcagacaacaaatcaatcttagaataagcaggatgacctaatctcttatgccatgtaacagaatcaacaacaacagaagaacaaacagaaaactcaggacacatagaagtagtaccttttaaagacacagtatgattattttcattgaaatccagaacataaagattcccaacttgactacctctaccaatcatcaactcctttgtaagttcctgaacaaaacattcatcagatgtaaagctcacttttgttttcaaaaacttagtaagaacactaacactgatcaaattgaatttaaattcaggaatataaagcacattatgtagagagattgcatcagacagttgaatgaatcctatgcctgctatcttgactgtacaatcatttgggagtctaacaaaggtattttctaaggacctaaagtttaagtataggtctctattgtgtgtaacatggtgagtggctcctgaatctattacccaacctctaggagacacagccggttcttgagatacagaagaaataagcatgtcataataggcattggagaatagtgacaagaatgtacctgagatctgtgagatcataggtacggagggacttgcagaaatcgaagcagaagatgtagtcggcatgggtgaggcagatgcaatgtgaagcttagtactaagataagaaatcatagtctggatttgatcagtcgagaactcttcataagaatctgtcttctcatttggtgtctcattcaccggctggagctgagtactagcaagattagtagaaccaatggtctgacctttagtccatttagaacccggtggataaccatgcttcttatagcatttgtctactaagtgaccaagcttgttgcagtaagaacacttaggcttcttgtatgaaccttgagccatattgacttgagaatcaataataggagaagcttgaacttgaaaggcagcagtcggatttgatagagtaggatttccaactagacgctgactctcatcttgatcaagcatattgtatatctcagtcaagcctggtcgtggtttcatgttcaaaatctgccctctaatatgagcaaaattatcattcaatcccataagaaactgaatgattctgctagtctcagcctcttccagcaattccttaacatgctcacaattacacttcctcactgtgagaactctagtgttagccagttgttcccaaagtgtcttcttcttcgtatagtaagtggataaatccagatttccttgtttcagagtgtggatagactgttcaagttgatacttcctcggaagattactcactctgaatcttgagaatagatcattccacatttcagctgcatcctcataatacaagatgctatcataaatctctttactcaccacattcaacaaccaagttttaaccatactattgcatctactccaaatcttgaacatacgatcactaacatcaggtctaggaagagatccatcaacaaagctcaacttattctttgcatctaaactcattcgcatagctatcgaccaattgttgtaattcgttccatcaagaatatgagaaacaatattcagacctggatgatccgatgagtgaaggaagtacggactatgagcattatcgtacgattcaatcgatgcggaatttgattgaaaacgatcgcgattagccataaccttgagagacggaggttcaacgatgtcatcggcgactggatatgaagaaccagctcgagtcttcatcggagaatactcagatgtaggagaagaactccgattctgcgttttcttcttctgtttcaccatggatagagagatcgaagctcaaatgtgttatcggaacttgaatcgaagcttcagaaggtgattctggtcagcttgagctcaaaacaacacaaatccgggatcgattcaacactttaacggtggaaaacgaagaaaaacgaagaaagcaatgagaaatcgatgagaaatcagagaagtaagagcagaaattgctctgataccataataggaaccatgctcgagagagaaaacatggtgaaagctcaatttctcattaataatcttgaaagtttgttacaatgttgtatagacaacaaaccaactaaaccaataataaaccagagattcaccttaattagatgaataaaccgggactataccgaacccttaatcactgctattatatacaagtatagactaaatatatataagctaataggggtcttgaatttctcgtctcaacctaagggggatctacgagcttttgggtctcgaatttcttctaatcaaaaaacgaagtagaaatatatatattcaataacaattttttggttcgttttgtcgtgagtattcaaatccattaacattttcaaatagagcttctaaatagatatttcatgttttcgtttagaacgcataatacactactagtttgaaaaaaaaaatacttactagaaagatgaattattagttcattatatacggcatataattcgaatgtactatgtttaactatttttaatttcgagtacagttagatcattaatgagaaggagttatttcatttgaaatcatgcgtataatgattacaacgaagcgaaaatgatgaaggcgcgtggtaggcaatgataagatgtcggcgcgtgaggaaacaaaataaaacgcacggccgggtcgagtgttttcgggtcccttgttgtcacgtgacatgacccacctgcccatgttctctcttgagcccaaaactatttgagacattttttaatcatctttcggcagttttaatttacttcttcttttttttttttgtcaacaataaagcaaaatgattctgattagcagcactcagaatatatctgattatagaacacgatctgaatacttaaaaattctacaaaattgatgataagggaagtatgatgatctataatagttgaaagtttaagaacatgaaatgaaaatagagaaacagtcagtgaatattggattcatatgtaatacatatgggtgttagtgtaatgatagatcccacatcccacatggatatgattggatcacaacaggtgactggcccacaactttgaatgagctcagattcatgtggattgtgttttgtaccaaccacttgatttagtcctttttttttcttcattatttcaacaattaattgccaactatttcttcgatatctgttctcatccgtgtgtgatcttgactgattgagttgttttttttttctttacaaaggtcacaagttcttgcaccaatgattggaaaaatttgagggttaaataaaaatgaaaagagaaaatgaactgaaatatttactaccacttttaggtggagtaaaaaactaaagatgttcacgtttatttctttacagtagagtaaatattttgtagcataactattagattggcaattattcaacttaccgtaaatactaaataaaattcactctagtaagctcatccaataacatctttattttttttttttgacatggtcaaaaagattagcaagttacaactcttaataataattctattaattttttttttaataaagaactaatgtctatatatctcgaaatgatatcaaattggcgcaataataaaattcctcggatactattaaatcagaagctaaggctgcttatatctaatatatgcaagacataacatgagtcacttcatatatatgtgaaggtatataattaaaacttagaatcattatttagttgattaggcatataatttgatgtacttattgtcgctaaataaatgtcataatggatttgcaccgcatattatagagtttctcttttcctagtccaaatttgcaagaaataaagtagagatggaaaatatgaatttgcattttaaatttactttggattccatacatatatagaagtactttgaggttatggaaaaagatagcaaaagataggacttactatacaatttactaaaatagtaaaagaagaagaaggaaaagataaagaaaaaaaaaaaagagaaaggagaagacaaagagggaacaagttggggatataataattgagtttcaaaagggcattaatagattataattggccaacctgacaacatctcatatcattcacttcctatattaatcctctctttctcttttcatttcccatttcacatctctctctctctataagaaccctagaagaaggtttctcttgtcctccatacacttagcacaactgataaatcttttgaggtaaaatcagctttagatcaaggtttttctagtcatctctactcataaagatcaaagcttttgctattctcattttctaccaagagacaatatcatgatgatgggtaaagaggatttgggtttaagtcttagcttgggatttgcacaaaaccatcctctccagctaaatcttaaacccacttcttcaccaatgtccaatctccagatgtttccatggaaccaaacccttgtttcttcctcaggtaagcttcttcttcaacaaagtcttgataacctttttccacaaggaaacaacacagatcctgaaataaccctttttcatttttcagatcaacaaaagcaacagtttcttaggaaaatcgacgtgaacagcttgccaacaacggtggatttggaagaggagacaggagtttcgtctccaaacagtacgatctcgagcacagtgagtggaaagaggaggagtactgaaagagaaggtacctccggtggtggttgcggagatgaccttgacatcactctagatagatcttcctcacgtggaacctccgatgaagaggaagattacggaggtgagacttgtaggaagaagcttagactatccaaagatcaatccgcagttctcgaagacactttcaaagagcacaatactctcaatcccgttagtcattcatccatctctcggagcgtgaaagtattattgtaaatactctgtttttaacaagggctttattgtaaaactacagaaacagaagctggctttggctaagaagctaggtttaacagcaagacaagtggaagtgtggttccaaaacagaagagcaaggtgagagaactagagtgctcattatttttacatattagttgaccattttgcccctaaagagcaatgttatttacaatacaacccatttttgtgcctaataggacaaagttaaagcagaccgaagtggattgcgagtatttgaaaagatgtgttgagaaattaacggaagagaatcggcggctcgagaaagaggcagcggaactaagagcattaaagctttcaccgcggttgtatggtcagatgagtccaccgaccacacttttgatgtgtccatcgtgtgaacgtgtggccggaccatcctcatctaaccacaaccagcgatctgtctcattgagtccatggctccaaatggcccatgggtcaacctttgatgtgatgcgtcctaggtcttaactttaatgctgcttctatgggttgtgtgtgggtcattgtactttttagattattgactctcagctaatgtatccttaaaagcctttttctacttttaaatttactttaatctaattaaattagttattcttgtcttcttgataacaaacaaatttataataataaaaaaaaaaacaggataaaaaagaacagtttttcttttatttttttttgataaacccagctcttcttaaccaataaccattatacattcttgacataatcatgaagccatcttcattttacgttgacatgatctttgtatatgcgaccaggttaagtgcctcatgagaaaagcataagtttttctattttcaaatttttcgagatctttttcatacccttcttttttcttttacataaaaatgatatctctaatcatctaaatactctaatagtttttttcataaacaaaagttgaaccgtcaggttattgaaatttagacggtttgatatttcttcctacctagacaaatcctaaagggacccaggaattgtagtaagcgagcgagaatcttgattttttagaatgctacaatcttactgggtaataactcttaacagtgtgcaattaatgggccgaatttaccggcccaaattatggtggtggttgtcgtcgtctatttcaccagagaaagtgagaaacacatgcatatttgatcacaccagcaactgaccccattttgtcagtacttggtgaaagtgaaagtactgaaagcaatttcttctcacacaagtgatgaacatcaagctcttgggattatccttgcaatctttgcttacaagtaacgaatgggggtctcaatgaaaccaaactcttcaccttagcaggaaaatatcgaaaaaatgtgttacaacgtaagcaagcaacactgagttatgacttttcttttgccaataaattgaaagtgtggatatacaagtagactacttgcaaaaaatacacttacatgcacaaccaagaacatcattaatttgatcatgtaatgtgatcagaacattacatgatcaaattaatgagatgagaagcatttcaaccaatattaaactgcaactagctacattccgcacgatacaaattaatgagatgacaacatctacgtgatcttctctttaaacaggtaaccaattcagacttgtgatgtcatatggatgggtcatttgcttccttagaggtaagagactgcccatttaacttggcatttctactctgtttcaggaaagttttatacattctcttggaactgtgtcttgttgacctgaaaaatcattccaccacactttctcagatactgttttctgtttcagctatcctgcacactgaaccactaggtcttgctggtatttgttgtacaaagatgtgaattggaaccattaagtttgatgggtcaagaggagttgtttgtttagctttttgtctaaaagcctcatgtccactctctaagcacaactggtattaatagcatgaagaaaagtaaattgaaatgtcatatttttcaagcaacagggtttccgttgtctttgcctttgcctcgggttctttctgacctataggcaaaaaaaaaaaaaaaaaacacacacactcacatgcacaaccaagaatatatcattagtatgctgcattaatcatgtaatgtattcagaagcatttcaaccaatattaaactcaaatcgttcaattagttcttcaattttttccccacctgcaaggccagaagacatgaagaactctgcatgatcacaatttccttatgatttttattgattttttgtatgcacgagaaaggtaagtcttaagcttatacgagatgaagcttatagatgatgatgttacattgatgatataggcccttagattcggacgaggccaatttattaatgggttaaagattgtaatgtctatattgtctcgtgttcagaagagaacaaagactcattctggaggtaaggcacaacgtatttgacaaggtcttcttccgttatttcgatgtgtccgccagggacactaataaacctcacttttccagcatcatccaaggttttcagaccaatccaatcctcagtgtatagctttgtctgcagaaagaatatatgtacagttagttacttagtttagtttagttgagagagatgatttctggttgaccttttgaggaggcaaaacaggtgttgaagatgaagctccatccgggtaatatccgaaccaagaagtttctcttggaaccaatattgtatcattctggaactgtttaggaaatgcaaaaaaaaaaagaaattaatgaaaatattgttcaagacttgtggtgtcatcatctcaaagatcattggtctcagaaagagagagagagggcaaccatgatgagaaccaagttttgcaagctggtgaaacggtctttaaaagtggagtttttctcgccaggtctctcgttgtttagctttggcagatacttggagtgttccaaataattttttatttccttaaaaaccagataacgttttgtcaattcaagtatttcatataattggaaatgattttgaggattatgaaagaaaagagttttagtttaccataggttttttgacataaccacttggagcagtatgatcctgcagagtcattataggtattaatcatggtttaaggttttaaatcatgactagaggaataagagaagactagaaggtttacttgagcaaaatcgctgtaaatcactgcaaaaaacgccttcatgagtatgcaaaatgctgactgtaaacagagaatcccattgttgttgttgttgtgattgtggttgacacaaaaagacagataaatagaaatggaagagaactcacatcacacccctcggggattgcagcgacgccagcatgaggtcctcctaaggagacatagttgatgactggtggagcattatcgcaaaactcgattaggcctctagcgaccaagtttccttgagactctgccactatgttgtaaccttcactcagctctggcatctgtttaattttctcacaagctatgctggcttgttgcctaagcggcatgaataaggaatctttcactccatctcctatttctctacaagttgacacataaacatacagcggcgataaaccattttgcaagatcaagatgagacaagaagaagacaaagaaggagttgtgtcggtacacgcaagttccagggtagccggagtggttgatgaggaactgtgttaagttgctcactttgtcattggagcattcacctccaaaccctgtttcaatcaaatccaataatgtcgattaaaaaaggaaaagagacaaagtcacaaggaggaagaataaggattgttaataaccaaccgtgaaacagaacgaatggaacagagagtgaaaccggaatggagaagaagaagagagacaaagtcacaaggagagcagacctttggaaactcttctccatggagctactcagtgggagagaaccgttaattctttcttaaacacaaaacagagtaattacgtgcgcaagaagtttacgtatgttacagatttatctaatgttttgttctttaatcaatacaaagatggaagaaaactatgtatgaaatatatttactgatctaaaattcttcactcggcaaagactttcaaaagttattgaacggtttacttgtgtaaaaaaacttttaatggcgttttaactaatagaagtatgtatatggtgtatggttgatatagaaattactaacagaggagatataatacctttgtagaagttaaattcaaaggagaagagtaatagatcgatgctagaggtagaggagtttgtattattaagttctcttggaaagttgtgaggtgtatggattagtttcgatcctttatatacacacaaaaggtgaattgttgtgccaatataaatacggtaggctctacagaaattaatgttttacaaaacgtttttccatatgtttgatatgttctcccattctttggaaataataattgatttgaccctaatacctgtcacaaaaatgacagtgatcgggtccaatattaaagaggtcatggaccaacttgcattatgtagagacaacgtgtttcacaactcacccgagatactcgtaaacttgacttctccggcagcatccagctttcagacctatccactcttatctgtatagctttgtctggtgaataatgtacatgatgaaattatttggatttatgattaagaaaaaggagcctctaaagttcttcacttttaaatttgattctaagagagcataacaatgaagtctcaatcatagatgcagtatctccaaatcttcactcatagacgcaggctggttcttgaggtaaggcacgacgtgttttacaacgtcgtcttgcgctattcttaggtgctcgccagggacactgacaaacttaacttttctggcagcatccaatgttttcagaccaatccaatcctcagtatagagctttgtctggataaccaatatcaagttagaaacaagtggttgatgatcaggcaaagaaatgacatggagatgatcaagaaggtttcacctgttgaggagacaaaagaggtgtggaagctccatccgggtaatatccgaaccaagaactttctttaggaatcactactgcatcaccctcaaactgtttaggaaatgaagaaaacaatattaatgaagctacttaacaatgttgctcaagatttaggtggtttaagaaagagaggcaccatgacaaggaccaagttgtgcaagctagtgaaccggtctttaaaagtggtgttcctttcgttaggtctctcgttgttgatctttggcagatacttggagtgttccaggtaatcttttatatcctgaaaaccagtttcatgctttctcagttgaagtattcatctaaatctaataggaaatgatttaaggattacaaagaaaagggtttgagtttacgtactgtaggaatcttgatataaccacttggagcaatatgatcctgtagagtcattagtgatgttgctaatgatgggtagtagtaatgaatgctcaaaggttttgaatcttgattagagaagaagaagagaaaaggtttacttgtacgaagtcggtgtagaccgctgttttcagcaactcgcaaagtgtagacttgaaacagagaacaccaatgttgttgttatcatgatcatgattgtgattaagacacatagtccaatagtaatggaaagagagctcacattacacttgggaatgtcggatatgccagcatgaggacctcctaaagatatatagttgaagaccggaggagcattgtcacaaaactcgattagacctctagctaccaagtttccttgagactgtgcaacaatgttgtagccttgactcaaatccttcatctgtttaactttctcacacgctacactcgcttgttgcgtaagcggcatagtcaccgaatcttgctctccatttcctatttctctacaaagatgagacataacaaaggaggagacaacaattaaacccttttacaagatcagagtgaaacaagaaaaagaaggagttggttcggtacaagcaagatccatgggagctagagaggttgctaaggagctgtacgaagctgctcactccaccattggagcattgatctctaatccctatgtcaagcaatatacataagctagtcgataaaaaaaaggaaagaggaggaagaagaaagattgttaatcaccatgaaacagaatgaatggaaccgagattgaaactggaatgaagaagaagagagtcaaggtcacaaggagagctgatttctggaaactcttctccatggaacaacaacttagaagagaaagagtaccgttgattttttttttgtttacacagaaaaagagtactttgagttttggggaactaccagaaggaagaaagcaataagtttacgtttgatacagatttatctaattttttgtgctttagtcataaaatggaagagaatttattacttggtggttggtgttttgtatctactgatcttactcatctaaatttcttctgtggcataattttctttgtttttttttctttgtcggcattgacttgaaactttaaagaaaggttaaacaaattatttgaaaactttcagaaaattctatacatgtatgtccttgtaaaaataggccaaagaaagattaactgttaaaccagctatttttactttctacattttaaattactaagtataatgacacaaagttaaaaaaattaccagaaatttaaaaaaatctttatcagaaacaataaatgaatttggatttatagtccataaactttgtcaatcttatagtctcatgaaaattcacatacagttttgcattaagtaaggcacaacaaattccacaacctcctcatccgatatactgaggtggtcccctaacacactttcaaacttcacttttccggcagcatccaatgctttcagaccaatccaatcttctctgtacaactttgtctgttgaacaatgtatacatatttagatttccataaaccaaatgatccatgaaacaatttagagaaattcacctgttgagctgacaaaagggtatcgaatccttcatcttcataataaccaaaccatgcagtttctttagggattaacattgtatcgctctcgaactgtttacgaatcaagaattagaaaaacataataatgagctataacatgtttttaatctctgaagttgaaaaaaagaggacaataagataccatgacaagaactaaattgtgtaagttagtgaatcggtctttgaaagtagagtttctttcgtcaggtctctcattgttaagctttggtagatacttggagtgctccaaatactttgaaatttcctgagaaaaacaagccattgtgttaaaaactcgagtcgacttcgaattgattgacttggttaagtaactgacttacaccaggaatcttgatataaccactaggagcaatatgatcctgcatagtcataatgtaatcaaatcatcattaaaaggttttggttgatcttatagagatatagagataagagtgttacttgaacgaagtcagtatagacctctaacttcaacaaagcttcacctatcgcacatattgggccagacttgacacaaaacagaacacacataattaactaaacctttttttgttaattactatgattaagattaaccaaagaaatagtaaaatgaagttatacattacacttagggattttggcaatgccagcatgaggacctcctaaagagatatagtttataacaggaggagcattatcgcagaactcgattagtcctctagcaactaagtttccttgagactctgcaacaatgttgtaaccttgacttaacactttcatcgctttcactttctcacacgctacacttgtttgctttcttagtggcatgaaccatgagtccttttctccatttcctatttctctacatattgaattaaaaaagatccttagaagatactaaaaacacataatcaaaagaagttaggtaagtaatgttttagttggtgattcattacaagcaatagccaggagagccagagaggttggttaggagttgcgtgaagttactaactccaccagaacatttatctccaattcctgttttcttttttttttggataattaatattaactaaattgtgtttgttaattatgaattaaacataaaaatagatgaggaagaagaaaggaaaattgttaattaccgtgaaagagtatgaagggaatagagattgaaaccggaattaaagagaataacacggcggcgaccaccgtggaaaggagaatagaccgccgggaatacttctccattggatattgagagtctcaatcttcgccggaatattcccgtcttttttttttgtctctctctgtctctctacgttatgtgtgagtcaaaaacgttttctctcctatttagcatcaaaagtaaatgggactcaaatttaaaacaagagttgtgtcttcttattcttctgtttttttttgggcaaaagagttgtgtctcttcacttggcatatttataggcgtaattaactaaaccacatacatatgttattttgttatattttgttctacttagatttatttcttttctatatgtcaaaatattgattaaatcttagacctcaattgttatcaaaatttaatatacagtgctggtatagtattttcctattgatctaaaagtattttaaaagaaaaataaataagatagtcaaatatagggacccttaagtatatgtcaagtttttaattttctaagcaagattaatcaccataaattcttagttttagtaatcatattaaataaaaagtatattaagtgattcttaattgcaagcaataaattgctaaagcaaaacatacaatgaaaaacatagaaaaaataacaacagataaatcaaagcatggagaactaagagcgtcaagtgcgtcagccattctcagtgcaaaccctatatggtttggggaaaatttgagaaacaaattggggtttttttgccctagtaactgatttgtggtttctttcttttaataactttaattacgatttgtttttaaaatttattacaaacgataaacagcttgatagctctttcgatatggttatggccttatgggtagaaccggggtaactagatatggaaaatatggagaaatctttagatttttactgccaaagggttgtctgattaaaatgaatccgggaatccgtttttacattcctaaaatgatgagaagaataccaaatcgaatttccgacagaaccaacgcagcactaaggtgacaaaacgagatatataacttactccctttcagcttccatgggcacaccacactctgcaagttttgatgattggttgggttgattcaggaggaagtacattgtcgtcgctggttggtttctcaggggatctcctctctggtaagtcgcactggtttgttttgtagatacacaatctctctgtctgctacatttatgagatgctgctctgatccttcttcatctgacacagaagatgcctctgagtttgattcatcctcatctacataaggaaaatacgaagccattcatgatttgttttgatcacaaaggagttggggtttttttggttataacattctcttagttaggagcttaccggagaattcaaggcgttcgggaagagcactaacagctgtaagctgaatgctttctggcagaagacaattacagaaggaacctgaaactcaaacagaccatgagtaaatatttaggacacaatttgtttgtaacttaacacagagaaaggtttattatatcttttacctactcgggccagccgattaatccatcctggaataggctttcctgttagctgcaagcatacttcttcagtgaaatggttacagttcttggcaatcaaatggtaagtgtcaccatggtactttcttgaaagcttctccatgtatgagcggaaatctgaacgggacatgctggtagttcccagtaaaaccgaccgtctaaagatgaaccctggacagttcctaggttccacctcatataccccacttgttggatactcgtgagctccatagcaatattccaaattatgagctacattgaagttgaacaactgtgtcaaagagagcaatgaataataactaaaataacaggtaaaatctaagttattaaaggatcatagaaagtttccactaaataatcctcagcgtttaacacttttcttggtcctacatctatatccacaaacaatccccttctcaaaagagcctagtattgccaccaaatcattaagacagctatttttctatatccagaaacaatccccttctcaaaagcatactaagtagacaatgttctcttgagtttacagatatacagactcatagaaaggtttctcctttcgtgatctcaatcaagaatcttaaagagaaagagaagaaacataccctcaataccagaatggaaaatgccaatcccaaaccaataaaggtaattgttgacaggcgttagatcatagacattgagataaaccggcgtaagcgcggcttctccactgctctcatccctctcatcacttgaacatgagcttgagctcaatgtaggcacccacattttacacacaatatcccaattcaaagtcacgatcgaaccattcctttcttcctaaacctctgcaacactaaaaaaaaaaaaaactgatggtcatattcatcatataaacaccaaaagtaacaatcaaatgttccataacttagatcaaaataattggaattcaagcaattcgaacataaacaatcaaacatgtatacaacttcttctttggcgactaacgagaacagatccaaggattcgattcacacagtagcaattacacatacaatcaaaaatctaatcctctaaaagaaaaatctatccaatcgctcgaatttcaaatcaggaaagccacgaaacataattgaaattgggcgcgtgcgttttcatgtacaacaatcgagcaagagagatcgagagagacgaggaagacgaaggaaacggagcttacatgagagtcgagcagaatgggattggttgggagagagactgcaaaaatgatcgagaaaagtttatacacggagtttttttctttgaagatttgctttttttttttggttaaaacttaagcatataagtaatgaacaaaacaaataaaagtcaaagctaaatattagttggcaaaaaaaaaatcatatatgtatttacatatttaacacgtatgtactaatataattttcattgattattacacttcaatattcaatttacccccctttactttaaaaaaatatattcaatatactttctctcaaattttttgttagttgatttgttcattttaatttttttatatatactgaataataaaatttatttgaagcctcgtatttggtttcactgaaagaagcgataccatttgagaattatggtgttcacatccgtaaatatagatatgattcggatttctaaaaagataaacaaagaaccaaaattcagttttacacacaagagattattaaagttatctaaataatctattagctgtattaatgacttaacgtaagcagtggtatatagggaaaagttgatttgtggtataaaagtctaagattggatgagagaaactcttaaggatcgacgtataggcgatggtataaaaatcaaaatggaaagcttttaccatgcaaaaagaaccatagcatttttgttttaaagaaagaaaaaaaaaagaaggaaaagagtcatagatattaccatgcaaaaatatggaaattgtaatatatatacgtgattcccatattataagattagagctttttccgccaaactaatttattaattgtaattattgattacaaatttatagatatttcaaaaatgaagtcacaaatgagaaatgaatcaaatgaaacaatctatagaaaacaagatattataaaagtcaattagtcagagtttatacatgcaaaaaaaaaagagtcatggagctttcaaatattaagtcacaaataggatataatcgagactgctaaagatgttacggtaataaatccgagcatattacatgccattgaaaaataatacgttctatgataaaaagtcatttgatcggagcttcgtgttatgtgttctctgttctttccatattgattcgcctttacatgcgatttttgtctcagtagccgctaaataaggtgattggttagaatttagaaatatcaagagttgtattaaaaaacaaataaacgaatgaataaattttgctcgaatgtgaacataaaataagcaaaagatatagcataattccacgtcagcatacaacaagctgacccaaacagaaaaatagaattcaaacaacggtcaattgtggataaccaaacggtgggtgtggagataacggcgataaaagcggcatgctcagaaactccgtcaaatcccagtcatctatcgccgtcaaacctgactcaacattctcgccgccgctaacgtcgtaactctcctccgtctttagcactttctcaaccaccgtcacttcctcctcctcgccgtctctcttccgtttgttgtacaggccacgaccatcttcagcgcgtggattccacttgtcaacttcaagcgggaaattcagaatcgcctttgatcctcgtagtctaaacgcttctttgtcgtaagctctagccgcttcgatcgccgtctcaaacgtcccgagccaaacacgagttccacgacgagtcgggtctcgaatctccgccgcgaatttcccccacggcctcatcctcactcctctgtaatgcctcttctcctctgctgctacaaccggtacgggaagttccggtttaggatttccggttgcgaattgaatccacttggttcggttcggtggtgcgatcttcaacggcggttttcgattggattgaacagtaacgcgaggaggattcgattggaacgtgaaggaatcgttcgattcagatggaatttcagatttcacatcgaaatcaaaaatctccggtttgggagtgacgagatcgattatttccggtttggtttcaaattcagaaaactcgaaaccggtttgatcaaatgacgtgaaatcgttcatccatcgattggtggtggcagtagtaggcaacggagacaattcgtcgaggagatacttcttgatgaggaaaagagctgatacttcgtttggtgtagccattttggaggaaacagagaattgaagaggaagagggatttgatttgacagtggagaagagagagtggaaaggtgtatttataggaaagagtcaagtcaatgagagactctttcaaggcaacatcctcaggattttttaaacttaaaatctaaaattatcaaatgcgggatggtgtatgtacacgcgtgtttcaccggttttacaccgtttgattagattataaacccctcgtcaacggtttgatcgtgtggttcatcaatggcagctggggtaaaaaaacaaaacacaaatattttaattaggctgcgctctaatattgggtttctttggcagatgattagacaagaatttatcgattcatgtttatcaaaatattagtacggtttagtaatagttattataaagtacctttcgtgttaatatttgattaatttactactcgttgtgagaattcttcgcatgcatgcatttgcaatatcaaaatttagcggccgtatcaactcaatgtttggataaacacacgtttttatataaaaacttatgatagttgcaaaatttgatggaagaaaaacactggttttacttcacgtacgtcggatgttatttttgtttttggattaaaaatattttagttatgaagactagattctctttgtcgaatgtcgacgatgttttcgtatggtcgccaacattttgtggacaaagacccatggaattctcgtatagctgcccaaaaacatttaaaaaaaaaaagtccaataatttcaagttcaaccagtaatttgttcatccaatctctacataatctttcgggataaaatatccattatttttgttttatacatctcagaccagaaagctgtttttatttcaatgatcaacactatatatatgttcatttctagctgttatataatcactgaaaactaaagtgttgttaaaatgttgccgaacatagtaaaacattacaccgataaatatacatttttattgtgtctacgggtacaagctacaaaattataagcttatcgcttcatttgtaagtgaatagatattaccttacgtataaaacataaactaaaacgcaaacacacaaaaatgcatgcataattagactatcagaggaatcgtaatattaaagttatagtctcgaaagataagggctgcgtaattagcggaatcgtaatactaattaagttctagtctcaattattctacaataattataaccaaaaatatatattttacaacaacaaaccatgtgaccacttttggctttggttgctgctttcgaacgtgatatatccattttacgtcttcgtacgaatgtgcttacttcatcatagatattgattcatacttgaaactaatttacaaagcctaacacacacatatgcaattttctatcagtatgacaatttatactatatatatgaaacatattgctcaaggcttatcctagatgtaggtttaaatgaatcttctaatatatttttcaaatcaacgttttcacttatttaaaacatttgtaaataatttacatgtctagttcagctctgtgtgtctgtccagtacttatgttcttattacaaatatctttgtttcaagggaaatatcaatgggtattgcccagacgaatccataattaacttctcaataattacagagtattcatgtttactaattcgttcctacaaaaaaaaatgtttgctatattcgttcatgttagctatagtttttcaagtttttctggaaatctaggatgtcaaaaactgaaagaaaaaaatctagtacttaaaaaatcaattattgattgatttcttcttatcattagtctttaatttttatatatatatatataaacatgcattatacatatttaaactgggataatggtaccgttacaccagagttgtgtgttagaaaacagccaaatgccagaatccacaacaaatgaaaacttagagcctagaggtccacatgtttccaaaactaggcttatgttacgtatttgagtttaaactaatttctagactctttgtttaactgagtctagagaggatgtcagttagattctttttatttaaaaaaaagtcagtgaagaagttcgattatgtaaatatcgtaaatgttttttttttacaacaagagacataaattgtaaactacccttaagcctctaaaacgtagttaacgaaattagacgagattagtattaaccactatacaacatgtcctactttcatactatattttctttattaaatttttgttaatatgtgagatttcctgttctaatttagttattattctataaattttctaagaaccaaaagttttcatatgtttaacgttattattctataattaatcatcattttaatttacctttgttaattttttgttctaatttagttattattctataaattttataagaaccaaaagttttcatatgtttaacgttattattctataattaatcatcattttaatttacctttgttaattttttgttctaatttagttattattctataaattttataagaaccaaaagttttcatatgtttaacgttattattctataattaatcatcattttaatttacctttgttaattttttgttaacatgtgtgatcgcggtcatagttcagttaataaaataagaacgaaaagtttgatcgtataatatactagttcatacttaaattgttcttctcgaattccattcaacaaaactattcaataacttccttaatagaatatttattttttggcaattggacataaatagttactctttctgaacagtatactacaattaagttggaatatgtaatttctacgaaggtactataatactattctataaatacttgtgtgtaaaagtaatcaaaatgcatgtatccagtctatttcaaccatatgattgaacacgtgcatttcttacatttatctcacttttatatatatggtgtacagtttcaactttaaaaactgaaaattgtcaaaagtacgaatatttaaagaaaatgtttgaatgcttttttcttttcttctggtaagtatgtttttgtgttttgttaaaatataaaaatgagaattttagaatttaaaaggatatatagttaaattggtaaagatcttaggcgaaatttagaggttgtcagttcgagtgacgtttggaacgaaactaacattacatgctttggtttcgaatctggaggaattacggatttcggcccaaaacctcataatattcaggaaaaaaaaaaaaaggatattttttttttctttcttgaaacaccatttctattaaaagtagttttcttatgcggggaaaatgggatagttttcttaatctttcaacgtaccaacaaacttttaaaagtattctttgttgccagaacaaaagtataccatctttgtcgaagaactcaattgcagtgggaatgcacgtgtggttttgttttcacgtacacagatgtttgtagaaagtttgaaaattcttatggtcaaaagtctcacacgaccggatttggtcaatttcaaagctgatgtgtcatagactcattcactcatatgcttcccctctttcaaatgtataccatttttttttgttaaactcaataaattattaagagaaactcaaactattaagtatgtaaactaatgtcttatatattctaattttttaacgtatctttgttttaacgtatcttttaaactacagattcggatgattacgaaaattaataattatgaatattcaaataaaatggacagtaattcttatataaaaaatccttttgtcaataatctaaccaatgattcactccaaactcatctgacatctctataggcccttattatgattggtatgtccattttggaagtcgtcatgacttatgagcataaaatgaatacatgaatacatgttttgcagtttttttttgcttcttaaacagttgatgtctttaatttgtttcttgtaagtttaagatgttatctatttatataccttgtttcgaaatttgattgtcccattatgtttctgacgtggaattaaaacccaatgagaatggggtcctcctgttagattttccaacaacgataagaatatagaggttgatgtgatttaaaaccaatagaggcagcgcaattgagtaatcatcatcttaccatccttcctcgaagtagtcttcattgcaagttggcaaaagcgagagacccacccattcactttttaacttttagtttagctcgacatgagagaaattatattatgaacaactatctttagtttagctcacatgacggggttttttttttgagaaaagaaaattttgaatttttggtttatcatacaggaactatctttctccggcgggaatttggaagtcattatgcccattaaggagtcataatatatatttgtagttattattgtatctggtgtcaaacaaaaattaatgttagttgtacattgtgagatctaaaacctcgagagatgaagtcttagtaatgtttgaacaaacaataatcacgttttccatcaaattcgagcatttaaagtttatattactacatgccccaagatgataccgtccatctcatccgaaaatatttctgaaattgcgctaagacaacaatgtttgctcaaattcgatcatttaaagtttacaaatctctcatcactcttacaaacttctcacactaaacagaggtacatattttcttataaagacaaaaggttcgaacagctggcttctcaactcgagttgtttgtcagggcctctcttcactaactacaagttggtacttcaaatattggtggctagcttcacgtgatattgtctacaaattaaacccatgaaaaagctgcattaattgttccaagtgaaccctgaggagtgtcaatagtctttgctttagtgtgatcattaaaccaaatctctaaattcctaatttgtactaacatttggaacgtatttcctactcttctccctgctccaactcccaaaaataagattagttagatttctataactaatatacatgtatactcccaaaaacagtaaaaccatattaataaagctaattttgcatagatttatttcggtaaaccggcggttcaagttggggaaaaaaaagacaaacggtctaaagtcatccaaagacaaaaaaccaaagacaagttgagagagacgagaccaatcacaacattgcttcgtagattgcgtgacatcatccttgacggctactttcatttgtgtcttatttggataaaacgcacgtgtttaattcacgaaccttcatagcaataagaaatttccattactttcatattttcaactttttttattacccattacatgcttaaaatattaattcacaagtctttgtcaaaattcaatattttccaggttcatgaaccctttttatctcaatctactctataatatctccctataaattacaacaaaacctctttatttttcattcacaccggacattttgaaatctcaacaagaaccaaaccaaacaacaaaaaaacattcttaataattatctttctgttatgtcgatgacggcggattctcaatctgattatgcttttcttgagtccatacgacgacacttactaggaggaatcggagccgatactcagtgagtcgacagcgagttcggttactcaatcttgtgtaaccggtcagagcattaaaccggtgtacggacgaaaccctagctttagcaaactgtatccttgcttcaccgagagctggggagatttgccgttgaaagaaaacgattctgaggatatgttagtttacggtatcctcaacgacgcctttcacggcggttgggagccgtcttcttcgtcttccgacgaagatcgtagctctttcccgagtgttaagatcgagactccggagagtttcgcggcggtggattctgttccggtcaagaaggagaagacgagtcctgtttcggcggcggtgacggcggcgaagggaaagcattatagaggagtgagacaaaggccgtgggggaaatttgcggcggagattagagacccggcgaagaacggagctagggtttggttaggaacgtttgagacggcggaggacgcggcgttggcttacgacagagctgctttcaggatgcgtggttcccgcgctttgttgaattttccgttgagagttaattcaggagaacccgacccggttcgaatcaagtccaagagatcttctttttcttcttctaacgagaacggagctccgaagaagaggagaacggtggccgccggtggtggaatggataagggattgacggtgaagtgcgaggttgttgaagtggcacgtggcgatcgtttattggttttataattttgatttttctttgttggatgattatatgattcttcaaaaaagaagaacgttaataaaaaaattcgtttattattatatttaaccttccaatcattccatttattagtggaatcaaacttttttctaaagaaaactataacattcgtagaaaacaaatcatattccaattacaagtgggatcatttttgtttaggaaaatgataacatttgtgagaaaattcaattttctgaatttttaatacatagtagaagaagatatgtagacagatacatatgtacaacacatgaaatttttgactttctgaaataaattagtacaatctttgttaatgcttaagcaaaaaacgtcaccacagttttaattagttggttcgttaataactattagtgttttaaaatattattttacaactattttaaaatttatctggtgtattgttgatgttaacattatatttattttagatgtatcagtagacaacccaattattggagaaaaagacagtcaaataactaacaaaaaacaacaactaaatcaaacaaaaactgatataaacatacgaccaaacaggagattctgatagaaagataacagctacaaatagtaaagagatagtcccaagacaaccataaatagtatcttcgactctgtgcttcaaaggagctagagagaatccgctgctgctactcttaccttgtgggagttgctgttcaatatcattcacaaaatcacatcccaatcatatgtttatttatccatctcagtgtgaaatatatgcaattaaaaatgtatcacgatatatatattcagctaaattatcgattaaaatttatatatctatccacttttaaatttcttcaaactctttcatggaggtttaaaagtcaggagatatatttagatatttttcttgcatcatcttcaatatctcaactcaactagaacattgacttaaattaattttattttaatatttgaaagagttttagacgtaaactcgagcttctctcctgtccaccgatgactttgaaaagtctaataactatcttaattagaatgattgctttcaaatagtatgtatataggaagatatataaagatatacctgaataatcttggtaacattagtagctccatatgtttaaacttttgggggatatcatactagctaggaggaagataggtcagaaaatacaattttgagggcatcttcttctaagataattgcaagctgcacatcctcttattggattcatttcttagatatatactttttttttttggaaaagtatagaatgatcttgctattcgttacccttagtcttataggttaatttatgtgtcggtagtttcattttaaagtgtaaaaattaccaatttcaattcaacggctactaaggaaccactcgttgatctcctctaagaaataaacaatataatatcttattttatctttgattttcaatatatttgacatttcagttagttagaatattggtagtgagtactatattgacgataacgatgatgttgccgggaaagcaatgtttaggattttttattgtcattttgatattataattttttttttgagttagttaaagattagggacgaaaaagattaaagatataagacgcttttttatgctaccatcactccgatcaaaaaacaaaaagaactagattataacccgcacatatgtgcaaggttttatattttaagaaatatattgaaatacatttttagtgaaagatattatagtttgtaaattataataagcatagaaaagtatatagtgttatttatgataaaatagataatttttttattaatttatattatttgtattttatttgtattttgcatagtaaatagatttttggatttgtttcgatttgcggaataatatagagatatttagaaaatctgtgtacttttgttagtttgatgtatatataaattgattgtttttgtttaaaatttaatcaattagatgatataatgtaaaatttactctgtggtacactgttggtcgatttttcttgtaactaaaaattcaaattttaagatatagttgttttataaatattgtttatattgtttagtgtttaagattgtataattatgttataattattaactaagatttcactcatagattatcgtcccatattaatatcaactcaaactcgttccaccatataacttcattccgtaaaatgaaaaattattttgttatttttaaatattgttattgtaatatataaaaaatcgagggattgacatgtggtacatcttggattaatatatttaaaaataatttgcgatttataaatttatgatattgtagtatataaaaccgatttttagtgtatacctttcaataagatatagtttttataattaaagtataatagtatttggtttttatatggttaagtaatagtatttggtttattataaactaataaatttgttgattttagttaaaaataaaaaatcaaattaagttatatttgttttgtttattttttaagattgtataactatcatctagtttcttgtaatctaatgttgatcctgaaagaaaaatccataagaatacgcataaatggatagtaatattaggagataaacatcattagaacatgaagtaatttacttatgaatctctatctattgttcgaaagaatcgatattctatattgattgtgaggcaatgtgaatgtatgcataacatttataattataagagatagattgtatgcaaaattagattttaatttggattcaatcttagctttactgaaaaaactaagattatacacttgtagtttgattgttaatttaagagtttcacctgtagtatactatcttgtattaatatcgatctaaacccgtcaattttaggattttccagcttgttaaaaattgaatcacatcatacacattaaaaatctaatatcctattaattattgtagtatataagattataaattttcaatataatatgtatgaaattgaatataaatatttcaaattatgacctgttactcagtagaaagttttcttaaatctattttcacccgttataatattttttcatgtattgaacagtttatattcgtttttaaaaatttaaattatggcatatgcgaaaaaactctaattatttttttataatgatgatattattttttcgcaaaaatagaatcatataaagatgagaagttaactataataattaataaaaaattaatatgataatttagatatcaaatctaatttattaattttaattgtttacttttttggaaattaataatgtatttcgtttttctaattaaattaaattaattgaaatttagatatcaaatcttatatgttgattttgattggttagtgtttttggaaattaaaaatgtatttcgttttttaattaaatttaattaattaaattagtatttgactttttaatccttaaacagataaattaatttactatttaaaattttatttctaatggcatacctatgtaattatttacaaaaagtaagattacatttaaaatgtacttcccaaataatatagtaggataattggatccctatcaccattatttttgtcaactgttaaatttatacttagtcaacccatttttaaattttttaaaccttgtacctttcacattagttgttttataaataaaaagatcaattcaatgctaactatttcgttggtcgggtagcatgcatatagctcacggcctcaataccgaacacgaattcgaataccgactattgcttattggggaggtgctggtctctgaaagacggttttttatccgctcttgtctcgtccatgaagaatatgaccctggccattaacttcgcgttaaacaaacaaaagtgtgatttataacgttgatcaaaagccaaaatgtagtgttacgtcttaatatccacatagttttcacatacctataatcaatattcaatatgagaagttatacatacaaactcatctaaacagaacccgagaaaacaaaattcctaagtttattgatagtgaaagcaaattgttcatataaaatagataagaaattactagagaaaaacactatagaattgatattgtttataaataaaaagaagagatttaataagggcaaggaccaggcccaccatatgtaatggtttgttgatctttcaaataattcaacctaaaacagtagggttttggcgtatcaacaatcatctccagctcactgatgggattgttcttgaaattggcatcaacatatttcatgtctttaaaatacgaggatttacttagatcatttcccttatctggaaactttccgttgcccatcggagcacctccaaccgttagcccgccgtaacggattgtatcagctcccaatcctaagtgtgagaataattccttaggccaatatccaactaacgcaccagaattcattagcatccaatttcccgtaggtccatcctgacaaatatttccaaataacactatgaacttatttgtattatagtttcttaatgatatttcaaatgtaaattaagtatgtaacaatggtcaatggagaatatcaaattataagtacatgataatgatgtgactcgaaaatttcaatattatgattacatcctattttgttatgtaagagtacaaattaattaaacccaaaatcattaatcttagctttcatttaataaattatgtgtcaacaaagagaacaagaaatcattattctgtaaatgcccaaattgtttagtgaatggtaaaactgtaaagtccaagaaaatctcattgttaattttctcaatttctatttcttcagtaccacataatgcacttactactatactataaactttagttaatttaatatgtatatagtatcatatgatttacccgaataatagatagatttgcagctacttgtcgtccaccataagtagatacttggtcaaaaggtttgccaggatacagatctgaaaagtgttgtataaatcctttgcatactgtattataacatcccgttttataaaatccatcgttctattcaaaacaaaagaaagatttcttttatatatattaaatttaatggaaatatatacactatacattatttaatatttttgacataaattttttcacagttttcttaccgaccaataagtcgtgaagtgagtcttgttatcaccgtaaaactttggttctatctaaaagcaaatgaaaaataaaaaattagtggtagccaaagtaggttttacccttcttaaaattttggtttacaggggaaaaaattgacttgttcttgtgatgatgatataccacatattaccgttttaaaatgtaagataaatagtaaatagtattgttttgcccaataaaaaatagtaaatagtatagtaaaaaagtgaatcgtaaaatggcgaaaccggaacaacactcgtaagctaaataaacataaaattgacaacttaccgcccagccaaatataatgcagttgagtccttgaggagcccctttctcaatccaaatattacttcttgtagcttttccactgaacgtcggattatgtatgcttaagactgcactcgcaccatggtatttttcacttgcaaattttgtgtcaagtgttgcatgctataaacaatggggccaaatttgtatatattagaaagaagaagaaaatcagtcatcaattattagttaacagtttcgatattcgaaaatacattaacggcaacttgagcattaagattgttggcgttgttacgaaatttctggatcgggaccatccctctcggacatatagtacttctccttggtgagctcataatctaccaacaaaaagtattaaacaacttagttacgaattcaccaaatacatgaaaaacaaaagtttcgaattgtacctggagtttgtggtgtttcagtaaaggatgttgtagtgagggctgcttgtagaaatcgacacactcgaaaaactgatcatcctttgcatgagttgttgccacaagatagaagaagaagaaaagagacaagatcattgagttttggagatgcatgttgatcactttttcgtcgtatttttgaacttataagatgtactatatttatatatggttctaaaattttatcaatgtggaaaaaatcagatagatgttatttagtatagaaaggaatcctacgtagggaacatgtcaataatgagtacaatcatataattaagtaattcagatttgtttccaaattttggtgtaacgattattagtatgagaaaaataaagcaatgtaaaacatgaacaatggaaactaacaaatgttagagcaagataagctgcttcatttttatgaggaaaatttcaggatacaaattttctcagttgattttttcttcatccattacctttttcattgaagatttttttctttattagtagtattttcataacacattcctttaaatggttaagcatggaaagattgctattactgtaaaagcaaccaaatgtatcatgttgtaaatagttttttttcttccttcaataagtttttttaatagttagtaaatagttttttttttcttgtattaatttttaattagtactttctcacaatcacacatagataactagttatactgggaattattgactctgcttccaaaacgccatgagacaataattcaatacgaatctgattttgtgattcgattcatttgtgttactgatctaggaatgcattctctaaaccatgatcatcaactgtaatttgttcagaacattgaaaaacagaatccgaagatataaaatagtcacaaactcaaaaacaagacttaggagtttcggttatttaaaagaccctcaggttctcttagagatggctatcaggttgaagttgagagagcccggattcttctcgatcatcttctttatcacttttgttgcgtcctgcgaaatttaatatcacccaagatatacatcaaacaaattcaaatgtttaccagtttgtctaaaacaaaaccattgcatattcacaggattcattcaacgttcaggtaaatctacgctccaagaattaagagtttttatagtaccttcaggagggtagctggagaggaagcaccgtgtgaaatcggtcctgcctttcttccatcaagttcatagagctcacctatattatatgatcatgaaagcaggagtgtcataatttagtgtcaattctgaagtgagtttgatttcactattctcattttggtggttgatgtgagaatttgttaccttctacacaagctaaacaaatgaaatgcgtgtctgcgtcttctgaagcctaaagatggataaaagttaataccaatgttaaaacaaccgtaacacctaaacaagttacagatacataagcatcaatgtgaggtgagaacttacaggtgtatcaccagctataacagctacagaatgagcatcttctatttgactgtcattctcgagaaacttggcacgctatcaaaatttccatagaaacattagacgcaaagcaaacactcagaattgtaaattagatagatagataagatagagaaacacctccataggagtcatgttggcagtggatttgaagaatctatccaagaacgatccgtcggcttaaaaatagcaaggagaatgtaacaatcaataagaattcatatcccacgattaaagaagaagcatgaatagagtatgaaaaactcacagagtttgatttcagaggtaatattcccaatagcatgaagaagaccaatggttccacaagcattaccaacagtttgtttcataaagtaaactttatcgctatgcacctaccaaattcatcaacacagaaccaaaataagaactagattacataaacaaaggatccttctgatgtagaacaaataagaaacttaccttttccttaatttccttgtcttgctcgattctctcttcttcactctataaagcaagatcacaaggtatcaaattgaatcaatacacagaatcataaattggggttccattgaaaaatcaaacagaagagaacctttttggtgattgggtaaaggaagagaacagcaagaacaggctttggaaccatctctagaagttcatcgtctaacccatacacatcattgcactctgcttcatcaggggcaagaccaagtccccagagatactgtacatacccgataaggaggaaaaatacataaatgacctagattcttcccgatttcgaaattccggtgatcggaggagtaatttgcggaaatagaagggaaaattggaaaaataggagagtggagcaatacctgattcataacatctgggttagattcaagtggaagccatctcttagatgaagaactctcgcttgcggtcgccatcttaggatctttctcgtcactatcgatcgaattttgcagaagaaatcaaaatccttctataagaaaacaacacttcggctccaagatacgaatccctcaacatccgataattatgcaatggttcctatctattaacgggcctggctcactttaatccttctattaacgggcctgaccctctttaatccttctattaacgggcctgacccactttaatctgtctatccccttcgtatgcaattgttattttcagttgccaacgaatccaagttgtccgattttggtagaaagtaagtcaactagtcaagcattttaaactcatttgatctcaattggttagcacttgtacaatagtcaggtggtgaaattatgccttattgcgtgttatccatgattatcactatcgacaatatgattcgattgtatggtccattgatctataaatgtggattctctaaaccatgattaccaaccgcatattataattcggaaacaagaaaagaagattcagaatgtacaaaaagagaatccgagtaagtcattgactcagaaacaagacttaggagcattgcttctcttaataacagcctcaggcactcttagagatggctgtcacattgaagttgagagaactcggattcttctcgattatcttctttatcactttcgctgcgtcctacgaggataatatcaaagctattcaagtatataccggtttgcatttcctggattctttcaccgttttgataactttaagcttaaagagtgaagggtttatactactttgataattcttaagcttatagagtgaagtgtttatagtacatgcaataaggtagctggagaggaagtaccatgtgaaactggtcctgccctatctccatcaagttcatagagctcacttgcattatatggtaatagagtgtcacagtttagtgccaacttggaagtgagtttcattttggtgttgatatgaattttttttaccatctacacaagctaaacaaatgaaatgcgtgtccacctagtctgaagcctgaagatgggtaaacataaaaaaaccaatgtaacatctaagtgaacaagtcacaaatacattagcatcaacgggaggtgagaagttaccgttgtatcaccagctataatagctaaagaatgagcatatatcttctatttgactgtcgctctcaagaaaccttgctcgctatcaaaatttccatagacacacacattagacacgaagcaaacactctaagaaagatcaaatatataggagaaacaaaagatagagaaacacctctataggagtcatattggcagtggatttgaagaatctattcaggaacgacccctcagctgaaataagaaatcaaaagtgataatcgataaggattaatatctttagattaatgaaaggaacaaatagaaagcctgaatataactcacagagtttgatctcaaaggttatattctcaatagcatgaagaaggccaatggttccacaagcattatccacattttgtttcatgaagtaaactttatcactatgcacctaccaaattcatcaacacagagtatgaacgatacttaactacaaagacaagggttcttttttcatagaacaacccagatgtttatcagagagaagctcatcctttccttgatttcttggttatatacattatatatataaaaaatatgattaattttgcttagaaataatcttcctttaagaaaaaatgaaatatttacatgaaaatcaaccaaaatgaaagaatttttatacattatataaaaaataatatttttgtttcaatgtaggtggacaacttttatcctatgtagtttaaattaactgtgtatgggggtcaaaactataaaatactaggtcattataattattcctaagaaaaaaatatagttgtttttattttattttatagaggtcaattgacccccataatactgcactgcgtatatatgtttttgcattccgaattttgttttacctccgtatcatagagactgaaatatatatcgggtcttgtttacacaaaaaatcttaaaaataaatgaggttaattattatacaatatttaaaatgaagagacgtatccagtagcatatctagaaattgttgttgtaggggtcaaaagttttctttaatatataaaataatatacattatagatattaaaaatattcttaattttgcttagaaataatcttcccataaaaaaatgaaatatttacatgaaagtcaaccaaaatgaaataatttttatacattatataagattaatatttttgtttcaatgtatgtggataatttttatcctatgtagtttaaattaactatgtatggagtcaaaacaatataaaatacttagtcatcatgattattcttaagaaaatatagttgatttttttaattttatagagatcaattgatccccataatactatactgtatatcttttttcgtaggatttagaatggaaaaccttttggaataattcaccaatttacaattcattttatgattttgccatcacaaacgacatcagagtaaatatgactaacgggcccggcccaataattcaagattagttttttttaaggatttctagggtttttactttttagtatattatcttcttctctctctaaccctcagttctgttaagtacttggcttctaacaaacgctgtctgaatcatatttcgattctgatttttcttcatggattcgtatagccaataagttttttcaatattcaaaacaaaaaccccatcaaaataatctccggaccagtttctctttcgattcagtcggaccggaaaaacaatggcgtctgtgaaccctttcgatctcttggacgatgacgcagaggatcccagccagattgttgcgtctaagccattgaaggttgtggctccggttcagactgctaagtctggtaagatgccgactaagccgcctcctccttctcaagctggtaagttttattctagattagagtttggtagattcaatatttagttggatgtgttaggactcatagttttgactacatagtgattattgtcttgtttagttaagtttgacttagtatggtagttgtagatttgggatatgaatctcttagattgctttaataaccagagatgttgttaatttgttgcctttgtagttgatttaatcagatgttacattttctttgatttgagtagtgagggaggcaaggaacgctcctggtggaggtcgtggtgctggacgtggagggagttatggtcgtggtggacgtggtggaaacaatagggattcaaggaacaatgatggtcctgccaatgaaaacggatatggtggaggctacagacgctcagaagaaggagatggagctagacgtggtgggcctgttggtggataccgtggtgatcgccgtggaagctacagcaatggtggtgattcaggtgactctgaaagaccacgcaagaactatgaccgtcacagtagaacagcgtacgggtaagctagctttcttaattgtttgtttagtcttgtactgattgagttctgtctggttttcctaattgtaaactcattgttgagtaggaatgaggataaacgtgatggagctggccgtgcgaattggggaaccactcaggatgatattactccgtaagtattcttgtaaaaactagttcttttctttctagatatgtgttttctgttgtgtttgtgtttgataaattaactcgtgttcttcgaatcactagggtgactgaagaatccacagctgttgtggacaagaatttgactgttgagaagcaagatggtgaaggtgaagcaactgatgcaaagaatgaaacacctgctgagaaagcagaggaaaagcctgaggacaaggtacagtattacttcttgaactcatatctgtttatattaacagcttaagaagaatgtttggttatatctaataccaatttgctgtttgtaggagatgactttggaagagtatgagaaggttttggaggagaagaagaaagctctgcaggcgaccaaggttgaggaaaggaaggttgacactaaagcatttgaggccatgcaacagctctcaagcaaaaagagcaacaacgatgaagtcttcatcaaactggtaagtatcttgatgatcactgtccactttttaacatataaatttttgtctcagtaatcttcattagtatcttgtatttatgattgagtgtgtgcttatcgaaccttgaaatggtattatcagggaacagagaaggacaagcgcattactgagagagaagagaagacaaggaaggtaactagttgacttatggtttctcgtttaattagttaaaaagagaaagtctaagcatttcattcgaattctttctcattgcttgtacacttctgttgtagtcattgagcatcaatgagtttctgaaacctgcggatggaaagagttactacagaccaagaggtggttaccaaggtggaagggaaggacgtggaccaagagaaggaaaccagagggacggtggaagaaacctgagggaaggagggagaaaccagagggacggaggagctgcagcacaggcaccaacaccggccattggggacagtgcacagttccctactttgggtaagtaaggcaatctctccggtttggtccttcagcttctgtctggactcgtttctctgtaatatctcactcggtttggattttgttcttctgattctatttttattgttatactcttccctttagagagctgaaggttttttgttttgcgaacccaattttgggagttttaagttaaatgaggccaaaaaatcaaccattctccttttgttgtttaggtttcaattatatttaggtgggactttttactaaagaagtttattaataatccaagtaccattacaaagaatttaaaagcttttggacacaagtgaaaaattgaaaaaccaaatacaaaagatttaagaagcaacgttgtttagatttcttacatgcaaacgaatgacataatatggttaagtgttaccaaagcgaattaagaggagcagcagcctgattgctggttaacaggttgtcctcggatctggaccgttggtggcttagatcctcctgcaggttggctcgccattctgcaagacagaatccggttaaggctgctggtctacaaatggtctgcaaatgtaataaatatatgagctctgaatacaataatgattggtgagttacctggtcttgattgcagcagtcatggccatgaaagcttcttcgacattggtagcattcttagcacttgtttccaagaatgggatcccaagttcatcagcgaaagcctgtgtagacagaacaaccattacagtaaatccttgagacaagacacaagagtgtcaaagaacctttaactgtgacgaacttctgaagcatattaccttagctgtctcagtggatacaactttctgtgatgtgagatcacacttgttcccaaccagtagcttgttaacattctcacttgcatagcggtcgatttcatttagccattgcttgacgttgttgaagctttctagatctgttacatcataagtcacctgacaaaaatgaaagtttagtttcattaatggatgtcagaaaaagggagataatgtaagtgtgacaacgaacttacaataattccatgagctcctctgtagtaactgctagtaatcgttctgaaacgttcctggcctgccgtatcccactgcataattggtgatagtaataaggagagtgatcatatatatatatatatatatgcacatacaacaatttcaagtgattggcactagtcgagacaacttacaatctggagtttgatggtctttccatcttgttcgactgttcggattttctgcaaaaaacatcatcacaaaattcaaaattaaaacttttctgtttcatgcatgaccaatagataaagtgtaagaagcttacaaagtcgacaccaatggtgctgatgtagctatccaggtaggaatcatcctgcacatacaaacaaattgagacactacttgagaagatcaacaacgacacttaatagagttacttatttgtatgtagcctatttatgtatacaaatatcataagctaggtgattaagagagaaatgaagttacttacagcaaaccttagaagcaagcacgactttccaacaccagaatcaccaatgagcaaaagcttgaacaaatagtcactgcagatcaaaaaaattagaaagaagcataagacacatgtaagtaagagagtataaatcatttttgacatttctccagctatattaagagcttatgacatatttcaaagttgctaaacattgtgaagaagctcatagatttctaaacgccatattcaaaacacaatctcaagcaccataatcaaaatcgactatggattcacgtcacacccgtagaattttcaaactaagagaatcatctgtgtattgaagagaaacaacagatctcaaccaattttattctagatctaatcaaaattccgatcaacgaaacgagactccaatcacgaaattgatcagacagattaacaaagccagcatcaacataaggttaatttcatgaatctccttgtaaaaaaatgatacgaagaaaatctatagagaaactaaattacataacatgttataaatttcaaaatcgatctgaacgattagagaagaagaagaagaagaaggttcttactattcaggattcatgattgatctcggagctggatcgatctaccggaagaaaaataaaataagaagagagattccgccgattaaacagagaaaagagccgtgatcttcgtcggtgatgagagactgagagagagagagacgtaacacgatcggtttgttgtgtcgacgacgtggttaagaaatgagaaagggccacactacaactattgtttttaaatgcttcttttttttggttgcattgctgacgtgtcttcgccaacccagaagatgcgtggacgagaaagtttcaatacgatacaacaaaaagaaaaagaaaaaagaattgtatttacataatgggcctaatgaaaaaacttatcactaaggcccattaaacattttctcatcgaccagggaacagagaacgctgaatcatcttcttcttctctttcattttccgagtctctatctcttgctttatcaacagttcggtaactacgacaaagaaaaacaggcgggaaaccaaatcaatggaggattcttagctttttctctgtaactcccattatcgtatcttcagcttagtgagatagatggaggaaattggcggcggaagcatcagcagcaatggtgtggtgatgaagaaggaaggattagggttttctaaaaggggaattaaaatagagaatccttttgcttttaaggctcttcaagtcttcactggatttggcgttggttgtggagttggtattggtagtggtgcacctttgaatctcggtatatactctctttttccttttgctccgtttttgaggtgtgaaggagtgtgtaattaagaaatctggtgagattgattgtaatcaatcagctcaaattaacctgattttgaaagtttgatttttgattctcagtgtattgctgccactgatgattttatggtctgttcaaattaagaagttttattgtttgttgaagactatgtttcaatcagagttcttggaaatgaaactagtgttaagctatcactcatagttgaaaatcgtgtgtcatttactttgctaattggtttgctttcacagcatcatgattgtgagatcactaatctggtattgatgttgttgttattgacatatcaggtagtattccaatggtgggggaaattatgaattcagctagaggagcaaccaatgtattttcgggtgccacacaccacgtgaatggcgctgtacagtatagacaaacttgttcctgctcttttttagatcttcctgcattatgttattctgaatctggttgtgtacttgcgccatctatagttgcggaagcttggagcgaggaacattcaagcaggtgttggctgtggagttggctttggtcatggtttcggagttggtatgtttccgttctaagtaaaacttcttgtttcgattttgttctaaacgctcttcaattttgatacatggcttgtttctgaacagttgagttacttggatttgttggttgtataagcatcccttgagttacttatttgaactatcgctctcttattgtcattaactcatatccatcattgacaggcattgcagtgaaaccaagtgccatacacaaacttcaagcttctattatggtaagcaccagtctttcaaagagtgtccttattaatttcattcacataaaaccatgagtatgaatcttttctagggaactgcatccaacttgatgactaaacttggaagaacgagtgagaccacctcaagtcaaactgagactgaagaccaggtgtctcaatctgtaaccggtcacaagaaacatgtggacacaaaagcatctttgaagaacagtggttcctctactaattcaagaacgtttggtactcgaactgagaaagtgatcaacagttttctcgacaaccctattctgaaacaccaggacacaactgcggaagaacgacaggtaataattctatcacagaatgtttccccctctctgctttgatctcagaaagccatccttgaacttccttttgtttcatgacattgataggtcacacaactagaatcggagagcttaatgcttcaaatggtatcgtctccttcttgacttccagtttctttcttttttctgttacagtttatcagatttagtagtccatggttatgtatacacgaaattgattgtgtaggtgctgaaacatcagaaactcattgatgaagtaatggaagagaacgaaaagcttcgaaggataatcatagaagatctcaaagtttcacccgaaaaactgaaattagtttcctcttacaattacgaaacaccaccatgcaaagattgctttgagtgtcgtagaaaacagagaagaaatagaggaagaaagctgtaagccaattccttcatttgttatgagataaagaaatttttcacaatatcagacaaaacacagaatacaaagaactgtaagttcctctgcaaactcataattatataacagaacaaaactcttgcgcaaacaatggtttctgttcacactgcctctctcgctgctcccttctccatcatcttctatcggttaacagtggttcagaagcaggaactgcaaagcaaacaaagataaagtcagatcattgtttctgcaattgagattactgtgattagtagaaggaaactcaagagatttggttatttaccttcttcatcaacatatccaagtttctctctaatttcagcaataaccagacgggtcaaaagcaaaccagcacagagagctccaacgaccaacatatagaacacagcttgccaacccagagtagaaagaaaccctgtcaaaagcggacctaaagccgcaccggcagatccagtcccgtcaatgatagcagtaacagtcgcaagcgcccttgaatcgccttgtaaagacttgtgcgttcccagatccgcagagactgcggttgtgatgagtgcataaggaccattgacaaacaaaccagcaaccatcatgaggaggatgttgactgtctgagagacacctccataggaatggtacacaagcattgccggaatcgcagcgtacatgaatgcagctgcagttgtagcccttgctttgaatttgtctgaaatgtaaccacaaagaatccctcctacaatgcctccaacatcaaatagtgtggagagattccctgctgttttcacagacacgtactctccaccaatagctgcaaataagagcaagtaagaacatggtctaaatctggttttactagcagaaaatgacaatcaaaacttacttgtttggctcaagtaaaacggtaaccagtacaagaacgtgtacgcgaccagcttcgagaaaaagagacacaacgcaaacggtataacaccagggatcatacaagcttgcaaaagtccaacacttcttttattctcataccctgaacctgaccctgatgatccctccccatccccttcaacatctgtccctaaatcttcttctacttcctcttcttcctcttcaacatctctcttcctcttaataaacttccctgaattagaattgatatctggaaacccaacatcctcaggatacgcagccaagaacaaataaacaagaactcctcctaaagacatgacaaaaccaggagctataaaagaccatccccaaccatattcaagaacaccagcagcaattaaagaaccacaaatgttcccaacagaagtatgagcattccaaatccccattataagacctctcttccttttcccaaaccaattcccaacaacagccacaacagatggccatcctgtcgcctgaaacaacccagccgccatttgcataaccaaaaagaaccaaaacgcatgaatgttccagaaataacccataccaaacaacccaacaaagaacccactcccaatcattccccaagtcagaaacaatctcagatccaaactatcacccaaatgaccagcaacatacattcctatagagtaacaagcaagaaacgccacatcaatctctcccaacctagacgtcccatctttcccattaaacggttcccatcctttagacttacgatgcaacaaaacctcatctatatcaccaatttctctcttcacaaacacgttacccataggccaaggataaattttgtcgctgttatgttcttgaggtggcttagtgcttgagtctgggtgtaaaacgctcttcactatgctgcttggtttacgagaagcatggtaacaagcatatgcgatgaaagtaataaacaaaatcgcgtaccgaaacgtctttggactccaatttcttcctctgactctcctcagaagcgcaatcccaggtggtgttttcctcttcgaattcatcgccatctctcacaacaaaacaaaattttcaatgataacaaaaaaaaaaaagaatcaacctttacggatcaaaatgaaatacccaaatccatttgttttagtgtttgataaatcagaatcacgaattaatttgattgagagagagcgattagagagaagagaccaaagggagagagatattggcgggagagagagagagacagagagagatagaacacgacataaactgtgaagacgcgacacgtgtcctatttgttacggtagagccaaaaggcagaacaacagttgtcatgccacggtgaccactttggtacgcatgaagcgacggcccacacgaccgacgtggtggtgggcccaaattataggtttatgtaatcataataagactgtgtcattagccgactcttttattgatatttttataaatcatagtactatctatttatattaatattgatatactaaaggcccacaataacaaacggcccataaagaaaattcacacgtgcgatggcatacgtgtgccaaaataggaagcgaaaagcagataaggctcttttccactgtcttccctccattttctccgagtaactgagagtttgctgcagctatggcgatgagctttcatcgtcttcctcaggtttaaatatacgaaagcttatgaaatctctattttcacttaattcattattgttgattatttgtttctatgggatttttaggcattgcatatgatacccagaaaccctacgcaatcatcgaagaatttagggttttcttcgtttctatcgtgtgcaccatcgatggattctcgtatatcagtttctaggctttctctgaatcatcccggctcgaaatttgggttctcactcgatactagggtgagaaatgagtttatcgttagagcagaagaaggtaacacagaagctgaatctgaagaatttgttgctgaaatcgctgatacggaaggaaatgtagaggaagtggtcgaagctaaacctacaagaaaacctaggatcaagctcggagatgtcatgggggttagtgaacttctttgtttatcagtaatccaaattatgagtgtttagcaattaggaatcagtaagtctctgtgtacacatttgtgttgagggacttgctttttctatagttatcttataggcaatgttgagggagattgaatgttattatctgttgattgttgtagatactgaaccagaaagcaattgaggtagcagagaaagtgagacctgttccagaaatcaggacaggagatattgtagaaatcaaattggtaagttgttgatatttttgaagcctcttaagttatggattgaatcgatgtttttgattattggtgggatatggtgtttggcttggcaggaagttcctgagaacaaacgtaggctatctatctacaaaggcatagtgatgtcgagacaaaatgcaggcatacacactaccattcgtattcggagaattattgcgggtatcggtgttgaaattgtgtttcccatgtgagttttttcccctctccagtgaccatttggtatgacctactttgattatgagtcttttcacatgttctgagcttttcaataaaaccaagtttatacatagatactgagttatactttgtgttaccttacataaagtccctgtataatagttagactctgtgcagaggttttactgtaataagtctttagttgctgttataccttcccagttatggcagcctgaatcactatggcaactatcatgtctgctcatgtttactatctttcattctgctgtataacatacgagtctcgagaaacttcctgtgatatatcggttattttcttaccatgtgggaattaagaaaagtgtttggtatgtgttgattctcctaatcgtttgatttgacagatactctcccaacatcaaagagataaaagtggtgagtcacaggaaagtaagaagagcaaggctttactatctgagggacaagcttcctcgtctgtccactttcaagtgaacaccatccaccgtgctgtgtttgacctccagaggtagtaatcttccgcattgtgctctttttttgtaagaattgtttctttctttcttttttttaagcctgtaagtcattccctgcacattttctgagaaagtaaattaagattagttgaacttccggttgatggatgtagacctgttccttgtttgataatgaatgatatatggcttaggatgacctaaagtccatactttaatagaaactatgtatgaatgagtctgtgttctgtgcatatgttgtttggtgtgtcttgactcttgagggtcttcaggaacaaaaacagaagacatgttctcgtcttatttcttttgggacttcgtctcaactattcgaatcttgaattttgatcttgtgaaggtggaacccaactttttattattaaattaccctaatctctatgaatcattcagcatagatattactgtattaggatgtggtcgatgaattcccttatgatttgtttttctttttctttttttgggtcacataatgagattcgaatcatagtgtgccaaaacctctatcatcgaagttctaaccaaactattactactggtaacaaataagataattgaaacacgtaacaccttgaagtcatgaagtctaaaacatatgcataatacaaagaaactaaccatcaaaagactaagtaaaagcaaaggtattaataatttaaaaacaaaaaaaaatggaacaagaagcagaaacatgtccaattaactggtgaaaccaggtaagaaccatcgagaatcagagaagagcatggaggagagaacgcattgtggcaaaggttccatggtgccggttgtgagatcatagacaaatctacattcgggatccgttaaggggtggttgaggccactgaaataaatggagtttttcttgatccctggaatatctttagcgacaacagtgatacccatgtccaagattatagccgcatcacctaaagaatcgacttttacccatctctgcgtcagaggatttaactcgaagatgcgaaaacgccatcttgagaggtcgtagtagtgcattatttttaccaccacaacttctccagacaatgacatcaccatctgatgacttatcctatagtatttgttcttgtcaccaatctcacggccagaaatgaagctaacagctggtagatgcttatctacatgagggatatcactagagaaatcccaaacatagataaagccataggaagcatactggtaaaccttgtgatctttgtgattatagataatttgatctttcatccgaatgtgacaagcgggagcgaatcgccatgtgtcatcacctttctttgtaaaaaaacatttgttatagatgggccaaacaactaggtaatctttggttatgttgtttatccagagacaagctgatcggtagtatttgaagtttggatagcacatatttggattgatagaggtggaatgtggtagatcaatcctctctaacgtcaatggattaagaatgtagagattccgaagatggttaaacatcaagagccagctaccgtaagtcgcaagacaaatactttgtgcaaagtcaacaccgagatctcgagtcttgtaaactttgtcgttatcatcaggaacgaataaaacacagttattgctactattgttttcgctcttttgagggaaaagtatcatccacggaatctgatttcgtttgggaacgcagcctctcgaagcagagttccatgacctacaaactaattttgctcgattgagatttgtgaaactcagttgttcgaaaatacttcgtaacaagtccggacaaagctccgaccacttgggaatcactcggagccgccgattagggttcttgtcgctttggtccattgctaaatttcaaagaaaacacgttaaaactgaaaatttgttgtaattcaagtggtagaattataaagttgatagttgattataaagataaaataaaaaagtgtttatacatatactaaagcaagcgcatcaacgtcttttgcattaatcttttcacatacacaaaaaaggaaaaaggaaaagaggtattcttttctagtttggacaactcttggtatttttgcattactcccaaaattctgataaagtagtactcatgtattccattttctgcattttcggaagtttacatgatattacagtatctttttcatcctatacaaaaaaaaaagcagaaactaaaaaagtccaaagataagaaaccaaaaaagatggaactttcaagtttaaaattaaaagggtcacagaaagagaggtaagagaagaggctttatgtatatgtatgtatattataagacccactttataaacttaaccaccaaagagaagcccaagcaagactcaaataaatatccttcctttttttatgtctgcaaattccaatttctaaagcagaaacctcattttggtcgttttctcagaaagcttaagagtatatctctcatcaaagaagagagatagagagcttaagaatccttcctttaagctctgagaagctcaatgaggttttgtagctttgacctttcagagttggtgaagtagctctgcttgaggaaatgacccgtttgacggcaagtccagaagaaggagatcttgatcagaactgcaattaccttcatagctaaacactgcagagccaccttcttgtgcaaacacagaagccaagcttcttggtctgaagcatgagacattgttctctgtctcatggcttgctttcatcttcatcacccttttggggctcctcattagcccccttgactctgtgaccacaacaagaaactcaacaaaccacaaagattgattgcagaatcagcaagactgattgaaattgtccttaagactgacctgactttacttggatttggttttcatagcgcctcttaatggttacaatatttttaggtacatttgggattgagctttttgaagttgtagtaacagaatctccggtccctttttcgcgttcctgtagtcacatatccggtgaatctctggccaaaagttattattatgtcagtgtttcaatgagagtaagcccaaccttgaggaggttatagctttccaccaaacgagatttgttaaaatctgtcaaagcaagcttcttaaaagtcctgatttcttcgagttttgcccccgaggaagaagacacatcaaagacaccatcagcaatgagctgctgaaacaaagagaagttgtccttgaactgagcactttcaaacatcattctgaggctgcaaaggcataatatgacagattataaattttgtacggtctggtttagttgttttaagaaaaaatgcaatgcggtttgaacctatgaggaaggtcatcagagtcaatctgaggaagcaagttcatcagtttcttctgttcttcctctgtgaattgttctatgaactcatcaaagttgaaaacatcctgcaagaagtttattgtttaggcattgtcctggagtcatttttaaaaatttgactttcatatgcaaatatttaacttattgaacagacttggtgagagttgcttgaaacttaccttcaaatctatgctacatagtggtgaaccatgactccccaggacatgcactctttcagtttgagacttggttctgccaaccattaaaaacaggatccattattatccttaactaaactgagagctaatgtatagaatatcttgaagatacaataaaaatactttacctcttgaattgttcttgctttattgtttgtccaccataatatgaacctctcactgctccaatctcaacacgcttcacggaatgtgagtatgcgtcactgatggaggacttgttctcaatcgaagagagtgagctggcttcagactcctcttcccgagcaaacgagtggggattcttcatcagaacactcccatgtccaatctcaactgagaccattgacatttcattctcaaaaagaagatcttcctctgatgaaactgagagacatgacgattgctgctcttgtaaaatattgtaaaggtcctttgtgagcttttcaacagaagaggacttaggacggcccacacacgtcctcctcttgcaaggaacagttgtgtcccacgcattagattgagatggacctggaaaaacaaagttcacatggacacttttaaaaatcccatattgttgatcaaccggaagaataataaagtaactaaacctgttaactcactcccatctgcactgctaaactgtgcacagctctcagagtttgatacagccgaaccggaactcgatctattactagcatcctcctctatcacagccgccttcaaaccataactgaattcaaagaccggtcttttaatgatgatgttttcttgaattgctttcctcttgagcatctttatctctttgttcttattgcctaaagaaatgctcttcattctttgaaacctgtgatgatcatcattctcatcaccatcagcacgagcatgaagcggtgtgtagttcacaagtgttccctttgtcctccaacgcgatccacacgcattgcacaataccggcttctctggtggtccatttctccacaaaggtgtgtctgtttcaatgaaagaaacaaaatttcacaaatttgagctttgaaatcaagacaacataagagttcaacatcagacaacacttgaaatgtgacttaatactgcaaattcaaactccaaatcaatcagaagaacaatgatctcaaaacaccaaacatcttaaagtctttaagcagcaaccagaacaaaatttagcttctttgtacaacaattgcgaatcataaacacaaattcagatcccaagatcatgtctttgttgcctaatccattagttctaatcatactgagaacaacaacacaagtcacaaacagttgttacttaagatcattcaacagaaacaatatatatagttaaaggaacataattccaaaatgttcatagatattcttgagtccaggaagtctttgctgtatcacttcaatcattattacaatttgctacacaaaaagcatataatcaaatcattttcccagaaaagagagcatctcacccagaagtaaaaaaaacaaaggttgaatattcatattcatacagattttcacatcatcaaataggaattggagacactcacttgtaactccacagtggtagcaaggtccttgcttccccataatatctctatctctctctttgtttcttttgtgtttttcaaaaatgaataatttcagaagaaagttgcaatttttatagacttaaaaagaagagattttttggaaagaaatttaagttttataaattgtgtttaatattcagctataattggaatatacaaaaccagagtcttaaaactattaagaaccttttctctgctaaggaaaaaaacccagaaaaaaagtttttttttttttttggttttctgcaaattgaagccaagatacccagaaagtctcctataagcaaattttacagaaatacaaaaactcagtataagaaaattgaaaaaatcaaagcaagaaagagaacaatttcaagaagataatttatgttatcttttttggtttttgttttttgggttccttgagctatcagtctaatacaacaatccaatagaaaagagaagagactaattgtgagagaggaatctaataaatggctgtgaaaaaggagaagagagagagagagagaacaactttgagggtttagagcgagaaactgtttgtgtataataataataataaaatggtctctctttttattttatttttatttttgttcatttgcattattattatgtaacgatgaaattaattgtttcagcttccttacataaaaaagaaatatgttttttttcctcctttcaatttcattttagataaaaaaaaataaaaaattacttcagcatataatggctttatttgttgacatcatataaaatggcttttttagtcgacataaaatggccactttcatttcattttgttttcttttgttatttttgaaagtaaatgtttcagcatcctttcataaaattttgagatttcattttagaaaattagtttaacaagaaatgagatctatgactatcagatttaatataaaagttataggagtattattttgggtaggaggaatattattgcttatgcctaatgcttccatccttcttgttgactatagacttttctttctttgtttgttttactattgatatttccaacatgtataataaatataataacgacaattataaatattaatgactatgaaaaaaaaatgaggaagaaaaaagcactggtaagctttttttctctaaaattattaactacatcaaaaaaaaactatataagatacatacactctttgtcaataatattgttcatgttttgcaagaaaaaaatataataaaaaaaaaatgttgtgcaagaaaaaataatgtgtcgacagaatgtgaaagtataaatctatagtacaatacggtattttaaataccgtaacgattggtagatttattcatgcctttggatttgctgaataaggtttataattgggttcttgtttatttatttataacttagcaaatactaaagttttgtcaacgactagattaagagattaggttatttttgcttatttttttacatgtgtgacaatactatgctggtagaataagttttgttaagtggggtatatatatttttcttataacaaagaaaagactaaaattattgataaatatgtgtcataaaaaaaacaaagttaaaaagaaagaaatggtatgtaaagtcaccgtccaccatgacgatcatggacacaactcctccctccaccgtttgatttagttaaagatattcaaaacatgggtcctacttatgtttctttggtaatttgtgaatgtgattagggaactaatgcgatatcaacaccatacattatattatacgtgtaatttattataatattcggttttcttttgcatttaactagtagtatatgtattgagatctttagttctttgtgtttcttttctttggtttcgtacatagtgtaatgcaccaataaagaattctcaattcaacgtaaataaaccgaaccaagttaacttatcgagtgatagcattactccaaaaaatttatcttaaacacaagaaaacaaaaatagttctatttttttttcttaagtaaacgatataatctaatgtgattggtaaaatgttatggagcattagttacgaaaactgaagaataatgtgtcagagaccgaattgaagagtagtcttaccaaattttaaaatagtgtaaccagaaattcagatgccaatcacatctctgatctatatattctttttttaaaagaaacgatggtaatgtaataatgaaatggtgtgagaggtgtaggcaaaatgatggaggtatgatcgaacggctgagaaaagacgatgagaattggagtgctattagaggtcaaacacaaaaagtcatgccccaatcgtgcttacaaatcacaatttacaaaacccattttcattttcatacgctaataataacagcaacacaactactatggcaacaatgtccattagcagaaaattattttagtatcaaatatcaactagcttctttctaatgtaagatagactcatagacaaaaagtgtggttacagtctctagtattttccctaatatcttaattttcactcatactagaaactgtagatcaaattgtttactcattttaaaccatccaaatagaacataagatttgaccaaacattggaatagttcttgaaacatgtacacttatgactttctcctaacttgcatttttgttataaatttgatattagacagtaaaggccagagccagagtagagtacaaagtcgtttacaatctgaagtttttatgatagcaaagagactagtcaaagagaagtaaaaagagtgatttgactaaaactctgagctatgtagactttgatttggtggtttcagtttcttcggtcttttcttcctttcttcatcttcctaaactgcacaaaataagacgaaattgtattagatagagagacattagaggtaacaatgaactcaccaagggtttaagggaagaacttaccatgttgagaacgagaatttgaacaaatagagaagcaaagtcagtgaaaaaggtaaaagaatgttgcacatagtccatatcaccgtggtgtgctttctcggttatcatctgtgtgtccaccactatgtatcccacaaagatcaagagtccaaagtatagctgcaaatgatgagaatgtatgttaatacaagcaagtactcttctatcgaaaacaaacatacaattctctccctcttgaagacagagtttttacctcaaacttgacgacagttgtagagcctccgaagatggaagaggcaatttgtacccaccaaaggatggacatacaacaagcaagtgaagctccgtggtaaaggtactctctacgcgttgccaacattgctgcagcggagaaacacacaaatgctactgctgttcccacaaatgcagtgaccaggacgctggtttaaagaaggaaccgtatacacaaacattcaacactgacagagcgtagaagcttatgtagaggtctctttttaaagacatgaacatagaaatcaccttgagtcaaaatcaatgactagcatgatcatgggaccaactgaagcacctttaagaagggcaaatagaaacagaaggtagagccttttcgctgcatcaaaagcaaacattagataaagttcattgagttaaacaagactgtaagatattcagagttagggactcatcttcaaagaaaaataagtgtaagtgatgaatgaaacccacatgttaggttcataaagagtgaaacgcaaccaaatcatgattccactgaatccaagagtactgacatttccaccgatattccagaccatgtgaatgtaagctccaatcgcagacgcaagaagagcaaagaataacgtgagatagacttacacttaacgaacatatatagaatcaagaaacaccaataaaaactctcaaagaagtgcgtttcttttcactaataaatacaaacgatcaataacacaacgatgcgaaccaagaacaatacaaaactgaaaacaagatcacgaaacaaactattgcattgaaacgaaatgattcactaatcaatcgtatcacaaatctcattccaagaaacaacaacaacttttcgtggaagattatgaagacgttacccgcttaagatgattctgcacggccggagagaattcatgagagtttctgagataatcatggctccaaatcgtaccgttcgcctccattgttgcttttgcttgataatgcttcagagaagagaattttcaaatgcagagacttcaaattccatatttatagtacggtcaaataaatcaattctgttttgctaacaagcccatggtgtggtgggcttttaaatacgagcccatgatcaatactgttagtttctttgatagtgtgtttgtacttgtagtagagtgcaaaaacgctacgttgtttctgtttcggagaaagaaacgacataacatgttaactctgttttttttttttttcccctcaacatgttaactcttacaacacgtctctccaaatatgaaatatggcttaaaatttcatataatttgcaatttgcatataatgcctgaatagttccattttaatttcatataattctatcttttaccaaaaacaaaatcttgaaatagtgatcatatataaaaaaatgagacttacaagtgtttcatcagttgatttagaatccaaaacagcttgatatccttcgtagatttcgtttttgaatctggtttttctttctctttctcttcaaagtactcattcacacattctatatacgtacaaacacaattatatatatatattaaaaaagattaaattaagtaatatttttggaattataagtttggtgttaatgttaacaaatcatagaaatgatatttccgagaattaccttctatagagcgagagaggccttggagtttaccgacggtggtcttgtgtagatcttcaccagaccaaataggaaaaacaagaaggctcatgaaaagacagattccgcaaccaatagctatagtgtaaaatctattgtacgtgtgacgtgtgctatgtttatcacactatctactcgacagcttgaaaccgttatagattgaacgtcaagagaaatatcacaacaccgtaatcgtaattcttctttatgtatggtacaaatcttatataagtagcagccgctcctataaccattagaatgaaattaaacatcaattagtaggtttattgttgattgtaataaatgtatgtatataaggagatatatagtatataacttactatattgcttcttgtccgagactaggtttgcttcagcaggctgttcttgtgagtttcgtctaggatggagattttaaggctatacttgatcaaaggattgagggctgccttagatcgctaatgcctttagtatctccttgcatctcttgggcatgtcgtgctcgttttctgctttggcgtccaagttcattgtttccttgttgcactaaggctcagtctcatgttagatctctgcttcagataagtgtttgctccatgttaagcgtcgaaataggttaaggttcatgtgggtttggtcttagcggctggtgatgctagtatggctggttaaggacatgatgttgctttgcccgtgctattgacttcgggaggaacttgatagagtggcaaacattgcctgcctcattccgctcgtgtggttccgcagctgattctctgcctcgggctgccatcgaaaggattactttctcgcttatcgtcaagccctccactgtatgtaccctctttcgctcttgtttctcttcccaattcactttagggattctttagatcttgattcaattcttcttccaagagcatctttgcttaaggagtgaactaattttggattcaagaatgtgtatgcttccatgtttagtaaacttttacttttttttttggcatgggaccatgtataggttatgctattcatttgtgtaaccttacttttgattgtgaaatgaatatttatacaatcttagtaaaaataataaatagtatataacttaccggcaaagaactcgaggaggacggcgacgacagtcatgacggcccaaatagcattgcttccaatgcctttgaagagattctccatgaaatatagcaaagaaacgagtgtcaaggaatgacctactttaaatgcatgtatcactctcctcggatcttcttttccaacactccaaagccttttcggaatcttcttgatcttctcagaaggttctagaaccatccacttcgtcttgctcaaaccttcctccatctcaatgttccctacgtgaaccttgttggacattttcagggagagaaattggttatctctctctctctccttttttttttgtaataagagtatacaagaatagaatgtattgtgtattctctatatatagctctctgtgtatacattgatatatgtaaatatagagtgatggatctatatatggtttgcgtatgcgatgcgtagactatatagctggccagaagaaaacaagtgaatacgtgtgtttgcgttcgttgaactacgagaatgtcttttaggttcgatggtaatttaaaaaattatgtgtcgtatgactttacaaaatggcgactaatattgatgttaataataaattaaagagtacttttttcactaacatacgttccataatgctattagtttgaaaattagagatccaattattatccttagatataaccatttgtatatttatatgcatgtgtcacccaattagtactaatgttgttaaacatgtagttccaagaactagatcttagtcatatatgttgtcctcctagattaaggaatgagtaggtacatatactttaagttacgtacatcaatctaacaaaaaaaaaaaaaaaaaagtatatgtaggcgatcgagaactgagaatttagttatggacggaccaagaataggttattgtgttaggctaaaaagggaacaaaatatgtaaagtcctaacacgaatttcgattttcaattaaaatcattttcaataacaacaaaaagagatcaaacatgtcgtttccaatcacttacacaaacaaagaagtagtttttttaaaatatgtactttcacgaaatataactcaaaccatactcttatgccaaaacgaaaatgtacgtgaacaatattaatgatggcacgggttacgacttgtgagttgatatatagctcattgaaatggattttgttggagattagtttctaaatttaccttcatcaaaagatcgtgtttttcttctgtggcttgttagttaaccttttttttttaattatataaatttagattttagattatggattcaacttcatatgtggacaactgtagttctacatcgacattggtattcaaattttaataaaattgtcagaaaaaaaatccaagaaattaaactatactgttgtgtgtagatgtaatggatcttttctagagaatattacgtgttgaggcacttttctgaaaatttagccgtaattaagcactttacaatcattagacacttttttgatgtgaattaacatcactactctctaactatctcttcttttccttagtaatatctcttcgttatctctcttctttcacaatacaaaaacatttttggcctatcttcttcttcatctctctttccagaataaaaattcaatcttttaggacattctgaatattcaaaatcaaaattgaatctcttaaggtttatcatcatcttccctatctctcaacaatctattgattctcttcttcttcctctctcgagatctttttcaaatatattctcaaatccacctttctccgttggatctgattccaaaacatgtgaaagtctctggtcacagaatttccgtcagaagttttctcgaaaattacaacaacgctatcgacattctctctttcgattttgattccatgatcgtgaagcctctcccaaatttcaacaaccgcatcaaaaatgtaaccacttgggcaagatacgtttctctctttctctcgaagttctaaaccctatttcttcgccgctccaacaatcatatctccgtcaagaggacgttatcctctcaaacgtggatctagctctgattctcttcacttatatttcgcagattagttttttttttacaaaggatttgagatgattttggaaaccatgaccaattaatctggttaatcttattaaatgaacaaaattaaccatacaattacatccataaggttaatacattcacatgctatactatataaactctaccataaaacgttggatatgtggacacacatcatataatgacagtcagtgttgtggacatcctttgctaattttggttcatgaattttagcttcatggatacaacgtgagcctttgagaccttgtagagatcttcattaatttcagtaaaattaaaagttggatttaacaattataaccatccacaaatgtgtgtatgtcttgttataagaatctatctttggattcaatacaaaatgttgacaactaatattttctcttttctctctcttactaatcgttttatgtcttcgtgtcaaaacaagaaactaaccaaagactagagagaatgagagtgaaggttctttttgtgcttgtgttaaaatgagtgagtgaagcaaaacattaaagagaaatagagatgttgtggtgggtaaaaaagcccagcccgacctgaacccaaaataaacccgcccaccaaaaactcaactttagaaaacccaaatgggtttttgattagtgggtaaagcccgaaaaaaacctgattgttctgatactacccgtgggtacccaacttgatttttgtctttttttctagtgtttatgtttaattactaatatactattatatatattttatatctatattttgcttataaactaaactggtatgtaaatatatcatgtaaatttttttcatagcaaaataataataatttgtatgtcaaattaaacaagaaaaacttaaaaagtaatcaaatatctgaaaatcaatttaaaacaaaaatacaacatcttctcatactccagagctacttgctaccgatgtagtaccttcaattccatcatcaaagtattcttcaatgtcacctacaattagaagatataaatcaacaaatgaaaaaaaattaagtccaaaaaattagactattctttttttatcttccaactctgcaaaaccacgcaacgagttcctagtacataacaaggcttgaacatttctcggaagaaggcggtttctgaaagggtttaaaacccgacctccaatactgaatgatgactcagctgccaccgtagtgattggaatgctaagtatagcagaagctagagaagctaaatcaccatagcgttgcccatcgcctttccaatagcttagaacctccatgtttgtctacagatgggctgacaattcggattcaagtatttatctctagctctaactttttcatactcaacataccgaaatggcaaatcatggtacacaataatctcactaaccatctcacgatctactttgtgatcatacacaattttttcactaagcacttgaggtctcttttgacaaatctgtaaatgacatttcaaggcggatgttccctgactaatttcaatgattaacttcttatcacaatgaatgcaacgacctctctgtttcccatcttcttctaattctaagatgggtctaaactctttccaaacatcagactttaagcgtttgttagagttatataccgttgtagccgcttgagtagattgtgttgcactttgagttgcttctccttgagttgcttctccttgagtttcagcctcctcattcattgccaaatactcattctcagcctccaaatgtgccaatgtttctctagtttgtgaatccattctacaaaaaaaaactcatgaactttaattagagaataaacttgaccatcaatgaacaataattaaatcatataagtaacaaattctgattaagagcaagtaacgtcactttatatacacatacctaatatcaaatgaaactagagtttgatttttcaaggagatgacgagagacttacggcgatgactccggcggtgaagacggcggtgactccggcggtgtagacggcggtgactccggcggtgactctcacggtgactttgacggagagaagaggagagaagagagagagactgttgtggtggtggtagaattttggggaagaaaaggaatttagggtttctcaatagaattggcaattgggctattgggcctttaacatactaaaataataagttaaaacccaccggtacccataacccagtagggtaaaacccgtgtaagactttaacgaaatgggacctgcccatttaaaacccacgttttattttatacaaaaagtagattaatgggtttgaaattttagatgggtttcgggtacccagtgggttttaacccatcattaacatccctaaagagaaatgagagatgtaagagaagtgaacctctaaaagttaaatagaggacgaaccccaaaagctcaacaattttttattgacgattaccgttcatgtctaaatttgtgcattgatatgaaacgacatgtgagttactaggtgaccatttggacttgattttttggacactcgtcaatatcctctatccaccgcttttcagccactaatctgtagcctttgcagcaagtgttctgtaaccaccaattaatatggacatcatcgtaacaaaatcaccacatatagcttgtttttgggattgttcatctattaatcaaacatgaaaagattcacaaatctcaccataacaatccataattcacaatccataataagccatccataatgcacataccaataacaaaagcagagcgagctacaaacacacttttatccaccaacaaagatttaccaaacacatccatcaatattcgatatatcaacttgggcttctctatcagttttcaaagaaattaaatccataacttcaaaattttcagaaaaaaacatgattagcaaactgtaagagcctaatccactaattgttcgatttaatcgcaagtaaattcacgatgaacagagacctctaatctctgtaacatcgtaatatctagaatttcacggtgatataacaggaaaaatcagtagagacaataacaatgaaacttattgttagaggattatgagaatcgcaaggatgatgatcatctttttcctgggtttgttgtcgtggatctcaaacttggagattatgaggagacgacaaatcgaaagtttatggagattatatatggtataatgaagattggtgatttcttatggaaaggagagaaagttaatgggaacgaccataattttgtaagaattatagagaacgacaatgattttgaaagagagaattgaaaataatgaaaaacaaaagaatatggaagagaaagatgataaaaagaggataatttttcatccacacgatctcaacaataatgagtttaaaattattgcgtcatcactatttcaggggtaaattggtccaattttctctcaaaaagatggtaaagtgtccactcccttataagtgtctcaaaaggaataatattatcaaaaagtgcctaaacgtgtcacaatccctcttttctatgcaacagaacaactgttcccgtgttgttgttttttaagatttcagatttctcgtgtgttgtccatgtggctcatgtgagatccccacacgtagcaggaaaaagatattgaaggaaattgaacttaccaatacaaagaaaaacaaaacagggtggattcatgtttaaaccaaaaaggatgatcatcatattatcataatgtatacacacaagaaagaactcgtagtaatacaaattacaaagtccaaaagatgcaaaataaagtgtgaaacgaatccctaaatcaattgtgtacctgtgcctaattctaaagctagtcattttgttttgggctcaaaaatcaaaaaccaaaactcattgcataatctagttcactacttattacaacatgttttcttgtatggtttgataccaatattttgatatgctgatgaaacaataaccttttccaacctctcttgtgctccaaatcattcatactacaaataatcgtcgttgatggctttatgctcaatgcatttaaaaaaaaaaaagagaaactggtcgtctcacaagtccatcaaaacggtactttcaggatctctctatatgcaccggattcatatggctccaatggaaacaaatgctacttgggtgagagtattcgcacggtccatgtaatctttggcgcgtttgtgctaggcccgttctcctattctccaaagcctacaaccctccctttcgacaaaagcacatcaccattccattggtcgctcatccaaaaaggcaatattgaggatacattcgacctgctgctcaccttgctatttttgtttcatttgggctggcttcttcgtgatcttgcttggatatcgaggtcatcgttgggcaaagcacaccgacattttaccttgcttttcagttgatccttttctagtgtttcaattccaggaaaaaatatgaagaggccctaaagtccgaacactcccttcaaaaagataaccctttcttatttcttgcttacctcaagatgcactcacctatgctgtattcttgtgtttagatttttgtcgaagaccttgttgatcagccagtgactcgatgcatctccttaaccacacaatacctttaaaatggagagactcctcgacttgagcaaaacaacatgagtcgtaccacaatttcaaaaacctataaattgaagagtaggagaagaagaatggtcggcctgattcatgtgtgtctagctagggctgaaagctgaaacgtcttttaggaggaggggaagaggctattttgttttggtattttttatgcaggattttgcttgatgatgttttgttatttttatacgcacacgtatactattaagtaacgtcgttttgtcacggccttgatccttttaatagcttcaaatttgtttctactactagtttctaacgggctagcaattaatgcttcaattatagtgggttaaaatgtataaatgatcctataacttagtttaattaatactataagtctataactaagtgcaaaagcgtggttataaaaggaacacacaatttaggtttggttacggccttacggctataatgtggtgagttttttagccgaaaaaaatatcaaagccgttaaatcgatggagattggcataaagtcaaccaagcatgtcttccctaaacgcattagcagagattatacctgttttaaattaaatcatcagtacaaattaaaaatatggagcaaataaacttataaacaaggcataccatcaggtacaataaaaatatgataaagaaaaaaataatggcttttgcatgtctacaatcgtttcattattctgtgcatctaatgtcattacatcgaacaaggaaccaaggttttgaatctacaaatgcatcaaaaaaaaccttttaaatttaaagagctacccatatattaaagaggatgggaagactttaaagtccaccttcattgacaagtccttgctacaaccagttgtgaaaaaatcaactacatgtatacattcataaaataatacttattgtgaatctagaggaagaaaatatgcatacttaccgttgaccagttttgtggcaggaatacctgaaatcttcggtccaatcctcagtccaaaagttgttgagcaagatacattttgcgagtcttaaagaaaataagactcatcataacaatgcataacctaataaatttcctaaacacttgaacaatggataaccaagtttacctttaaagtattcttcgtatatatgtagacctcagcttttcaaacgcctttattagtttaacgagttctgcaagactaaacgtctgacaagaaatttcagttgatgataaatgagtaattagcaacagagataggaatgtcatggagaataaagtcagagaaaatcactgccgccaaagttctaataagaaacctattgtacccataaagagaagcaatatcatctttaagctggtcaacataatcagacatgtgaacgccttctactatctataattatatccgacactcatattcaagattggtaaagacactcatattcaagattggtaaagaagttgatgtgagcgtatctcgtacaattaagttgtataagatgctattataataaccgattgtgacaaatctacattttttaatccgaaattcactaagattaacaagtactaagtttagagtctaatataatagcatttttcatcataacacatgatacaaatcatacttgaatatcaacttgatgtaccctttggtcatcatgttatattataacaaatacaatgcattttatgcttaggcatcaaaataaaaaggcatactttagaatttatttttaggcttttattttttaagaaaaatattataggtcttttttataaattcattttgttaatctttattttctccatatattgtggtatttaaaattttagattaataaaaaaattaattaaataatttgttaatgaatttagtttagtaaatttttggttttttttaaaaagttaaaccttaaatttcttgcaaaatggaagatattctaaggtgtacattgcttagatttggattacaaaattttaaaaaaaaagtttgcttaattaatcagataaatctgttggctttgctgtcaaatgagataattatggttaaaaacataacctctcattaattgttaaagccaagcaagttttaccttttgcaaaacaccaaagcgttgtatgtcagcttcttcgttaatggacattttgatcgatccaaattctgatattagctgcatagatagaagttagcatttgagttaaaacctgacaattcagttaaaacatgacagacgagttgaatttttactccagttctagttgaaggcgcattcaccaacaccatatcctttgagtttatatggaaaaccctagatagctgaacgggaaggaataatagaaaattatttcagaacttttattacccttaatatcatcaatagtgaggttcaagaagctaacctttgtattgatattgtaattggaaacaactgtatttgtaatccccattcgatggagattggcataaagtgaaccaagcaagtgttcagtagacgcattagcaaatattataccttttattaccataaagcgcccagacagatgttcaggagtttccccaatgggaagactttcaggttcatcttcaatgacaagtccatgctacaagcagttttgaaagaatcaagtacatgtatgtatgaacaacataatacttgttgtgaatctagaggaagaaaatttgcatacttaccgttgaccagttctgtagcaggcatacgtgaaatcctcggtccaaaagctgttgagaaagatatattctccgagtcttaagcaaaaaaacaaaactcatcataaaaatgcataatctcaaaactttactaaacaattgaacaatggataaccaaatttacctttagagtgttcgtccatatatatgtcggcatcggctcctcaaacgccttgattagtttaaagagttctccagagtcatattcaaaatgccttgattatgcgacgccttgattatccgacactcatattcaagattggtaaagaactgaaagtgagcttatctcgtacaattaagttgtataagatgctattgtaacaaccggttgtgacaaatctacatttataatccggaattcactaagattgtcttaacaagtactaagtttagagtctaatatataatagcacttttcatcataacacatgatacaaatcatacttgaaaatcaacttcatatatcctttggtcatcgtgttgcattataacaaatacaatgcatttatgtataataaatcaagcccgacattccacacaatcaagtgaagtcatggcttagggcatcaaggtaaaaaacatattttagaattcattttttaggctttttatgttttaaaagaaatattatgttttctttacaaatttatttttgttgagctttcttttcaccatactttatgggattcaaaattttaaattaattaaaaatttcttcaatcttctttggcttcacaaagcgtgtaaataatagtatagctcattacctctcaacctctaattgtattcatggagatttttattcttaatcaggtcgtcaaccaccttggttacaaaaactactttgtaaaatctcaattggttaatataattcagtttgcagaaaaaaaaattaattaaaattttaattaaatatattattaatgaatttagtttagtacaatttttccttttaaaaagttaaaccttaaattgtttgtaaaatggaaaatattgtaaggtacattgcttagttgaatacaaaataataataaaaactttgcttgattaatcaggtaaatgtgttgactttctttgtttgataccctcataacaacaccaaaatactgggatgggcttttaatacgagcccatgaagataacagtcacttttttgtttctgtatgtgtagagggaaaaaaaacacgttacgtagtctcaatttgggagaaagaaacgacatacatgttacatctttaaacgataacaagtctatttagaaccactagttgtgatttgtgaaactctgaagtaaagaagaaaccacaacaatggcgttgttctccccgccaatctcttcttcatctcttcaaaatcccaatttcattcccaaattttcattctccctcctctccagtaaccgcttctctctcctctccgtcactcgagcttcctccgacagtggatcaacctctcccaccgccgccgtctccgtggaggctcctgagcccgtggaagtgatagttaaagagcctccgcaatcaacaccggcggttaaaaaggaagaaaccgccaccgctaaaaatgtcgccgtcgaaggtgaagagatgaaaacaacggagagtgttgtcaaattccaggatgcgagatggattaatggaacttgggatctgaaacagttcgagaaagatggaaaaaccgattgggattctgtaatcgttgctggttagattagaattagatcctcgttaagtttttttgctctgttactttggtgaaaattcgaaatttgaatttgatgtttaatgtgttttgatttgaagaggcaaagagaagaaaatggctagaagagaatccagaaacaacgagtaacgacgaaccagtgcttttcgatacatcgattattccatggtgggcttggattaagagataccacttacctgaagctgaactcttaaatggtatttgtttcctctctcaaaagatcaaacacatacacaaagaatgttacttactcttactctttgtaggtcgtgcggcgatgataggattctttatggcttactttgtcgatagtcttaccggagtaggacttgttgatcaaatggggaatttcttctgcaagacactattgtttgtggctgtggctggagttttgtttattcgtaagaatgaggatgtggataaactcaagaacttgtttgatgagactacattgtatgataagcaatggcaagcagcttggaaaaatgatgatgatgagtcattgggttctaagaagaagtgataacaaagattcttgctttctttttttgttgttgttgtaattaggagatgaacttaccaaatgtaatatcaagagatttgaacaatgtttcctcagattaccgttaatcatgtctagtctctacttaacttaatctaattagaaaacaaaaaaggcccaataagaagcccaattttccaagtttattttcgttagttatatttatcccacatcgacaacagctcgtaagtgagataaatgttttaccaagaatctttggctttggctaccacgatattggctctggccacaatttctcattgtttaccaggttgcttgaccgatacgggtttaggaaacttgactctgagcaaagggaatttgctgatggtgactttgtgagaggtaaacctgagcttatccggaacatatataaacgcaccagagctcaaatactaaacactaaagaagggagagagctgcttaagcaagtcatggagatgaggaaacagaggagagaaaagatgaagaaagagattacgaaagcaaaggaactagctgatcggttgcaccatgtacatatttggaacatacaatgatgtttcgcgatttggaaatttatgtcaagaccaggctttgattactctgcttatagttctcctatttgatatatttccctttccagggttaggtttttgattgtatgtgcaacttattaattgtggtataatttgaaaactttagcatgtatgtcgattacaaagtatgtatcaatcttgcgatgaaagattatgtgaagttgtgaactaatcatcattgggttcaaaacaaagtttcttcctttatttttggtgtaattattcaaacaaaaggctaacgagatttgaagatgttttctcaggcatacttgattctaaagcttcttcaagtactcacaaacatataaattttggaattatcaaatgcgttgctgccgagtgtattcccaaagggcaatggcaccactgacatgaacattgagggacctaacaactccaagttgtgggatctcgatacaagcatccaatatatggattatatccactgggatgccttccttttcacgacccagcaccaaaacctttggaacaacagagagatccacttagttactatgggaaagccacaagcgagagtaaatgaaaggctctgttcttatgtttttgcgcatcaacttaccgtcttctttgggaattggtatttgtcaagtgaaacgctattcgctgtctgttccagtcccaagattgagaacccttcccgtttcttcttctccaagaacagtttcaaactgtttacggggacttccatgattggaacccatttctcagcagtcacactgcagaaaagaaaaagagaaaaattcttgtaaactcttgcaccgtccttcgatgatagatgactagaatatataaacgtacctaattagttggaactgtttgtcgtgtattatgcttgcatctgcaacagcaagacttgatgctttaaacacctgcaaaagatgcagagaggggatgttaacgctgaactagatacaagtacaagactcctagctttttcttgcttccttgaattgcagatatggtaaggaaatacaaaaagaaaataatagcaatacctcacatgtccgggctaatccagcaagattaggaatacgatcaaccaatgaagccacaaggatcaaactctgtcgaccagatttcaacctttcgacctccatgcttctagatcgtaagagctgagtcacgagctcatcttctttttccatttctgaaaacttacttgtgttggtacataatcatgtttacaaaataatagctatataatatttgcataccaaagagccgcttgtaagtttccccgtttcggagcacagaagttgaactagcatcttgcttctcatgtttggaaagagtgatcttcctctggaaatccaacgaagatggctcagaaagcctttcttcatctgtcgtggacatgatcaaccgacgcttgggctcttcatcaatcttgaagccttcattttttatggtaactacatcctttgccatggaggcacggagatcttcccttacatcctgcaagacttgaagataaggcaaagagacagaaacaaaaaaggaaaaacaatcttaaatatgtttatttgcttacattcagaaaagagagcacgttatccatgaggcatgttggaacacattcaaactcactttcctgcacaacattcaagaaattatcttaaaagtaaaatggcattgaaatccgaaagcagctttgtgaaattaaagcaagcaaatgtcgaaggatcagtagggaccacaataaaataatctcaatattgcggtcacttggcattatgataaatttcagaaatgtctcaatatttcaattatcccattggtgcaagtacagcttgaagattgcactgttacctcaacacgattgacaaaaacaccggctggagtagcagatgtgctgggatcatatgcatcaagaaatccttccattgatgctcgcaatctagaccaggagagaaaagtcacaactgaatttgtgtagtgaaccaaaaccttctagatggctttggccacaaaagattgtttctatgaccaacatgagaaagtataatcacacttaagtagaaccacgcaccttgaacaatcaggattcttgtccaggtaagacttcaaattctcaaaagaaagtttctccagggatattgtatgagaggatgtagactctacagggggaaacagtctaaagagtactcgatgcactaataactgccaaaccccaaaagaaattagaataagactgatactctagtactctaccaaaacgaagacaaaaatggcatctacataagataaacctgcgcgaaaccacgtaagctatgatgatgagaagttagtaacggtagtattggtggaagaagttctcttagatgtgtctgttgagctatcttttctgcgtggaggataacattggctgcaacaaagacataggaggagagagcttgctgcagattacaagagaacatctatcaatatactgaacagaaaagtcataccaaatacaatcatcttagttttgcgtaaatttacctgagctttactgtcataattttttagtataggaactaactgctctttcacctgtgatacaacaaccaattagtggttacttcagagataaacaaaaaaagtgtaataacacagcccgttaggacacgaaacggtttatagttgattacaaatttgcttttggaaacacatagagaagttagataccaatgctggaaatttcaggtaaatgttgatggcaaatgtttccaggtattgtcgaacagcaggcaggttgtttctctgcaagcaaacaaaacgcacaaacaatcagcttcgatttaactcgacaaacaaaaacttgtatagaagtcaccaacacttgtctagtcatcaacgcaacaatcatttctatatcagtttctgtctgaatggtttctcatgcataaatgtgtgggctactaacttcagtctgttcttgtaaacttacatgtaagcatatgtgcacactgtccattacttggccaacaatgtcattgcagacaaatcgcgacataatgcatatcatctgccaagcacgtattttccgtctatggatctggtacagaaaccagaaattactgtcaaagtggtctgtcacttgtagtgatttattttttaccaagtgtccatctaaaacttaatgaaggaacataaaggaaagacatgcaacacgtacagcactgtacttcttgtaaagctcctttgccaagtctttatcatgcacctgtgcatatcattataattagattttcagcatattgtcgtgcctgctagttgttttagcaatattttgtgaagactaacaaaaaataagtaccgctgcatcaagaagctccaatagaaacaattttccagccacaagagcatcctgacaatcttgattttgacttgctggttcaaccatataggccaaattagccagcttctgaaacagaccagcgacagagacacgtgcatacaactccgtgttgataaaaagctgaggaaaaaatacagaacctgtcactttactgagccaatttttttagcaaatctatcaatccatcatctgtcaaaactgaaactcttacttctgtcagttcagggtctgggcttttggccaataatgatacttcagttctggcatcattattgtcagacaattcagcttcaaaatcttcatcaaatgcaactaaaatcataataaaacggttagcaattcaatatcacaaagtcattgcaaaagcagcttaagagaaataaaagccattacagaccagaaccatagagagtcagaagcctcaattctttaatgtagtactttatcgtccttgggtacatgagccagagtcctgataggtgcaacgctgcaaggcgaattgtgcgtggacttttctgaccttcctcaagtactttttcaacgaactgtgaaacaagacattacaaataaacacattttttctcatcggttccctcaactaatttaattaagaaggattggtgcatacccacttcagcggaccatgctcatcttcagttatgtgcatatctttattactaaacaaagaagaatgcaacacagaagacaaaagcgcagcaatgggtgcaacccttcttttcttacagctgatatgcaatatccaacatgatttgaccaactgccacatcgtctacttgcaaggcataacaagaaatgaaatattttttaattattataaaggatgaacacaaaacttccatccaatctagatcaaaattattacaaaacctgagtatccacacccgagaaaccatccaaagatgatttcccagacgcaagtatccccaaagcgagtctgacagatttcagcataggcaaagcagaaccctccccagcattttcaaggctgccaaatcgtaaagggaaagttagaggtcattcaagaaatgtaagcatgattgcatcctaagactacttgaatcaaatttatcacacatcccacctctctacaatatcttgaaaaatgcttttaactgtatcatctgaaaagaacgactttctatcctctggaatacgtctggcatcaagaatatgcatgactgataacagagactccacacaaagccactgaataaaatacaaaaaggtcagagactcagaattttcctttggcaatccaaaagcaaaaggccactgataagatcttgtaatatatatgattccactggtaaacagctatagctctgtcaaaacaaattgtgcattaccttccagcttagcagaactgcccttctacttcttaccagaactcctgctgtgagaagatggttaatgttacggacgaaagccggaaccgaaacttgtaaccaaaattcaccatctaccatggataacaatgtactatcgttttctaaaaggttgaaagctccagctgagcacaaggacacaaatgcattcagtactgaagctagcgcctcaaatgctgcaagatagatctcagctgcggcctggtcagaagcatttatagtgaattagtgcaatgtgattccatagaagacacaagaaagctgagagcttaacacattacatgcatcctatcaaatttgaccatttaaaagcagggcattacctcagaattacaaatttgagatgatatagtatgctgggtgaacttccaaaagaaagccaatgccaatttgagttcaccaacaccactagtgaattgagcacagtatgacgagatcaacccaatagttttcaccgacaatacctgctcatcatagagaactggcatgaaacttgttcaatgttgaactgagcttaaggaaatttgtaagtaattgtcctacaaggaactatgcgtatggaaatttgtaagtaattgtcctataaaaacaagaaaagaaatcatacagcttccagtacagctgttgtagtaggaacagatagccggcgttgacttggaccccctagttttcctatgacagaaccaggcagagcaccattctccacagtagtatgagaccagaatattgaacaagatgaatcagcaaatggaatcagctccttctgtattgtcatgccaggaaggaaccatcatagtaagccaagttagtgagaggacaattatattattgtgtatcaagaaaaagtgttggcacataccagtattgataagagaactacagcaaactttttcttaatactggaagcatcgacaacaatctgcttgccagtttgctcatcagagccaatgcctgacttgcttttcaccgaagaactaagctcagaaattccatcttgcatgttctggagctctaaaagcatactcagaataaagattaaaaacttcgcaggtgctcgttttaaatggttcttctcttggaaaaaactaaggccgttattttgcacaaactgcagagatagggattattgtcaaatttgcaccagaaatattttgttgacaggtcaaaatcaaagtcaaggaatacaaaccattatgatatcggtgagatgctcttctttattaatcatgaggaaaaatactcttgcccatcgttttgtttgggaatcccatgcctccaagtcttcatcatcaaaactctcaacattatcactggtaaatcctttcagatactcataaaggctcgccagaagacgagtgccatcagtacataaactgttggaagtctttctgttgcacccctggagccattctaacatcattttgcgcaataaacctgacatagaagaaagcatatgatgttagacgatgaccttccatttactttccatatgtaaatagtctcccgctcaccatcatggtcagtaaactcccgaggaattgctgaaacaaactgcaatagtgttccaagaggaacattacaagggttcaccacagaagcagcagtttctaacactttttgataaactagaaaatggaaaagaacaatcaaaagaaggaattttagtgtgtttaatatcgtgagggaagctacaaaattataattccacatacgtataattgactttaacaagataactgatcagtgacctcgaatacggtatttatgattaaaatgctgtctgctgctctctgcaacaaacttcaagacatccagtatatgtgtcatatcatcttgacttaaatgtccacaagaagattcctgggcagtcccagagaatttatcttcgaggtgccccatttccttgtccccgtatcctccaactacatatgccgtagaaacaatacattgtacgagagccataaatccagctctacaaaaagactgtttcttcgcaagagatgccaggttgatcaaaaatccaacccgattcctatgaaatgagtaaacagttcaataacataatgatttttatttatggtttaataattcacagaccctagagaacatatccagccgcacatgaccgataacatatttacatgaaagcaacaaacataaaaagttggaattgtaacttgagacatcctaccttgggttgaggcaacttgtgtacgcactcacatattgagctgcaccttcaattgttcttgatgtatagattcctttcagccctgggagagcagaatacgcaagaaataagtctagttatccgttatcacttcggcaagatggcagtaaaacaatgaagagttccaatacaatttattaaagacattggaatacatttcttcaagaagcacataccaaaatccttgtggtgtgtaggatcattcaaaccctctatgaaaggaccaagaacgaaagtttgggacattgattgtgtacatgttttgtatcttctccactcgataccgaaaaatgactccatgaccgtgcacctgactaaaattgaaatagatgaattagaaacagaactgatatgaaatggaggtctgaattaaccaaagtgtgttgccaacatggatactttactttaagtgacgctctatccatgagtaaaagagaatttttggccacaatgggacaacttcaaatactgattttatctgatgaacaagtgtaagaaattgttgaatactaactaaacaatatgctacaacaagcaaacagtacctagagggttatcatgacgaaagcctcgattccaaagaacctctaaccaattaaaaattttagcttcttcatctggagtttccatgtgaccatgatgagagttattacagtcggatttcaaggttccatcatatctgagagatgacttgattaataaatcaatctgaaaggtagattaaaaaaagcaatgagcagaggagaaacgcatcaagagcagaatatttacaaataccagagagattaactgacctggttactccatgctgcttctacaagatgagtgccgtactcctcaagcatctcatacaagagcagaaaagcttgccatccctgctgactagtcaacccagagtcgacagagccatacaattctccgacgccaagcgacttggcttccttttctgcccacgtctcctttcttgtcatagaccgattaactgaattcccttcgggcttcttctcagaaatggtctcactcacttcaataatggataaaactgatttaagtatatgcaatgactgcttccttactaagctctcatcaacaacctgaaaagaaatgttttgtactcatggatgaccctattgtggaaattggagaatctgtaagaatagcggtatttttgccataccaagcctatcttgatttcatcccaaaactcttgttcagacctcaagtcaaattgaacagcgtctttttctgaaacaaaactttcagttccgtcagtccaagagccagaagaaagacacaaagacagaacactgtaagcatcccttctctctattgatccaaccgagaacagcttcttgcagcattcccaaattctttttatgaagccattcctggagtttacagctttaaaaatcattaaagagatcaaagaaaaaaactaaccaaaaagcacataaatttttggttcttaacctcaccttgaaagtatgaacagatttccttggtgtgagatcttcaaggatgactgagaagagaatgccttgaaaatagcagggaggaggaaactaacagcacaagaacgatgttctacactttgtgacaaaagccgctcagtcgtattacacaaatcccaaagcataccagctgcaaaactttccaccttcggagctgcttggtgactttgaaaagcagcattcagaatcaaattcagaagatggcacgacaatggaattggaaatgatccagacaactgtgcaatgtagttttcatccatatctattgtattcaaagaatcacggaggcagaggtcgccccatttgatgaaatctgattcttcgtgttgacgcattcccatcgaaaaaccaactgatcttagtaaaaatggcaccaagctcactcccaacatatccaatacattagtctcgatcactacatcaaagaacgattctacaatctggtacaatcaaacaaagaaaccaaaagaaacaacaaaatgatcaacaatctcaaggagatcaaaactctaaggactatagtcaacagcagaaatttctaccttattaagcatatccaaatcatatgcacgaaccatcttcatcaatggaataaacactctccacacaaatagctgcaacgcattatgattatccgcagcaacaaagcctgcttcaacctcataaccatcaattaaacaattctgtaatcactaacacatcatacatatctaaaaattcaaaattggtaactcaccaaaattctttagtagatgacaaagcccagccaccaatgaagctatgtggttgcaatcatcagaatcaaatctcttgtccccatttaccgtatcctattcaaaaacatgttcaaatcttaaattgaacaatccgaagcaaattgccgaagtgtgaaacaataaaccaatcaatcaatacctctaaacgaaaagggaattgctcaatgagagattcgaaaagagttgaaggagatacgcctgtggagcttaaaacacagtcaaggaaagcaggaatagctgctggtggaacttgcttgaagctcagtgacaatgaagtaatcactgacgaacccatttcaattgaagcttcgaacttcaaaaaaattggctgcaagcagccagaatagatgaagaaacgtaaacgaatttgaaattagtacagagggaagtgttacgaggaatctctctgttaaaccctttcaaataattttcatggcttaggacagataaaccctagtcgtataattaggggggaaattagaattattgataagggctttcttgggcttaacttagtatgattgggccgtatgggatagacttcaggagaagaaaaaaaaaaaaaaaccggaaattgttcgggggattgaacccgacgtgaatcgaacacgcaaccttctgatctggagtcagacgcgctaccattgcgccacggatccggatgttattatgttgcatttataaaattataataccgtagtatacgcaaattaaacaaaacattttgaggacgcgttcccaacacggccggtgaccaaagagtcaatttaagcccgctttaaagatatcaaaatgatataaaactctaattgatcgagttaacggcaggagaatcaaagctactaatcataatcaagaaatttaatatatatacgctattattattgttttgaacgataaacacgtggtctggtcgtgattaaggtcctaattatgtcaacgtttgcctgccacattgcagaccgaagtactaattccacaccgactggtctacgacatatttaattcataaacacaatactttataattaaattgattcttgtagagatttggcttcatgatctgatttatttagttaataaccatttcaacagataattacagtttagagcctttttccagttgtcaagagtgttatggttttaaaatggcaccctgtaaatatcacatatgttagtggatttattttaccaaagaaacaaaaaatgttaatggattaaaaaacttgtgtttttttagatagcaaaaccaaaagaagatatggtgaccactaacacgatcagtcgaagacaaatgtttcccagactttattattggcgtttccattttgcatattagtcaaattatggagcatcgcaaatatctaataaactaactatataaaaagttattataatacagggttaccaattccgtatattcagaatattcctaagaggtgccattttgactaataaaatggacggatctttgatttattccggaagtgaatggatattagaagaaacaaaagaaattttgaatttcttgtccaaaaaatatttttcccattcttagtatacagaaacatagaaaatatcgtgtatgcttacgtaacaatcaagttgtaaaaagaaaaaaagacagaagataaatagtacagaatgaacataacagaaatcaatctatggaattaggtacaattaggttcggtctaactgaaattacatgacgacagaaaaaactgaactaaacgccgattctattaacttccaaaactgactcgtctcacacgcgcttactatgattcacacgtgcgaatatgccatcatataagcgctactaaaattcattccaaaggaaaaagaaaaataaataatcgatctcaaccgtccgatcatccatcttgccatcaccgttcaccaatcttcttcgtctcctctctctttctctctttttgctgtttctagctcctctctctctggatctcgccggcgaaccgtttctcttgggtggtgagtgttgcttcttatttttaagaatctttttcttttatttccatcgaatttcgtttttttgagtttgatttttggcctgtggaattctcgatgtttctacattgatcgtctggtttcgaatcgtgttttactggtacaattttgattccatctccgtatcttatggattcgaagaactttgtgttttttttttctttcttcattgatgctactttgctagggtttacacttttttcttccatggtaaaaaaatttgagcaaagttgttgagattcttctagactgttttcaattttacgtttcacaaagatttttttagatgatttgtttctaatgaaatggcattgtttgtgttctgtttccatatgtgtagattttgaaaatatgtttgtgatgattgtgcagtaaacagtagcaatcaagctatagaatctcagatatcgctgaattagctgttggattttatccgccttttcttcgttatccggggctcgggtataaggtttcatcgtcttatttcatctgtaaatgggctgcttccactcaaaggcagcaaaagaatttcgaggacacgaagaccctgttaagcttgcctctgagacagcttgtaagtttactcgcgctataagtttaaacctcctctagattcatttctctcaaagctgcatgttcatttgttttctgatatgagatgagaatcatcagttagattcaaatcattctttctctgttcactgatttagtttatctccggtttggatttttttagttttgtgttttggagtctttgtctgcctaacaatttctagtaatgatccttcaaagttggttaacactctatctcatgtttcttgttaccaataccatcaccttaatcttgttccttaacttgtcaagacgagttctctctccatgcaaattctaaatgtgaattattagtctctttgtttgtttgtttgtttgttcctggtaattctttgttttgatctcgtagtgttgcttgtttttttctcttttccagttagtgtgagtgaggttgaagcattatttgagctattcaagagcataagcagttcggttgttgatgatggtctgattaacaaggtacaaagtttgtttcttttgacccaatttggatcttttcatgaccccatcgttgtatctttttgttctttacgctattcatctacagtatttttcaacttagttgactttatttgagcaataattattcttccatgacgatatgtctgttccatattgcatcgattcaatgtatcgtagcccttaatgtttgacttgaacttaacttattttattgattgctttgattttgaattttgaagccttcatggcccaccttgtttatgttgttttttaatcctggcttcacatgtatgcaggaggagtttcaacttgctttgttcaaaagccggaagagggagaatatatttgctaatagggtaaaatcttaattcttcaggcttttacaagattcatcttctggaagagtgatctaaaccaagataatatgtccattatcctaaacaatattgcttttccgcagatatttgatatgtttgatgttaaacgaaaaggagtcatcgatttcggggactttgtaagatcactcaatgttttccaccccaatgcttctctagaagacaaaatagattgtaagttgacataagatagtttcatatataggtgtttattgaagcttttgtgaagagatttattgattctggtctgccattttttctcagttacgtttaggctttacgacatggactgcacgggttacattgaacgacaagaggtaatactaacttgcaagctttgaatactagtcatgatagatctttgccatgttcttgagtattcatcttttacttaataactttgcaagaaatcgttaatgaatgtgatatatttgcaggtcaagcaaatgttgatcgcgcttctctgcgaatctgaaatgaaactggctgatgaaaccatagagataatactcgataaggtttgttgttgtctaaggctttatttttctagatggtatacatttagagatgatgttcttaatgtggtttccttcgtccttctcatatatgaacagacatttgaagatgcagacgtgaatcaagatggaaaaattgataaattagagtggagtgatttcgtaaacaaaaatccatcattgcttaagatcatgactcttccatatctcaggtatattacaaattgccttttatggaaaccaaagaaaactgaaaaatgccaaatgaaatgtcatattaacttgtacataaacaatgcagggatattacgacaacgtttccgagttttgtcttccattcggaggtcgatgagattgccacatgaagaaacaaactggtttaagaccgagtagattgccacgagttggaagaacaagtctgagctaatcggtgtaatcaacatctgtttgtaaacagtagtagagcatattctcttgaaattgtttgggttacttttttcttctcacaacagtttaaaattttgggtttttagcttacaaaaaaaaaaaaagaagaagcgcgtaatcaccaatccttcacttcatatagttaggaaatgttaatgagtttgtacatattacatcatacgtttgttgtaattgttttttttcaagtaaaaaagtaaagatttgttacgtttactcggggttctaattgttccaatggaatcttatactgcaaaaacgtgaatttgagattttgttgggtccttaaccgcaaaagcgaaagtacgaatgtcctaggacccgacccgatgaaatttacagtcttgccactcttctcttgttacagtgttcctctcttctctctcgatttcgaagtttccagcaatttagggttctttctcgattggagaattcgtatgttgttatcatgttctcgtcattgttgtgctttctttgttaaattctagatttggaatcgaaattctagactaatgtttaggaaacggaacttagttctagaatcatttcgtcgattcgatagcggtaacgtagaaaccctaatttcatgggtcttgtgtagtcgcacctcaaagccgtctctgttctgtactagtgttaaacctgctagattaaactgggaagtttcttctcaagtaattctcaagaagaagctagaaacagctcttaaagatcaccgtgtagatgatgcttgggacgtgtttaaagatttcaaacgcctctatggatttccagagagtgtaatcatgaacagatttgttactgtgttgtcttactcgtctgatgctggttggctttgtaaggctagtgatcttactcgtttggctttgaagcaaaatccaggtatgttaagtggcgatgtgttaacaaagttgtcgttgtctctagcgagagctcagatggttgaatctgcttgtagtatccttcgaataatgctggagaagggatatgttctaacctcagatgtattgaggcttgttgtgatgcatatggtgaaaacagagattgggacttgcttagcttcgaattatttggttcaggtttgtgatcgttttgtggagttcaatgtggggaaaagaaatagcagccccgggaatgttgtgaagcctgatacggtcttgtttaatcttgtacttggttcttgtgtgagatttggtttctctctcaaaggccaagaacttatcgagctaatggcaaaagttgatgtcgttgcggatgcgtactcgattgtgatcatgtcttgtatttatgaaatgaatggtatgcgggatgagttgaggaagttcaaggagcatattggtcaggtaccccctcaacttcttggtcactatcagcatttttttgataatttgttaagcctggagttcaaatttgatgatatcggttctgcgggtcggcttgccttagatatgtgcaagagtaaggtcttggtttcagttgagaatcttggatttgattctgaaaagcctcgggttttgcctgttgggtcacaccatatcagatctgggttaaagatccatatttcacccaagcttttgcagagagattcatctctcggagtggatactgaagcaacatttgttaattattccaattccaagcttggtatcacaaacaagactcttgccaagttagtatatgggtacaagagacatgataatctccctgagctatcaaagcttttgttttcgctgggtggatccaggttatgtgctgatgtcattgatgcttgtgttgctattggttggttagaagctgctcatgatattcttgacgacatgaattctgctggctatcccatggaattggccacatataggatggtcttgtcaggttattacaagagcaagatgttgaggaatgcagaagttcttctgaaacaaatgacgaaagccggcctaattacagatccatcaaatgaaattgtggtttcaccagaaactgaagagaaagacagtgaaaacacagagctcagggatctcttggttcaggaaatcaatgcaggaaaacaaatgaaagctccaagtatgctctatgagctaaactcgtccctctactacttctgcaaagctaaaatgcaaggagatgccttaataacctaccggaaaatccccaagatgaaaatcccaccaactgtccaaagcttttggatcttgatcgacatgtactcatctcttggcatgtaccgggagatcacaatcgtgtggggagatatcaagaggaacattgcaagcaaaaacttaaagacaacacaagatctgttagagaagcttgtggtgaactttctcagaggcgggtattttgagagagtaatggagcttatcagttatatgaaggagaatgatatgtataatgatctaaccatgtataagaatgagtatcttaagcttcataagaatctatacagaaccttgaaagcatcagatgctgtaacagaggctcaagctcagaggcttgagcatgtcaaaaccttcaggaaactagttggtatagtatgagtgtatgactttatttacgtatcccctgtattacatttataccttatacatacggttatagtctctcttaataattctctctttcttctctcttcaactcctcacggtaacaacttgtgcggaagttaaaaacaaaagtttgggagtttttggaatattattgaaaattcagggattacttaaaaagttgctcctaaaatgggcctttaatttatataaagctaaactggcctgacttttaaaccgactgaactcaaactcggtcgggtcggacttttaacactcggatctgagctatttgggtttggtggcgtagaattcgatcggaaactctctgcaacggaaggagaaatagagatacctaatttggtcatggattcaccgccgaagaaaaatcctatggatgatttgttcggcgaagactccgacaacgactcacgatcttcgcgttcgaaatcgtcttcttccggtaatgcttcttcgtcttcttcctcctcctcgtcttcttcgtcttcgtcttctgcagcgggaggagatggagagggagatggaggtggtgcggattctggcagcgcaagcgatagcggaagtggaagtagcggcgggaaagaggagcatggagatgataaagtagagagctatagaagcaatgataatggagaaagtggagtttatccttatgaagaggaggaagaagaagaagaagatgagaaagatctttttgggtctgataatgaagagtatactaagacacctgcaattagcacttactcaattccaggttagttcgaatttgcttgagactgaattggcttttgggtttctctggctgctaagtattttctgttatgaaataatgacagttttgcctgcgggatggagcaatgataaccatggtgggagagggggaatgggacgtggtcgttggtcaaatgggagaggaggacctgggcttcttcctcggcctggaccttaccctggacgtggtggtaatcgtggtggttttggcgggagataccagaattatcagcgtgatgaacgttttgtttctgagcttaagctttcgaaaagcaaagaaacgttggctagaaaacaaaccaactttcaggaggtaatatatatcaaggaatgctgttttaactactacatttttatggttatggtaacgcgtttcgaattgcttgatattaacagccatgtgagcttacttgctacagtcgagtagaaggtggagaagtaatctacgatgaccaaggattggtgaggcgtttggtgttatagttcctttagattctctcttttcttcttttgtcatcccattgaactatttaattgatggggtatatgcagacctttaaacataccaactatcacagcttatatgtatccactttgttcttgtttcccagaggcttttcaaacgtcatattggtgaagagattggagcggatttaaatcaaggttatgatacttttattgagaaaaaaggtaatgcattagtggcactagtgaactattagcatgtgtaaaatgaagaattgtgatatattcagctgattagtcgttcttttgaggcagatctgggctctgagggctttggtgaccttcttggcagtattagagcaaaaaacatttcgctggacaacattcattttgtggtatgaagtgcggatgtatatatgtccatttcactgtcaatttattactttgaaagaggttatcttaatggtgtcttttatttttgcttttttggacagacttttcgtaataatctaaacaaggtaagtgagatccccaacagttatttgatctctatgatatcaaatgaatcactctgtgcacattgtttcattctttcagatattgggcgctgcttacaatcggcatgaaccgtgggaaatgggcgtccataagagaaatggaaccatatatctagatgtgcataaactgcctgaaaggccgcagagtgacttagatcgccgcaggtaatcttcgctttaattgtatttgcggattggagtgattctactagttttattataaatggtgctaaagaatgtctgtgtagaagacaatgctaatgttttgaaaaaaatgggtcataaagagtttataacactgctctgcatattttgctactaataaacttgatgttatgtttccatcagatgttactggggttattgttttgaaagccttgctacggaagatccaggaagagcttatggagaagaaatacatcatgtggatgcaaatgttgaattttgttctgttgtcaggactaaactaggagctcaccgagttatgatgggtgctgaaatggactgctgtgatgtatctgataagggaaaaaggttttacgtagagttgaaaacaactcgtgaggtatgactcttgctatagttttcctaataagctcgtttgttatttcagcttctctctttcatttcacacacatacatattggccagtaatgtccctactgtttactctccagttggatgatcgtaccgttgacagatttgaaagagagaaattgcttaaattctgggtaagtatgatctaacacgggttacatatatcttctttgtttctccattcttgtttagacttaaatggttttaacatgctgcagatacaatcattcgtagcaggagttccatacattgtcgttggatttaggtatgaatttgccaaccattctaaggataaactcaaaaagtctaaacctttcgccatttaagcaaatcagttcaagataacattaccatatcccttttcatcttgatgtagagatgatggaggaagactagtacgcacagagagactaacaacgagagatattgcgcatagagccagattgaaaaactattggcaggtaagtgttatcagttctcattacagacatgaatgataagaaacactaatgaatttgggaactagggaggagtgtgcttggcatttgccgatgaagttctttgctggctatacggcactgttaaagaaagtaagttcattttttgttacgtctacatagaacaatggaagaagatcttttaaatttacatttcccaacaatgtgttttgcagacgaagattacatacttcagttcgtgcaccctttcatgagactagagcttcttcaagctcaatcttgtcctgatgccatcactaatcatgttcaccttctacaaaatcctgcatcaccaccaccaccacctcagtaactttatgcttctttagtggagtcataaactgtaatacttagggttcaaaatcaaatttgaaatgaaggtttagattttggatttcttttgtaacattttattaaccaaaaacccaaacattgaaaaaggaaaaaaaattgtgattcaaagattttaaactgggtccaagcagaaagcgagtctaacatgggccgggtctgttttaaactgggtccaagccttctaatcttatcacgtgagcgtcacgtgctctctttttctctctctctctctctccctctggctgacgaatcaccggagaacccaatttgtttcattcctttcccgttttgcccttccctgttcttttattcttttcttatctacaaaaaaaacttcgagcaagaacaaaaaaaaaaaactgtccatgtaccacaccatgagattagttgtcagatagatattcgcgagacgagaagctccaattaaaaaccctagagctcatctctctctccaggtacggccttttcgtttttggctttcaccggcgtggatctccggtgacggggagattcggaatttcggagagattttagatcatgtatagggagagaggtatggttggatcgaagtcggaggtggtcgatcggaaacgaataaacgagattcacgataacaggccttcgcattcgatgtctcagcctgtcaatggaaaaggcaaggtaacatcgacctccgttttgatggggaagcagcaattgcatgataaggaatcttcacgttctggttctatctctaagactaacatttccgacggttagattcgattttcccctctatcgctatttctctatgtttatcgtattcgcagattgtttatttcgagttcttgtcctgtgttggtctcctgatttgggattcaactttcttaaaattgattagaaatttcttaatttgacctattgttcttgaagaaatgttattcattttgttgttaacaaaagctagaagcttgatcttagacgcagtctagttttggttgctgtgtattcattttgcttatatcgagcaaatcattgttgtttgcttaagaacaagttataagaatgatgctgatgaaatgttttgtgggcatttcttgtggtgataatagctgtggatatatcagacacagacagcgaagaatcagaggtcagtggttctgatggagaggacacctcgtggatatcttggttctgcaaccttcgtgggaacgagttcttctgtgaagttgatgatgattacatccaggatgactttaacttgtgtggactcagccatcaagttccttactacgactatgcccttgatttgattttggatgtggagtcttcgcatggtaagtcttacccatgaattattagtatgtaattgtgtgtttttcataatataatagccgaaaacttggttcgtctttcttttcgttttgtgtcttcaatgtttgatttggattgacgggttaacaggtgagatgtttacagaggaacagaatgaattgatcgagtcagcagcagagatgctatatggaatgattcatgctcgtttcatattgactagcaaagggctggcttctatggtaaagaacttttttagactcaagttagatacttaacatatcctatagaacatacactgattgttgttttctttacaatggttttgcagttagacaaatacaaaaactatgactttggaagatgcccaagagtttattgttgtggccaaccttgtttaccagttggtcaatccgatatccctagagcaagcaccgtaaagatatactgcccaaaatgtgaagatgtctattacccacgatcaaaataccaaggaagtatcctttttctaatctcagtggtaaatgcagttctgtgcggttacacacacttagctttactttgattgtcattagataattttatcatgctgttttcgttgctgctatctttggtttttgtcattctttaacacacaaaaaaacagacatagatggagcttactttgggacaacgtttccacatctgttcttgatgacgtacgggcatctgaagccacaaaaggcatcacaaagctacactcaaagagtgtttgggttcaagctacacaagccgtgaaggaaacaaggaagaagaaatgcacccttgggttttgagaaacaagaaatgtgtgtaaacaaaacaaaaagaaaaagaccatttgtatcacagaaggtgaaactagttccatctctctctctctctctctctttttctttgtttttggtattgtgtttaggtttagataaaacattagcagcatggactggtgaactgaaatcccatattattgtaatactttaccttattgttcctttttgctttcttcttcccactaccaaatagttatcacaatttccccaaattgcttgtaccaatgttgtgagcttattcttgtttatctctcttatgattttgatgtcagttccatccggatacaattgttccataaagcccattgggcccaacaatccacaaggccaaccaaattcgattatattaaaagtttcggccctttataaatcaacatgtagctttctttgaccagtgaacaagaaaaggtttctcctttttaatttaggtgtataggtgtgtgctcctgcttgcatatagattacgtaagagtctctctctctctctctctctggaagagggccttgtgattgttttcttcttcttcttcagcttctaatcgaattcgttatcgaattgaaagtttcgacctttcgtcgttgtccctcaatacgctctattcttttgattagcatccctaaaactaaaatcgcagagagaatttctccgtttggatctctaccaaattggggcgcttttgggaataatgccaccgtttatgtctggtctcagagctgtatcttccttactttcatgtcgaaacgcgattagcaggaaactcgttagtcgttctgggatccctcgagggagttttgtatcagatcaaattaggagatttggttctctttccggcgtcgagagatgttcttctaattggttgatgtccaatgatgacgctagagtctctttccggagattgcctggctctgtgagcctacttcagagacggcattttctggggtgcggagatggggaagaaggtggtggtgagttatcaaagatctatgaagagagacgtgtcttagggtaattacttaaaaactttgatctatcctctgttttgtgcttacaatagcttttctcgcctcttccaaaatcatctgaaatggcacaactttgagaataggttcaatgatctattatgttgtttactggtccttaagttcttgttttgtagatcaaatcaacattgaaagaatggttcaatgatctttaattgttcaggaatatgatttgcctttgtgtttgtcttgtttccaaccgatctagtgatcttctatgaactaattctgcagaaatatgatttgttagacagatgttgtgtgttccctgtgcagtttcagggattccttgattgtttgtttgctgcattgagaatattacgtcggctatacattgctcatttctgatactaaggacttgaagttcatatcctcaagcaatgaagattgagttactcatgtgtgtttcattttattacaggtatactccggagcaaatgtttaacgtagttgcagctgtagacttgtaccatggatttgttccttggtgtcagcgctctgaggttcttaaagaataccctgatgggtcatttgatgctgaattggagattggtttcaagtttcttgttgagagttacatttcccatgtcgaatccgagaggccgaaatggattaaggtaaagacttgtttttgcttttgttttcatctttcttttttgttgaatttgagtgagtgatgaatttgtgacatgattcgaatctgtatttttcagactacagcgagggacactggcctgtttgaccatttgataaacctctggcaatttaagccagggcccattcctggaacctgcgaccttcacttccatgtagatttcaaattcaattcacctctctatcgccaggtaaaaaaactactttgcaaaacctctgcacctaagagtcaaactgtttagtaaatggtgctatggaattgttaggattcaaagaaatccacaagagaagatatgattcctttcttcctctaaagagttgaaacttggagattgttaattagtaaccgcagaaatctacgctgaagttatgatttcttaattccttagacattgttattcataggagaaatctacaagaatttttttgacttatttcttcctctaaagattcaaacttggtaataagaacaccaagatgatggtttcgttgttactcaaaagatgaatcttggttaatgtaaaagcttgaaagtagtttgagattgtgtattttctttgaaggtggcgtcaatgttcttcaaggaggtagcatcaagacttgtgggggcattcagtgatcgatgccgactagtgtatggtccaggagtccgagtagatgaaaacgcatatgagcaaagagcttgagacatatctatatatatatcatggaagtaacaacacatcagtttagttttcatcttgtttgctagagagcgattgcgcatagcatgttttgttttcttaaatatatatgaatgcttttgcataagaagatgaacacattagatgtttgtttaaatgtaaaagcagaaaaataaacacatccatttctctgttggagtcatttttttcacttcaaaagctctttgttaatctaaatattgatgatgacacacatgttgaggtatgtggtgatgcaattgccatatcatattattatcaacctttcaaaaattgaattagttgagaggaatttaattaactaaattggaaaagtgtaaaaggtccggaagatgaacattagtagtattcaaaagtctttcacttcctcctgtccaaatctagtcataactattgatctcaaatggttttatgagtctattggttcaagtaaagagtattcatgtatataaatgaatcatctctttgtaattaggcaaataactttcatatgatttgatggagtttacagaaactagcataatcatttcgttaatgtgatgttagagtgcgttttttgatgaaataacataattattcgtatatatgaaaggtacattttattaggccatgcaaaaatatggttttggtactttgttttttactacatgtttagttacttaaaggtacatttgtcttgatacttctcttctcttctctctcgggaactaattaacctaaaataaacatatcaaaatgagaagaaaagatttaagtttaccctaaaaaatcatataatgctcttttgatttgttatgggatcaatttcaagattgaggcattttgtcggaaggtgaaaagaaaagaagaaaactaaggaacggaagtggacgacgcggttttgccttttgcttcatcattttctcaaatgaccaaaaaacaaaaaataaagcatctctttttagtcaaactttcatggaatttctcccactctttattccattttaaataaataaacaaaggagtgaaaaagagaagagaaacattaggttttctaaacaatataatgaaaaaaattcgaaacgttataatatgtacataccaaattcgaagttacgaggtccaaatttcaagatgatatcgtcgtggtttaacacattgacttgcgacaacaatgcaataactacgagtaattgagtctatgacccgatccaataaatacataagactagagtattgacttgactaaatcacacgcttctaataaaccccattagtttcatgagccatatctacgtttccaatatttgaattggaattacatgattgcaattcccattccctaacatcatttgttctacatacaaaaacaaagaaagttttttatacgcaaaatgactcacatatggaatgtttatttcaaaaaaaaaagcaatgaataaatacaaagaagtaaactatgggtttggtttggtctttgtctcagttaagtcaattatgaataactctagtcctctgtttactgttgttgtctatttacttttcgacgtctgtttccatttctctttcattttcttcttcttgatcaaaactctttaaaaccaaatctacttgtgatatccatagatagaaaattttctgtcttttacttacctctctcttttgtgttcatacccatctaatcatccactgattgtgactcaacccattttagggtttcttcatacaatctactctcttaccaagaatacaaaccttccctttttctgcaaacaaaagaaaaagtctcactttttcattcatagcacctgacttttcgtaatttcaccttagaaattcttctgccagttttgtgtataagtaaaaaaacaaattagaatagatacacccagatcactaactaaagagcaaagaaaagaaaaaaaaaaagagaggagagaacatgaattgtctgttcttgttcatgtccaagaaaccaaaatccagaggaaatatggagaaagagaaaaaaaacataagaggaagagagttcttgcaaaagtcagctccagaattaacgacgagaaagacaactttgtcgttcaatctcccaacaccaagatctctgccatctccaacgagtatcaaagacttgtacacagacagagaacaaaatcaaaatcaaaacctgagggttttttctttcaaggaactgagtgacgccacttgtgagtttagcaggaagctaaagatcggagaaggtggctttggtagtgtctataaagccaccattaacaatcccaccgtaggagattctcattcttctccacttaccgtagccgttaagaaactcaatagacaaagtctacaggtatgcgaaagtttatgattttttttgtgattgaattgcaaatagattagaactgtaaccaaggaactacaaatttcagagatttgtttgtttgttgaataatgtagaaaaatgtttgatcttgaatattattatgtgatcctctgttttgtaatgaaaagggtcacaagcaatggctagcagaggttcactttttgggagtggtgaatcaccctaacgttgtgaggctcttagggtattgctcagaggacagagagagacttttggtttacgagttgatgtctaatcgcagcttggaggatcatctcttcactctaagaaccttaacgttgtcgtggaaacaaaggctcgagatcatgcttggtgcagctcaaggattggcttatttgcacgaaatccaggtgattttgaatcttaaaaaccttttgatggttttatccgtaactaggcctaaagaaactttatatataagcagatcacggatcttttttctataccgtatcaaacaagctggaatgaaccaaaactgaattagcactaactagagacatcatgtgtcactttttgggggtaggtaatatacagagacttcaaatcatcaaatgtgctattaaatgaagaattccatccgaaattatccgattttggtctcgctagagaaggtcccgaaggagacaatactcacgttacaaccgcagtaagtaacatttttttccttccttccttagaaattttgaagtttaattagtttcttcatccgcaagtaacagttttttttcttgtttcttgattctattaaaagagagttggaacagacggctatgccgctcccgagtatgtaataaccggtcacctcaagacacattgcgatgtatatagctttggagttgttttgtacgaaattatcactggtcgtcgcacattggaacgaatgaaacctttagctgaacaaaagcttctagaatgggtcaaaaaatatcctattaatagcaaaagattcaaaatgatcgttgactccaagctatgcaataagtatccaattgctatggtcaggagagtggctaaattggctgatcattgtgtgaacaagatcgataaagaaagacctaccatggcctttgtcgtcgaaagtcttacgaatatcattgaggaatcaaattctgaagatatgggaagttctgttggcattagaggctagaggattagtgtttttttttgaagagtagagaatatatgtatgaaaagaagcccaagtaataatattaaagcccattaaccagaaagtttgtgttggtcaaacattcttaatacaaagttgtgaataacaaaatcctatctttgtgacttgtgagttatagaaaccaggagtaggagatgaatgttaaattcttaatacaaagttgacaaaccttgtaaatctttgaaaagagtttatggaaaaagaaaattgtactgctctttaaatggaaaaacaaaaaagagttgtactgcacaaatgatatcaaagaacatgcgcagaaaaagatgtcttttgatatcccattatattattcctatgagtcatgacatcaaacctaccccaataagaagaattgataccattacttacaccaaatttatttcgaatcataaatttttaaccacatttataattcaacaatgagaatttctaaataataggtgaattatttattatcattataatattaatttgtacattttcattacaatcccatcattccaaaataagagaacagtcaggctgatgatgttcataatacatacatattttcattcacattaaaaaaaagaaaaaagatttaccaaattcacatagacgttttggccatagttttcttgtacccaaaattgcatatatatatttttcttcaagaaaaacaaaactaataaacatgaaaataaaacaaagaaaggacaaaccctttaaaaaagagaggtttcttcgcttttttttttttctttttccctaaccattttttttttggtttagtattcaaattcaaactaaagaaagatctttagatgaagaaaaaacccataaatccattaactagcttttacagcaatatgagcgttaatggattctctatctccctttttttcctttataactttaaattaggcagcagcaacagttccagtgcggaaagcatagttacgagatctagttggagaagaagaagagcttcgcttttcatttcttctcatagctttcacagatgtagacagactctgtttcttctcttttgcttcgtctctttctatctgttcttctctacactcttcactacagaacggtgtgtctcctctgttttaacacaaacatttgaaatcatcagacacaaattatatagatcatacacgattcttaatccacaaggcaaatcagaattagggtttcttcttttgttgactaaaatatcaaaactttattaagcaaaccaaaacctaatcgttacagtaatcaaatttcttagcttacatagcaaatgataatctgggtatgtttcaaaaagaaaataagatctagaacaaaggaagtacctgtacatgaagatgtctctgttatcaccaagacgtttcttgcagaggaagcaagagtccaagaaatgaggctgtccataaccgtaatagctattgtcgaatctaaaatcatgaaattttccagatctgggagatgaaacagagtactgatgatgatgatggttataataataactctgaggatagttgtaacaagaaggacttgaaactccagcttccatctcagataaagaaacaaaaccatcgtcttcttcttctatgaaataaggctttctcatcgaaacctccatttttttctgaatcttgtctttttttgttcttatttggacagagatagagagagaggtttggtgtggaggagatttgtgagaagatggagtttggtttttataggaatagagaaggacaggtttgattctggttaagagagagaatctattggcttcttgtttttgcaataccgcttttttccttaatcgaatttctttaataattttaactacctaaccattacattatgaagaggaataattgagccactagtatataattaagcattttcttatgaatcaaattacttatttcacttgtgtataatagtgtaaggctcttttctatagaaacactatgtagaaaaaaaatatctagtgacttaaacagcaatgcaaaactgaaccaaaacgattgaatcaaattttaatctaagaaaaatagatatacgaaaaatacctaaaatttaaaaccggccaaaaaaaaagacaatgactagaaacaaacttgattttcataagaaagtttcagttaaattacattgtcattgacccacatcaactatgtataatatatgctattataagctacacctttttttatgatcttaaaaaacactaaaataaataacactaagatttgttgtctaatcaatactactagaattaataacatcattaacctagacggtattattataactatcaattagtataaaactggaataaaattctttggaaaatggcaatattgttgttgaagctaagaacaaagggcataaacgtaatagcaaaaaccactgcaaagaaaatcttcgaaacggttccataaaacatgggtcccatccgcacttggacgttaaagaaagtcattggatcgtggggtccacgagcgcgtgagattgcgcgttacgtaatatctacacagaccaccaccacttgtgtcttttctttattggcaaggacaacactttaaattattaatagaacatatacgacgtcgttttctcccttttttaggttctttatttcttgtgatgaatgacgtttttgcaaagactttggaaaaaagctctgtgacgactccgcactcaacattttcaaaaatcaaaattacttttaggctttttagcttgtcaatcaaaagcttaatttgattttaacatgtaaattcgccattttttcctcacacttttaacttgtaaataggaagaatatcaggtttaaaaaacaatgttttgcaatttccatgccaaaagtctcatgacatttcgttatttacttctattagtgagtgctatttcaaatggaaaaaacgaaaagatacaagtatacaactatgtcatcaaaaaaattttatatgtgtaagaaatgtaaaacatctgacatcatggaaattgatggagtgattttatgttatgtgagaacagggtttggttttgataatactccatggttaaacaataccagtaacaacaactaaacatacattaattgttgttggacttccttggaaacaataataacaaaggagcctccttgaagtgtgaaacacgcgcctaaaggatgcgtgtaagcgattattaaaactagtaaacgtcgtacacttgcgcaaggctcggaagttcccaaagtcttaccccacctgtccctttaaagtcttcttcttgtattttttttttttaatatgagtttcgaataaatttcactccatactttaatatgaagaatttcaaagttttatagttcggtatttgataaattagccttcaatgatacataatatgaagcgccttcaacaattatattagttgtgtgtaatgtctccagtgaattattattatacaattctgatgctgcttattattttttctggtcacgacgtttttcattttcaataatatgtctaaatatctatggaaccacgtcactctcagccattttaaattgttataaatattttattttccctcaattgagtcatttccagattctgcttcgtcgctctctttctctcctgtcatttctctgcatttttaaatgtaaattatttctcaactgcataaatcctgtggccccatatttcctagcccataggattgggaggtcccaattcccttttcttaagctgcttatttacgtgtcattgccattgcctctattggaccgttgtttacgttcttattattcttaagaaacctatcatctatgactatatgtgtatgattattaatcgtcgataatttgtataatttgtataattagtgaaacttataccaggaatgtgtgaacaaaatgctgtgatgtttgtttacagtaccaattattttgagttttttttttcctcgacgaaatacggtctagtatgtgaatgtgttgccatagcaagaaaaaacaaatgttgaatttataaggttgatttttaattattatttaagggaatcagacaatgtattacattcgttggttcactatatatttgtataaaatgctgtagtggttgaacgaccaagtattaagaaaacaaacataaacaataagtttgtttaaaatgtatgaatgactaatttgttgcttatgtatcttaacaaaaccttttttttgggtgctaatgatcattcatgcccggttttgttttcaatggggtgccttgttgagtttatttctttttgtcactcttccgttgagtcttttataagagtaaataacttcagataacctaaaatctttaatgaaaaaatcaccccaacatttctccataatgttaaataagtaatactttttgagaaacgaattgagatgctctaagttattgatctaacttagaatgtataattataataatataaatgtcataataataaaaaatgtattctctataataataaaaaatgtattctctatagattcacacgaatgacacgtgtgtcccagtacttggcataccctgacacgtacaccgtaaaagagcagtacttgactacttaccagatcaatctagtgccgtccttcgtttccaagatggacggttcacaatctcttattaaacaaatcatcgtttctgcgtcgtacgattcataattgattattctggggtccatttaccgaatctgctcagtcaagtctccccctgattttactctacttttctacaagttcttgtcaacgtagaagagaagattatttatgtttacatatattttaaattttttataatgtatagactatagtatatatattttaagtcctgttttgaatttttcaacaaaattataagcaggcggtctaataataatattacaccacgtttactcaaaataattttatgaaagaagtcttatattcaacacgacatcaatatagtatcaaagtaatatttagtttgaaatatttatgaatcaaagtcttcatctacaaaatttctatattaataaacaacgtcttaagtgagaaaatgctatatatttgatctttctacaataccatatccatataatataatcctttaccattttaatttgttagtgaaagctgttgtatcatcctatttggttttatattcgacagtcgggtattatacgatactagaaaaaacgatatataacaattccaatcgagtaagttttgtgtatccgtacgataatttgcagacacagttcgtgaaacaatacttaatgattaaaaaatactgtactatttaatcatcgagtttgtcacatgggatgagttcaaaaagggaacaacatttgtggcacaccaggccactaattatttatatagatataaaacattggaaacaaaaatgaagtttatataattagcaacttgattatagtattaagtacttttaattttagtttaataaccccaagaacaggcttgttcttcaagtttgatggagtttctcagatcattgattacaataagagatctagaagctgccacaaggcaacagtatgtctcctatgtcgaaacacatcggttctcgtattagattctatcccacttactttgataaaacaattagattatttaacataaagcaaattccactaattactcattactttatacttttcttttcttaatcccacacctaatattcaattcttaattgttagtatgtactaataattgtgtataagtaggagccaggaggatagcctaagatacttattttgtcgtttatgaatcatattcttgtatgaattagcttatacttaaatacttaaatcatattcttgaaccaccgtattttacactccatttgtagagtatgaatatttcatttatgggcctgggctttaaaatatacagcctatcatcaatctcaagtttagattgagccgtttgataatattcatttggtgtcactgaacttgtcatatgtactatatgtcaactttattaccttctcccaccacacacaccccacacttgttctaaaaaatcccattttgctagatcatttttttatgacgatgctgtccggataaaccccaactcatccggagatgaccaagcctcttcactatacaacaaacccacaatgttaaatcactcataccgaagtccgagacaagaagtcgcccactcgtagcttgactgttcgcaagagaaaactagcgagtttacaatgtaaaccctaaatactcgaattgatctgcaaaaactattgaagtaaaaaaagttacactaaaatagttattgatatgtcatataaatggatattgcacatgattcagaaaattgaatatattgtttggaaacattgcatggaaaaggtttaattcgtttctaaagatatgtggaaaaaaaaaaaaaaaaaaaaagatatgtgaaatataattagagttttcaagtgatattttctaaaacatatcataattcagaacatcaaactgacagtgtgttacttttcttaaaccatgacggtcgaaagatcaaccaaaatagttgagagaaaaaagttgaaatctttccctgcgatttcaatcataactaacccttgtaaatgttttaaatgatacaagttcttcacatgcataaaaattttgtatggtttttgaatgagactttctatttaaaaatattcttcatcacatagcataacatatatatatatatatataattgataaatttgcctaattacactgaatcctgacactgattaccaatcaaagcaaactgtgaacgtgttcatataagtgatccttttctctttgttttggtatgtctacacgtatactaatagaaaaagtagatgaataattaagtagatggctccaaatgctgcatcatatcgtttattgagggacacaggagtcacatgaatagttggatcgcattattgtcacgtggaaatgacaagtatattgatgcaactcattacgagatttgtctcaccgaactagatttgaaggggaggatcaattcctttatgaaaactatgtaaattaattttaaaatgctggtaatggtaaattggaaatggaagtgtaaactttataattatgaacaccaaaagcagagattataataattatggaccgtccctgcgagcctattcattacttctcctgcgacgcattatactcaaaaatttgaagctaactaatgtaacattttcaaagtccaattctcaatctatggaatatattatgtcttcaagagctattattctaatgacgatctatgctaacaaatgggatacttggaaacagcatgagcatcaggatactacgtgatgtcgctagccacgaggttcttacaatttgataatggtcccgatcaaaagcttaacaaaacataagttaatttcagtttatgttacaaacgtaaacaacttaaatagataaaaacaaacaataactaaaacctaaaaataggaagcatttcccacatttaaggccttaacccaacaaaactagaaacaacacatgttgaggtatacatggtttttgaacccatcacaattcttatccttaattttttctacacaattttttattcgtgcatatcttcataatccataatattctaattaactagattataacccgcacatatgtgcgaggtttcaattttaagaaatgtattgaaatacatttttagtgaaagatattatagtttgtaaattataataagcatagaaaagtatatagtgttatttatgataaaatagatattttattaatttatattatttatattttatttgtattttgcatagtaaataggatttttggatttgtttcgatttggcggaataatatagagatatttggaaaaatctgtgtacttttgttagtttgatgtatatataaattgattgtttttgtttaaaatttgatcaattagattatataatgtaaaatttactctgtggtacactgttggtcgatttttcttgtaactaaaaattcaaattttaagatatagttattttgtaaatattgtttatattgtttaatgtttaagattgtataattatgttataattattaactaagatttcactcatagattatcgtcccatattaatatcaacccaaactcgttccaccatataacttcattccgtaaaatgaaaaattattttgttatttttaaatattgttattgtaatatataaaaaatcgagagattgacatgtggtacatcttcgattaatatatttaaaaataatttgcgatttataaatttatgatattgtagtatataaaaccgatttttagtgtatacctttcaataaaatagagtttttataattaaagtataatagtatttggtttttatatggttaggtaatagtatttggtttattataaactaataaatttgttgattttagttaaaaataaaaaatcaaattaagtaatatttgttttgtttatttttaagattgtataactatcatctattttcttgtaatctaatgttgatcctgaaagaaaaatccataagaatacgcataaatggatagtaatattaggagataaatatcattagaacatgaagtaatttacttatgaatctctatctattgttcgaaataatcgatattctatattgattgtgaggcaatgtgaatgtatgcataacatttataattataagagatagattgtatgcaaaattagattttaatttggattcaatcttagctttactgaaaaaactaagattatacacttgtagtttgattgttaatttaagactttcacctgtagtataccatcttgtattaatatcgatctaaacccgtcaattttacgattttccagcttgttaaaaattgaatcacatcatacacataaaaaatctaatatcttattaattattgtagtatataagattataattttttaatataatatgtataaaattgaatataaatatttcaaattatgacctgttaactcagtagaaagttttcttaaatctattttcacccgttataatatttttcatgtattgaacagtttatattcgtttttaaaaattcaaattatggcatatgcgaaaaaactctaattatttttttataatgatgatattattttttcgcaaaaatagaatcatataaagatgagaagtgaactataataattaataaaaaattaatatgataatttagatatcaaatctaatttgttaattttaattgtttatttttttggaaattaataatgtatttcgtttttctaattaaattaaattaattaaaatttagatatcaaatcttatatgttgattttgattggttattgtttttggaaattaaaaatgtatttcgttttttaattaaatttaattaattaaattagtatttgactttttaatccttaaacagataaattaatttactctttaaaattttatttctaatggtatacctatgtaattatttacaaaaagtaaggttacatttaaaatgtacttcccaaataatatagtaagatttctaacgtaaatgaattcaattttagcaatttcttcaaaacgttttctgaaaaaaaaagcgaagaatatccaaaagaaagaaagtaaacgaagatgtcaaaacgaaaaaaatgccactacatgtggctatgtcctatgtacatcatcaactatatataattcaaatctcattttcaatctttatttttgcctatagaaaacgtcctttttctgtactgttgtcttgtttgttgcttagatctggatggacccatgggcctataacgggcctatcaattaaatactcatcatca

SEQ ID NO: 589 - DNA, 81835 bp, Arabidopsis thaliana
ttttttctgaatcttgtctttttttgttcttatttggacagagatagagagagaggtttggtgtggaggagatttgtgagaagatggagtttggtttttataggaatagagaaggacaggtttgattctggttaagagagagaatctattggcttcttgtttttgcaataccgcttttttccttaatcgaatttctttaataattttaactacctaaccattacattatgaagaggaataattgagccactagtatataattaagcattttcttatgaatcaaattacttatttcacttgtgtataatagtgtaaggctcttttctatagaaacactatgtagaaaaaaaatatctagtgacttaaacagcaatgcaaaactgaaccaaaacgattgaatcaaattttaatctaagaaaaatagatatacgaaaaatacctaaaatttaaaaccggccaaaaaaaaagacaatgactagaaacaaacttgattttcataagaaagtttcagttaaattacattgtcattgacccacatcaactatgtataatatatgctattataagctacacctttttttatgatcttaaaaaacactaaaataaataacactaagatttgttgtctaatcaatactactagaattaataacatcattaacctagacggtattattataactatcaattagtataaaactggaataaaattctttggaaaatggcaatattgttgttgaagctaagaacaaagggcataaacgtaatagcaaaaaccactgcaaagaaaatcttcgaaacggttccataaaacatgggtcccatccgcacttggacgttaaagaaagtcattggatcgtggggtccacgagcgcgtgagattgcgcgttacgtaatatctacacagaccaccaccacttgtgtcttttctttattggcaaggacaacactttaaattattaatagaacatatacgacgtcgttttctcccttttttaggttctttatttcttgtgatgaatgacgtttttgcaaagactttggaaaaaagctctgtgacgactccgcactcaacattttcaaaaatcaaaattacttttaggctttttagcttgtcaatcaaaagcttaatttgattttaacatgtaaattcgccattttttcctcacacttttaacttgtaaataggaagaatatcaggtttaaaaaacaatgttttgcaatttccatgccaaaagtctcatgacatttcgttatttacttctattagtgagtgctatttcaaatggaaaaaacgaaaagatacaagtatacaactatgtcatcaaaaaaattttatatgtgtaagaaatgtaaaacatctgacatcatggaaattgatggagtgattttatgttatgtgagaacagggtttggttttgataatactccatggttaaacaataccagtaacaacaactaaacatacattaattgttgttggacttccttggaaacaataataacaaaggagcctccttgaagtgtgaaacacgcgcctaaaggatgcgtgtaagcgattattaaaactagtaaacgtcgtacacttgcgcaaggctcggaagttcccaaagtcttaccccacctgtccctttaaagtcttcttcttgtattttttttttttaatatgagtttcgaataaatttcactccatactttaatatgaagaatttcaaagttttatagttcggtatttgataaattagccttcaatgatacataatatgaagcgccttcaacaattatattagttgtgtgtaatgtctccagtgaattattattatacaattctgatgctgcttattattttttctggtcacgacgtttttcattttcaataatatgtctaaatatctatggaaccacgtcactctcagccattttaaattgttataaatattttattttccctcaattgagtcatttccagattctgcttcgtcgctctctttctctcctgtcatttctctgcatttttaaatgtaaattatttctcaactgcataaatcctgtggccccatatttcctagcccataggattgggaggtcccaattcccttttcttaagctgcttatttacgtgtcattgccattgcctctattggaccgttgtttacgttcttattattcttaagaaacctatcatctatgactatatgtgtatgattattaatcgtcgataatttgtataatttgtataattagtgaaacttataccaggaatgtgtgaacaaaatgctgtgatgtttgtttacagtaccaattattttgagttttttttttcctcgacgaaatacggtctagtatgtgaatgtgttgccatagcaagaaaaaacaaatgttgaatttataaggttgatttttaattattatttaagggaatcagacaatgtattacattcgttggttcactatatatttgtataaaatgctgtagtggttgaacgaccaagtattaagaaaacaaacataaacaataagtttgtttaaaatgtatgaatgactaatttgttgcttatgtatcttaacaaaaccttttttttgggtgctaatgatcattcatgcccggttttgttttcaatggggtgccttgttgagtttatttctttttgtcactcttccgttgagtcttttataagagtaaataacttcagataacctaaaatctttaatgaaaaaatcaccccaacatttctccataatgttaaataagtaatactttttgagaaacgaattgagatgctctaagttattgatctaacttagaatgtataattataataatataaatgtcataataataaaaaatgtattctctataataataaaaaatgtattctctatagattcacacgaatgacacgtgtgtcccagtacttggcataccctgacacgtacaccgtaaaagagcagtacttgactacttaccagatcaatctagtgccgtccttcgtttccaagatggacggttcacaatctcttattaaacaaatcatcgtttctgcgtcgtacgattcataattgattattctggggtccatttaccgaatctgctcagtcaagtctccccctgattttactctacttttctacaagttcttgtcaacgtagaagagaagattatttatgtttacatatattttaaattttttataatgtatagactatagtatatatattttaagtcctgttttgaatttttcaacaaaattataagcaggcggtctaataataatattacaccacgtttactcaaaataattttatgaaagaagtcttatattcaacacgacatcaatatagtatcaaagtaatatttagtttgaaatatttatgaatcaaagtcttcatctacaaaatttctatattaataaacaacgtcttaagtgagaaaatgctatatatttgatctttctacaataccatatccatataatataatcctttaccattttaatttgttagtgaaagctgttgtatcatcctatttggttttatattcgacagtcgggtattatacgatactagaaaaaacgatatataacaattccaatcgagtaagttttgtgtatccgtacgataatttgcagacacagttcgtgaaacaatacttaatgattaaaaaatactgtactatttaatcatcgagtttgtcacatgggatgagttcaaaaagggaacaacatttgtggcacaccaggccactaattatttatatagatataaaacattggaaacaaaaatgaagtttatataattagcaacttgattatagtattaagtacttttaattttagtttaataaccccaagaacaggcttgttcttcaagtttgatggagtttctcagatcattgattacaataagagatctagaagctgccacaaggcaacagtatgtctcctatgtcgaaacacatcggttctcgtattagattctatcccacttactttgataaaacaattagattatttaacataaagcaaattccactaattactcattactttatacttttcttttcttaatcccacacctaatattcaattcttaattgttagtatgtactaataattgtgtataagtaggagccaggaggatagcctaagatacttattttgtcgtttatgaatcatattcttgtatgaattagcttatacttaaatacttaaatcatattcttgaaccaccgtattttacactccatttgtagagtatgaatatttcatttatgggcctgggctttaaaatatacagcctatcatcaatctcaagtttagattgagccgtttgataatattcatttggtgtcactgaacttgtcatatgtactatatgtcaactttattaccttctcccaccacacacaccccacacttgttctaaaaaatcccattttgctagatcatttttttatgacgatgctgtccggataaaccccaactcatccggagatgaccaagcctcttcactatacaacaaacccacaatgttaaatcactcataccgaagtccgagacaagaagtcgcccactcgtagcttgactgttcgcaagagaaaactagcgagtttacaatgtaaaccctaaatactcgaattgatctgcaaaaactattgaagtaaaaaaagttacactaaaatagttattgatatgtcatataaatggatattgcacatgattcagaaaattgaatatattgtttggaaacattgcatggaaaaggtttaattcgtttctaaagatatgtggaaaaaaaaaaaaaaaaaaaaagatatgtgaaatataattagagttttcaagtgatattttctaaaacatatcataattcagaacatcaaactgacagtgtgttacttttcttaaaccatgacggtcgaaagatcaaccaaaatagttgagagaaaaaagttgaaatctttccctgcgatttcaatcataactaacccttgtaaatgttttaaatgatacaagttcttcacatgcataaaaattttgtatggtttttgaatgagactttctatttaaaaatattcttcatcacatagcataacatatatatatatatatataattgataaatttgcctaattacactgaatcctgacactgattaccaatcaaagcaaactgtgaacgtgttcatataagtgatccttttctctttgttttggtatgtctacacgtatactaatagaaaaagtagatgaataattaagtagatggctccaaatgctgcatcatatcgtttattgagggacacaggagtcacatgaatagttggatcgcattattgtcacgtggaaatgacaagtatattgatgcaactcattacgagatttgtctcaccgaactagatttgaaggggaggatcaattcctttatgaaaactatgtaaattaattttaaaatgctggtaatggtaaattggaaatggaagtgtaaactttataattatgaacaccaaaagcagagattataataattatggaccgtccctgcgagcctattcattacttctcctgcgacgcattatactcaaaaatttgaagctaactaatgtaacattttcaaagtccaattctcaatctatggaatatattatgtcttcaagagctattattctaatgacgatctatgctaacaaatgggatacttggaaacagcatgagcatcaggatactacgtgatgtcgctagccacgaggttcttacaatttgataatggtcccgatcaaaagcttaacaaaacataagttaatttcagtttatgttacaaacgtaaacaacttaaatagataaaaacaaacaataactaaaacctaaaaataggaagcatttcccacatttaaggccttaacccaacaaaactagaaacaacacatgttgaggtatacatggtttttgaacccatcacaattcttatccttaattttttctacacaattttttattcgtgcatatcttcataatccataatattctaattaactagattataacccgcacatatgtgcgaggtttcaattttaagaaatgtattgaaatacatttttagtgaaagatattatagtttgtaaattataataagcatagaaaagtatatagtgttatttatgataaaatagatattttattaatttatattatttatattttatttgtattttgcatagtaaataggatttttggatttgtttcgatttggcggaataatatagagatatttggaaaaatctgtgtacttttgttagtttgatgtatatataaattgattgtttttgtttaaaatttgatcaattagattatataatgtaaaatttactctgtggtacactgttggtcgatttttcttgtaactaaaaattcaaattttaagatatagttattttgtaaatattgtttatattgtttaatgtttaagattgtataattatgttataattattaactaagatttcactcatagattatcgtcccatattaatatcaacccaaactcgttccaccatataacttcattccgtaaaatgaaaaattattttgttatttttaaatattgttattgtaatatataaaaaatcgagagattgacatgtggtacatcttcgattaatatatttaaaaataatttgcgatttataaatttatgatattgtagtatataaaaccgatttttagtgtatacctttcaataaaatagagtttttataattaaagtataatagtatttggtttttatatggttaggtaatagtatttggtttattataaactaataaatttgttgattttagttaaaaataaaaaatcaaattaagtaatatttgttttgtttatttttaagattgtataactatcatctattttcttgtaatctaatgttgatcctgaaagaaaaatccataagaatacgcataaatggatagtaatattaggagataaatatcattagaacatgaagtaatttacttatgaatctctatctattgttcgaaataatcgatattctatattgattgtgaggcaatgtgaatgtatgcataacatttataattataagagatagattgtatgcaaaattagattttaatttggattcaatcttagctttactgaaaaaactaagattatacacttgtagtttgattgttaatttaagactttcacctgtagtataccatcttgtattaatatcgatctaaacccgtcaattttacgattttccagcttgttaaaaattgaatcacatcatacacataaaaaatctaatatcttattaattattgtagtatataagattataattttttaatataatatgtataaaattgaatataaatatttcaaattatgacctgttaactcagtagaaagttttcttaaatctattttcacccgttataatatttttcatgtattgaacagtttatattcgtttttaaaaattcaaattatggcatatgcgaaaaaactctaattatttttttataatgatgatattattttttcgcaaaaatagaatcatataaagatgagaagtgaactataataattaataaaaaattaatatgataatttagatatcaaatctaatttgttaattttaattgtttatttttttggaaattaataatgtatttcgtttttctaattaaattaaattaattaaaatttagatatcaaatcttatatgttgattttgattggttattgtttttggaaattaaaaatgtatttcgttttttaattaaatttaattaattaaattagtatttgactttttaatccttaaacagataaattaatttactctttaaaattttatttctaatggtatacctatgtaattatttacaaaaagtaaggttacatttaaaatgtacttcccaaataatatagtaagatttctaacgtaaatgaattcaattttagcaatttcttcaaaacgttttctgaaaaaaaaagcgaagaatatccaaaagaaagaaagtaaacgaagatgtcaaaacgaaaaaaatgccactacatgtggctatgtcctatgtacatcatcaactatatataattcaaatctcattttcaatctttatttttgcctatagaaaacgtcctttttctgtactgttgtcttgtttgttgcttagatctggatggacccatgggcctataacgggcctatcaattaaatactcatcatcatcaaaataaaacttcgacaccggaagtcttcacggcgaggcaaatcggacagactcgcactgctccgacgtcgcatccattacaaagaatcaaatgttgacacggcaatgccatcaccgtcgcagatttccgccggcaaatcctacaacttggtccgatcaattcgatccgctccggatccacgtaaaccgattcagcgtcctctgcttcttccgcgtctccgccgtcttctccgaacgtactctgtttcgccgccgtatctaggcggttagctatggcttgttggagatgagcatgtaacgaggacacctcagcttcccgcgtcgccgctcttaactgccagtttcgcgcctcttccacgatgtgagctacacgcgcttctagctcagcgtgacggcgcgtggctttctccaactccgcttctttttttctcaatttccgtccgactatctcctccgcagcgcacaataactctacgtagcgtctctctctgttatccgctaacgtacgccgcaactcttcaccctgcaaaatcaaattatcaacacaaagaaaaaacaaaccaaaccacattttaggtcgagtttaataagacacctgagtctgaatgaatctgtctagttcatctctttgccgtttaatctttccggtaacatctccgggaagagaagaaaaaaactgttgttgattctgtgactgatcatgaaataatcgaagaccagtggaaaccacgttaggcgttttctgcaacaactcggttatatcaataacttgcgacggttttggaggtggagggttcatcagagccgatgaataaacttctcttgatcgttttcttgaatcaacccctgtttcaaaaacggtgatgattgaatggaattgaaggaaaaaatttggaaacgatatgggaataatgagaagagagaccagctttggtgaaattagtgaaaggagtgtcttgaggctgcaacgaacaatcactagcttcttgtccgttactgttcaataaattttcataagaaattgaaaacatcacatacataataaatacacagggcgtatactattactatatgattatatgaagatttttacctgttgttgaagaagaaacgtgaaggatgctgagcttgaatcgccattgagctatcagagaagagacctatgcgttcattatcagataataagggcatgcatgtgtgtttgtgtatatgggaaatgatgatgctgatgatgatgaaaatgtattgattttttcaagtatgaattaagaactgaaaaagaaaaggagaaagaatgggagaaataaatggggaagatgaggttttagaggggagggggacgaaagggtacaaagacttgtgggtctttttaaagctttcaacattatatgcatgattcacactaatgttaccattttttttttgcatctacttctatttttttccttagtactagtactctttcaatcattcttcagttgcaatatagactatatagtataatttagagactgaatcaaaattaaaagatgtgaacgatgtaacactcttcccaaagacccttccaacctaactaaaccaaaccgtctttcaaccaaactaatccattttagatcagtcgatacatcacatatttgcatgttccagatgaataatctgtagatgtattcgttaatcttgtagtacctgagggttttagctacctaacaattttctttttcaattttttttttttgtttttttttttcgttttaattataacttagatagatcttgggccaaaacctagattattattacatgatgcatatagtgaaccgagtatttctttttttttttcatttaagatgtttacaataactaaataaaaagctaacaatagcggtccatagtttcatagcaaaaaaaaaaaacaaagagagaacaatagcggtccatagttggttgggattcatatctaggtttgatgtataggataaatccttcaccactcttccaatataaccaatgtcccaatttttgatattataaaaagaaaacggaggagtcgtcaattattgaaaggtctagatccatgtcgatggctagatgcatataaagcattaatggatcggacgtcatatattcttcaaataaaaggtatcaaattagattatcccttggtgcacttcacgtttcctcattgatattatgcttcacagttgcatattatatatatgctggtgagtctttttcaaaacgataagcgacatacatattctagcaaacaaacaatgttctacttaccacatgatacatataggtacataatgtttcgtcatcagtacacattgccatagcgtatacatgagattacaaaaattgaactatatataaaaagaaaatcaagcttatcaaaatgtttggaggagtatgaaacataataatatatataggcatgatttaatactttataaacagtaacacgttagcgaaaattgatatctaacaacaaataatttggttctagcatatgttggtcagaaagaatggtaggaatttatatactaataaatgtcaacaagatgacataaaaatctagaaatgtggtggcaaggtaagcaacaaattgatataagatggatggcatgtccattgtcaagcagttgcatgattttagtggtcagaactcagaagtcaacatttttcttaattttgtttttgtttatatttcaaatcaagagcaacattagattaagtaaaagtttgcttgtatgtttagcctatcaatttaaattttcatatctctaaccatcaataatgttttctgtagatgctttagttgattaatcaccattccaaaattctttcaaaaacaggagtagtaatacaaaacaaatcaattgagtgattaatcaccttcacatttccccaattagcatgcattccatgtttgtggtttaattaacctagaagccaatcgattttataatgaattagtgttagaaaacgtttctaatgaaaaatgaaagtaaaaacaaactaaatatagaccaatcactgaaataaaaagaacataacaaaagccaaactccaaccacacgtacatgcttctatatttcaccgataacaattcaataaagaagtctacctcatagacatctctttacatttcaattccgtttccatattttacaaacaatatttctttcacaaatcgatacgagtctcgtgaaatacacaatgtcttcggttataaatgttctcttcgtcgtcctagtctttgtcccgtctatatactcggcaccaccaccaaatttaacaaaagattattaccaaaaaacatgtcccgatttcaataaaatcgtacgtgaaaccgttacaccaaagcaaggccagcagccaacgacagctgctggaacactccgtctctttttccatgattgtttcatggaaggatgtgatgcttccgtccttatcgctacaaattctttcaacaaagccgaacgtgacgatgacctcaacgagtcgcttccgggagatgcattcgacattgtgactcgcatcaaaaccgctcttgaattgtcttgtcccggggtggtgtcctgcgcagacatcctggctcaggccacacgtgaccttgtcacaatggttggtgggcctttctatgaagtcaaactgggccgtaaagatggttttgagtcaaaagcccataaagtcaaaggaaatttacctttagcgaaccaatccgtccccgacatgttatcgatattcaagaagaatggtttcactctaaaggagctggttgcgttaagtggcgggcacacaatcggattctcacactgcaaagaattcagcaaccggatattcccgaaggttgatccagaactcaacgcgaaattcgcaggagttcttaaagatctatgcaagaatttcgaaaccaataagacgatggcagcatttctcgatccggtgacaccgggaaaattcgataatatgtatttcaagaacttgaaacgaggtcttggactgttagcttccgaccatatattgtttaaagatcctagcacgagaccgtttgtagaattatatgcgaataatcagacggctttcttcgaggattttgcacgtgccatggagaaactaggcagggttggtgttaaaggcgaaaaagatggagaagtgagacgtagatgtgatcacttcaacaagcttaacgtataagtagcataaacagaagaacatcattgacttcgatcggttttctttgtattttttttttaataaatgtatttataaataagtaagttaatgtaacaattttgagtgcctaaaatttacaaataatctttgttatatagagagcattagatcttactttatggaggagaatacaaattcaagttcttgagttatttccccatcatcttcttctttaaaacaagtgtctccgttttaagtgttgttggccaaacttcgacgaataaagtccaaattgattattaaaacggctcaacttgtgataaggccttttcgccggtaagtatttttcttcatttgccaccataagattatgatatttgcgttgtagctagaaatagcctccgatatttttactgttcaaatatacttttttgctatattcatctaaagtatttttgatttgaccaatctaaaattttagtaaaatatactatatttaagtaagattatgtaattactacgtattttcattatcatcatcgtatgcttcatgtgtctaaagctcttgttaaggttaccaataaaaagaatcttcgtatggttggttagttttcttaacatttggaattatggatagattgtaatgtatttcgttttattctcttttttggctttactcaaaatgaataattagaagaaaaaattagtgaaagtcttcgtcgggtcaacgtcacaagtgtcagacacgtgtcagagaaccatgtgttaagaagtaaagcagtccgatttagacacgtggatgagtcatagctttgcatcgctgtaatgatgaccaaataattttattcccattcaagacaagaacaagcatctcaaatttatgacccaaaaaaaaaagcatctcaattttacagtacaaaaggaaaaatgaataaaggaagaaataaacgtcatttcatatatattttttcaaaagcataaacttttaagtttgagatttatataatttttaacagataatatgtatttttagtatatataagaaaattagggagagaggtttggtgtagctaaagtgaaatcaagattgggagtttcagtctctggtcttgtccctgtaaggcttgacgaatctgacgacaaccgttcgttgcttggacatcttcgattcttccattcattctgacatcattttagaataaaagattatatattataagaatcatctcatataacatttcatatatagactgtgtctttattttcagtttgctttctatttcaaaatttccaattaaactattttgaagatttaaagacaatcaaatctagtgaattgggttctgaaaataaagtatcatagatatcaactctccaaaacaaagtctttaatttctctgcttttgagacaaaatcaaaagaagaaaaacacttttttacccaaatggaagagaaaaaaagtaacttataatcctttataaaaactttttttttcttttttttcagcctcgaattttgcaagtcccgttttattccaatgcccttttggttaaatttttgaaatctgttacctcattggatgaaatgtctacacctgatgatgcctttgccttcaactggaaccgagcttcactgtttatacagattcaaattatatcacattgattttttgaaggaacaaaaaagaataatataatgctaatgattttggctcaactaacataatattatatatattaagtttctcatatgatgcaaatatagaaagttgcctaataagtatatacatatctgtccaacaaatactaaattctacttaggcaaatattaaaacataacataccttgaggagttattccatagacccgtgagatttcttgcttctctctcactgtttacttgtgatccattctcacaatctgactgccctatacacacacgtttatcagatgtatagtatttaacagataatttaattaaatcaaatacataatcaatcaaataacctgatgacgttgtaggtttttcagtagacttgatggttcgatacatctgaaacattatagattagattactaatattatatataagtgctagttataagaataattaatagttatatcgatcaatacatacacatgaattatatataatgtgtgtgtgatgttcgtgtgtttagacttgttccattcaggcattcacgtgtgtgtatataaggctataacctagatatgcacgcacacagagacagagatggataaagtaagaaaaaaagagatcaaagtaaaacagaaagcatttacgattcatgaaaatgtgcagccatacacagagatgggagatgtgcatgggtctacgtgccttattctgactatagtcaaattatgcaaaacagcaacttatatatttgttatcattgaagaatcatgcatatacatatatgtgtgcatatcaatctaaatatcatcattgaagaatgatgtctcctttgtacttttacttttctactgcatctctagtaataaaaggactctttctcttactctttgtctatatcttgcttttgattccttctctttttatcttttttctttcttcactttgtatataatttctttatatatatatatatatatatatatatatatatatatatatatatatatgggggcgaccaaaagtttaaccatgtccaaattaatcacaatttttcttttagccatttcataaaaaagtgcagtgggtttggttcatttgcatattcaaatccataatacaataaattcatttatttacctatacattatgtacctgtaacttaagaagattacctgtagatgggatttaacatgagccaatgtgagatcttgcacatccatcagctcaagtactgattttggggttgctcctggatattaatcataattactaagtcaataaaaatagaatttttgatcaagcctattcattattctttttgttaaaaatgaaaaagagatataaattcaattaaataaaaaggggtaatagtgaaaaaggacaatactttcatgaccacccaataattgaacagcgtgtacaaaatgggcgtggagggtcgtcgtccaccgcatccttggagcccttactcctcttttggcggtgaatcttggcggctgcggttgagcttgacgccgatgacggttgtggagattaaaactacaattagggtttgtgattaagcgacgactagcatgttgaccgttgacttcactgaagaagaaaggattgggagaggtagatgagtagtagtagtggtcaaggacttgattctggtaaagagggattcctcttattggtctcatcataaaaatagatctcaagtcttgatcgagagattccttgtgttcttgattactattaatcttggtggcttcattgtttgaagtgaactggagagtgtggatgagattatttgaagacttgttgtctaaatctgaggctttactctgaaaccctaatctcctttcgacttcttgttcttgtagttcttgactttctttttcttgttcttcttctcttcttcggctgatcttcaagtacaagtcaggttgtgaagggaaaagctccataagaagagagaattggtgaatgattttgagataatcttgatgaattttatgggaaaaaggaggggtataatgttatttatttcaaaaagttttttttttcttcttcttaacttaatgaatttttgttcttggtgagaagagaaaagcagttgtaaagaattagagagagaaaaatagggatggcaaaaggtatgagggaaatgagaagtctctttcttctctgttccctttgagaaaatgacactttaagagtctaataaaggggttgggtgaaacatgaatttccatttaatttttcctttcccttttcttcatatgtaaaggaaaataccaatttatatggcatattttgttacaatgtagatatcatctatcacatatcagtatttaatgatggtataataaaacaataatgtatggaattattcgattatttgtgttcagatttacatgtgaaaatgacacttgtgttgaaactgaaagatgcgtgtgtgtatatgtttttttttcctgataatatcattgtagaaaatttaaaataagaatcaaaggctgatattttcttagaaaacaaaaaaggaacaaccatagctacttgtttagttgttgataaaatgctactatatataaaaaatacacctgcatgaaatttaagagatgaagatacattaaaaccaaaactgaagtctcgtcgtcacttgttgtttgtcttgtttattggtttaattctttgtcctccttgaaatcggagtttggaattataccgaacattacgaacttggtggctgggtgcctaagaataaattgaatatgatattgcgtctaattaatacctgaaaaagcttttctttttccttctatatattgtttgtggagaaagtgattttgtttacgtgataagataaaatttaaggaaaataagaaatgggaaaagaataatatcacattgacagtgagatatcaccttaaaatatatattgtatatagtttcgattatgtttattagtaattttcaaaacaagttaacattaaaggttttttattccacgaagcattaacttcatttccatcaaaatactatacgacattaatttaattttggccctagtgacaccgatagacagtccaagatttgattcccaaaacgccctttgataattcatgtcccctaagcccatacatcgacagataatgttggggacgatccttagattcatttgtttttttttatatttttcacatatttgattaaactaagaaaatctgaatccaaaaataggtttccgtaaaagtcgaacctttttccagttttagttccggcagcacgaggaacgatataagacaaacggaaaggaatttttatggaaaatcgatagagaaaataagattaaagaatataatttaatttacttgattggaggcactaccaaccgacgatgcataagacaaagttagaagctcaaaaacattactaggttaggagataaaatcttattcttttttaaccgaatcattaaataaatcgtattaatcgaatcttatttgtttttcagcaatccgcgattaactatcatcactagtacttgagttttgtagcaatgaatcttatttgttcttctcgtcgtcacatacaaacaagaaactaatcatgataagttctgaggggtcggacttaagtgacgaataaataggagaaatatcaaaaactattgaaaatttatagtggtcaaatagagaacaaaggttcccatcaatttgagtaagttactccgacacggggacgtaagagtgaaacctagtgaaaagcatgctgtccacttcacttagtgtaaaattgtaagacctttcagggcacacagtttgttgtatattttagatttttatttcgtaaggttatccgtatatacgaatcaatttcctacatatatatatatatatatatatatatttccttcataatgtgatgaaaaagagaagtacaataggaaaaagattgattgaaaaatgaaaaagtagaagcacacttaataaaggagtagaggagaaagatttggagtttatagaataattgcccccacgaatctttttttgggagatattttaagcaaatcttaactttggggaatttgataagaacccacatttctattcggacaaaagagttgcttgcaaactttaagtcgaaaaattatttatctggtattaaaagaaatgaattaaaatctacaagggaaaaaaaagaaaaacctaatcttagctagctggttatacgtgtgtcatgtaataaaatgaaactatttgactaagttcatattgggtgggactggtatcactggactgtaaggaatttgtttttaataataatattgttatggtagaggaattcttatttttttagtagattggtgtgttattggtttgataattttttaagattaggattatacgatgcaagttgaattattgaatttgttttgtcaattgtaagaaatgacaataatttacgcatctaaatgctgtggggaagatataagctttttgtacagtaataatggttacttactattccatcaactattaaaaatcatgtaaagaataaagacctaccactttcattgtttgctagctagtatatatatatttatggttagtaaagtaatagaaaatcagtacaaagacaaaatttaaggaaatgaattaagagttcttggttttggtgcatgtggaaatatttgaggttaagactgtttactgttggaaattttaagcaaacaagacataatcaatcattgttttaatttgggatgtaaaaacaatttttttaatgcctaagaacaaccttttgttagtgtgtgtatgtatatatggatacatattatttaataaatcattttctattgtgtgtgaacgaacatataactcaaaacataaaaatactaagatttactaattcttgtttgattagtataacaaaattcacgaaattatattaatatgcacatatgtgttttttttcacaaaaagtttattgggccacaaaatctagccacaaatgaatcgcattggccaagtttctacttgatcgaacaactaaaaaagcttagggtcactaaacattttattacttttgggaatcagatatctctggaaatctcatagaggtttgtctacttagaagtttttaattgcctaaaattcgttgtcataaagaatggggctgaagaagatgtgtaaataaatatataaaattatgtttcagagaaaaactcccgagtcctcgcatcctcttcatatagtcctatttattcgtttaggaccattgaccttcttcttcaagaatacctctaccatagtcaacacaaacctacaaatgcagaaggagataattaagatggttaataacaatttgtttcttcaaaagcccgatgtttataaaaattcataaatggacaaactcgacaattgtacattgggttgtggaggcccaattaaggcccatatatgaatctgcagtttaatggcatatagcgtggaggaaacgtaatagattattaaacctttataggcatcaggcgtcaaccgattgcttccgccaagcaaagcaaaagttgagaaatttagtgatggaggagtacgagtttttggtccgagtgagggaggctggggtaattctttcatcttcttggtttttagtttgatgtctctctgaatttatccacaaacctaaccctaaccctatttcagtaatttgtgttcaatttggatttataatcgcctctagtgttgcttggatatatgaccgaaactctaactcaagtttctgtatgctaataatgtgtgtcaggggttcgacatcgagcatttaatggacacaaaaccatcctcttgtgtgatcggttgtcgcgagtttgataataatgatgattacaacgcccatattgtcctttttgctaggatggggatccataagtacaatatgatacaggtgaaaaacttgtctcctcttgtgtatatatgttcttcttcttcttgcaatcgagtgattcccttaatcaattcttgttgatatatatgtatgtcaggggacgaacttgcagctcagttgcgtagagaaatacaattatcgatctccaagagtatattccgccttctatataaccttgattgctaaggatccagatgcatgcaattcccttgtgacttttcagacaagggttgttgaagaaggctttaacatgacgaaactgtcttgcaatatcgctagacctaagcccggaccacaaggtaaaggtcttggcacattatatcagagagtaacaaaacaatttgctttgaatgaagacaaattccaatcatctttataactctactagtcccatatgggtttaccttaatctataatgtgacttttctatatagaaaacgctgcgttgccacggcattctgtggatcttgaaccggtagatgtattctacaaaggtagtttgcctgagtggccaccagaggatgctttcaatgataatatataaacgattttacgtggtaagatatattgtcagtttcacgtatgcctttgctcatgacagtccagtagtagtgatgtgtttgattttgcaggtgaaaaaatcagagctgctaacacatgactggattcgtttatacatggaacttgctttcctaaaagcgcatttgagatcgcctaaaaatgtacaattttgatttttattttccttttcaatgacttttggtattaataacaatacaatagtgtatttttttttaaaactatttgttgcagccgaatctatctaagttggtgattgtcatggtagcgatagaaactaaagataatatggagccgccaagtgagagactcaaggccaggaatgcatttttctacataaagtacaagtaccacgcgaataaaggacggggtcctaagcgtcgtcttggtcataagactcctgatcgcatagctatagtaagaagaaccttagacaagaatacaggatacctcactctcgagttcccagagccaatactataaagaaacttttctaaaaagtggtttaggcgataactaggcatcaacgtccaaaagcaccacggccgtcgtcgctcgtacggttcgagtcctactctaattactaattacgaagcttctcataagatcagatccatctggaaatgtggatcacataatgtattatgtatgctcgacaaagtttaattggttgtttgcattgttaagtggattgtttggtttctgagcaattaatttgtgaggtggttttcctagttgtacattattttacaaggattcaatacgaataataaaccataagtagattttcgtaattagcattaaactagctttgttttgaacaaaaccataatataaaacgttttcgtttaaccaagttggaagtcaatacccgaaccaatcaagcagttggtaaaccggataaaccccggttcaacaaatcatgccttggtgcgttcttgactccccaaaagatttagtggtaaattccagtttttaccctttgtatcggatcgaatttacctcaacaaataataagtttttttagctgcgattatttaccaaaataccctccaaatcttctcttaattaccgacgtcgttgacgagcgcggaagtgatacggttgacagtggcgcaaatacggtgattgatgacggagacggtggaaagatcgagtctttcggtggtgacgttgctccccaagacctgtattgcaacagtgagcaagcacgaaggcgaactgacggaactgccctcgacaccatcggatggattcactggaacaacagagaatccaacgggcaaaagtggtatttcagaaggatcttcgccgttcatggcgagctgaacagcgacggggtcgacggtagagtacaccaggagactcccggagttatcggtgcatgtttcttgaagcatcaactctacattatgcgatgaattgctctccacctgtaattcaaaaaccaaactttttaagttttaaaatcaaaattcgatttttttttttgttgggattttgaatcaatcactaacattgatccgaagaagagagatgctatttccaagatgtgagccattagcgatatgagcaacttcttgaaatgaactacccatgaacaagatctccagctgcagagaatcgattttcagaatctttggatcaaaagaacagaggaagaagattctggttttactttctttacctgagagagacgttgattgtcgcggagaagatcaaagacttgttgatgagaataagggagaagcgtgactgacacggcacaaggaacaagaccaccgcaaactttcctgcttacgattttaactgtgtcctttgttggtgcttgtccgtgtgaattgattatgttcagacagaaagttttcaccattctctgtgacagcttcatcaagttcttcctcgcttctacagaaggtatcactgaaggaaaaaacacgagaaaacggataactaatcacattggttgtggaagtttgaggtttacttgtgaaacaagttatatatatacctccaaggtcagtgatgtttgtagccatgagactagccatcctttcacattgtctcttcaacacagatagccaccgttcagcgccaaaggccacaccgctctccacaaactctctaacaacctcgtcctgcacgtgcttctcttctacttctacgtgctctacccatgtgacctgagagtatccgttacgcattgcttgaatgatgcaaccagaaggttttctccggtattgatcagtagtagtagctgatgctggtttgatcctatcgatcgggaaatctacaaccatccattttccttcttcagcattttgctccacataccgaagaaaataagcttctcttgttggtaccaatggagacactacttgtaactctgcaaacatcttttttgaaaagagagacaagattcagtgaccttaaaaccaattaatgtgaacactctatctattgtaaaattgcaaattacttaccagaagaagagtaccacttggtccagaagctccagaagaaatgatctgagccgttttggcgcttgagactatggggaagaacatttccgaccatttatccttgaagcaaaggttaaacatatttatggttcaatgtgagtttttaaacaatgaatataaggaatgtgtttttgacttattcttacagcatcaaggaatgctttgacgagggttatgcagttcaacatgatgactgcattagctcttgaagcttctctgcgaaaacgatcatcatcattcattagaggccataagaacatcttcttatactcttcctcattcagacacacactctcattgtctagtctcttcttattccacaagggctcatttatgtcacacatctttgctaattctcgagcacaagaaactgcaagttccatatcaatcgccttttcttcttccgcaatcaacatattatcgttgttgttcttattagtctccggggtaatctcttgtgaaggagaaggattcctcatggaaacaatgctgcgtaaacgatcaagctgcaacatatgataaccatatgattcagtagataaacaacaacagccaagatttgattcattcgaatatacatacctcttggcggaggcgagcgttttcgaggcggagattgtggccacaagtagagcaaaaaaggcattgaaaattggactgaatattttgactctctgtctttagagtctcattctctgcttttagctttgcattatcgcttctactttgttgtgcctgttaatctcagtattagcaacaacaaaagcttaatttcttaacatgaatggtcttagccagagtttctaaccccaattttaaaccggtttatatggtctaactaaccttgttaaaatcaaaccaaactaaagagtgattagttaccttgatttgggtacgtttgttttgaaaccaaaacttgacttgtatcggcgagagaccaagttttttacttaatctcaatcttgttttggtatccggatgagcattttccttaaacaatctacaataaaagggcaaaatttcatattttaaacatcatttcataaatcatcgttataatttttttgacataataaacttgtaaactaaaagggcaagaagacgtacgcttccatttgttgaatctgactagcagtatgtctatggtaacgtttcttcttcgccgcaggaggctcttgttcgattgcagtattctccactgggtcatgacccgacccggttgacttacccgacccgctttcgatcttgctcatcacctcatactcttctttctaaacccacaaaaacaataaagttattaattttttaagaaaaatatgtaaaaaagttagggtttttggagacgaagacaaaccggaaaaatgtaagggaaattagggttctcgaaggaggtaaagtaattagggttttggattgttgttgtcggagacgaagacaccgaaccgaaaacgttgtcggaatttaaaaccatatgtcctttttctttcttgtctttcgtttccattttaaatcagacaaagagaagactgagtttaaagggttcgttttcactttactctcaaaattctttttactttaccttaccttgttgttttggcttcggataagctagagaagataaaaaaggtaagaaagagatatatgcactcaaaaatagttaccgggccaggaagtgtaaacggcgtccgtccatgtttaacggcgataattaacggactaacagatggacaaaaagcttgtccaacactctactttttttttcctcgaaggaagcagagagtccaatcaaatctttgctcagtattacaatcttggacccaaaagcccacaataacaaaaacgccaatctatacttgtaactcgtaaataattaatattttgtaagatatattattattgttttaatttcttttattaaagacatattttatagttatgataaaacaatatatgttgaaatttgccgcagtaaaagaagttaaagatactatgattatgataactttgttattacattggaggtttgcgacaataacaatggtacgtaaaacaaacataaattacttcgcctattgctttgcaatggtcaatgcaagattgaacattacacctcggtgacctcgtgttaagcgatatcgcacggatgtatctttcatcaaggcattgacacttgttctgctcacacttgatattcttcgttgcacattttagattagtacaatcagagtcattgttgcaagattgtgccagaatttgtgtgcctatgagattaaatatgttattgatcatgaattcatgatgatatataatatagatgaggaagaagaagatggcgatgaatgtaactaaacatattatccaaaaaaattacgtacatgttgagaaaagtagaagaccgataaatatcaaagctgctttctccatttttattgaataagtttgtatctttctcttgtgttttgagttgtttgtgtgactaaaactggaggatttggagagtatttataatttggttttcttccccagcaagcaattgttttgctaatttactggttaatgttttggtaaatacgttacttacttcatgtaataagattttataccaaatttgtttcagaatgagtgaaaaattacctagtttgatgtttctaatcaaggtagtaaattggaaattcattatttttctttttgccagcgataacatttgatcttctatatttacattttgagagtgcatttatttaatcgattcgttactcaaatattcgttactcaaatagttaccaaaaatctcggtaaacaattttataatatcttgataattaaatcattgacgaagaactttgaagtacagtaaaacctctataaattaataaagttgggactacaaaattttattaatttagagaggtattaatttatagataatagagaaattttcctaatttggtaatgttttaaaaatttctataagatttctttcattatagaaaatatatttatagaaccatttacaagtaaaacataataataatgtctaaaaaacaacatcaaaagttttgatacagtaaaatatgaaaactataatcaaacaaagaataaatatgaatttaagcaaaaaaaatattataaatatattttagagaattttttttacatataatatatatatatatatatatatatatatagttgatacatttatacaattattaatttatgatattgatgggaccatatatttacatagatttcaaaaaaattattatcttattaatttatcgatttttgtcactttttatactggtctcaactcagaaccggaagaatttattaatttatagaggttattaatttatagagtattaatttatagaggttatattgtataaggttttacggatttattccaaatttttactaaatttttgccggattgtcatgatatttttgttgaactgatttttatctcgactgaactacaattattgttgtttctttaatttccatagagaaatatatttttaatgaatatctaatatttatgtaaaacaagtataatttaggacactaacaaacctgataaaatatcaatttaacttgtcttatgttcataaacgattaagtacacaaaatatacaaatgaatctaacaaataagtgaaagaaaaacattcaaactataagtttaattttcagtcaaatgtccaaacataaactatagtaattaaatgatattatcgatattcaaaagatattaatagtgataaaattagatatttgaaaaccttatgcgcaaaaacttaataaaattacatgggaggtttgtaagagtaacaatggtttaagatacatgcataaacaatttcaccttttgccttgcaatagtcaatgcaggcagccacaccataattggtatcattcggtaatgtcatgagttctttaaaggggcattcacaactaccgctaatacatttggggccaccaaatggcgttggacatttgagtttaacacagtcagaattcgtcttgcaagatacatatccagttcgtgccataatcgatgtacctgctaaaaatcaccgaaatgatttatagaaacgctcatgacatgataaggatgatgaatacaattggtacataaatttagttgtgaaactcacatgttgaaaaaagtagaataccgatgaatatcaaagctgacttctccatttttttctgtgctcttttctatttgtataattttgatattgtttgcacaattaagatgatgtgtttacaaacaatatataattgtgagaaaacgaattgtctttttccttttataccatgaataaatctgttcttttttcacttgagaacaaaatattttgataaatgcgtttaactggtcgagattttattcctttagttttgtcaaatgtcaatatatacatttattcttaattgatacttctttgaatttaaagtgcttaaaatcttcttataattagagttcttagatcaccgacaaagcgtttcctgtcaaatgtgtttgtaacatctactttggtttgttactttcagttacataaaatcacttgacgggctaattgctctaatcaaatttttgattttaaaataaaaatcgatcggtatttggttcagttaaccatgatgattagcccggtttaaataagtttaagaaaaacgaaaagaacaaaattgttttctttttaaggtctaattaccaaatcgaccatgaatccaatgttacaagaacacaagtcttcgtcctaaataacaagttcaatcttcatcttcaacaatctgagagagattagttccaagttttaccgtttacaacaagaatcagaaaggtctttgattgcatatctcaaggttgagccggagcaggagctgaagccataggtggaggagattgttgctgcaatggtttcgattgtggctcaagatgttcagaatctttctttgcttcaggagattcagagagttttgattcacgttcggcttcttgcgttgatgaagctgcctttggtgattcagacaagtgaactctagcaaactcatcaaccactttcctcttatcctcttcctcagccataccaactttctctttagccttttgtccaacttcttctgcagctttagcaactttgttgaatgctccagtaacccacgtggcacctgtgagaacataccggttcttcattatagctgaacctgcattgctcactgtctgctccgctgcagcgattgctgatttggttttctctgagacttggtacttctgatcaacttccctgaccttttctcccactaccaccgtgcctgtgttgatcttatcagtgaaaccaattttcttgtcaaaagatgcgactttggctgatgctgtagatgttagctggtgcttctcgtcaacacttttggctttagctatggcatcttttcccaggataaagccctttgcaagcatgctgctcacaacatcttcggcttttctcaacacggagtcacctgccttgggagatttattgctgtccttgggttcctgtgaaaaagatgaaatggtaagattttaacttgtgaaaaaactcagaagagatgatgaattacgagcttaccaaggaagctaaagcctcaggggacagttggtaatcaggagccatagagacaatgactgaagaatcaacaatcgttgctccctgaaatgaaagaattacattaatactcagtcactcaaaggatacagtcatatagaggaactaatacaggctaagaagtaaaaataccgagagaagaaccgcagtttcagctccttgtagatccttaaaagtgacatatgccagtttagtccgctcagtctcgctgtacaaacatgtcaaaagagttaagaacctgacgaactaaaagctgtaatctaaaactttcaaaaggaacaatagagaggaaaccaaacctctgcgtctcaaggtacagaatatcgccagaaaaggaaaagaactccttgagatctctatcggttgctcctagagaaacattgctcactttaactgttgtcatctgcaagtgaaatataatctcgtgtgacttaaaaactaaaatttcaaaccatttcaccagctaaacaaaatctcagacttattcattagttgttcgattacacatttctcgattccttatcgcctaaaacaatgactaaacacacacacacacactcctaaagcaaccaatattatcaatacaatgatcagaaaacacagaaacattgcatcatcaatacaagaagataaaaagaacctcagaatctaggaaaagcaaatacttgtctcaaaactaatcctatggcacagatcagatattaacagattacaaaacaaaacaaatgctaaagtgaatatcctaatccaaacaaaagcaattttaccctaaaaaaaaatttcttcatatcagaaacagtaattttcacccaaatcaaaaacagagaacagcttcaaatcctctaaaataaaaaaactagcgattcttcactaataatcaacgccatttctcgcaaaacaaattagaaaacaacaatcaaaatcaacagatctgttcacatcttcctcaatcaaatcaacagcaaaaacatcgacctttctcaggataaatccaaaacaaaaaccaaaactaactagtttcaaaaagcgaagagattagataagctcaccgtcatgaagaaaatcgcgttgacgcggattgaaatggaagattgtttttccttcacacaggaggaacaatatttgaaacgaaacgaaacgaaaaatcaaaggaaagaaaaatctctggtcgcggatttgatgtgaagaagagtgaaaaataaaagaaaaaagtgggacctgattttaaacgccttggaaaaacgagtcttattcgggtttggcacgtgatatggtcggaaccttctcacgtgcgatgattaaaaaagagtcctaattttaaacttcttttgcttttgaccctttttagtcacgtaaagttctatctagagattttattcattaaattctggactaatctatcataatccttaatctaattctaattaatccgtaatctgttagtatcttggttaaaataatcaattaacgtcgtgacataatcactttctccaccaatgtctaccatccacgtgtcctgagctcagagcaatgtaatcatcgtagaccatttatcactttataataaaaggaggatataccgttaagattctaaactatagagtcacgtttggaatattatagaaaagttaaggatcaaaaaatgaaaaaagtacaagctttttccgttcatacaggtaatgtgacatttcacgttttgctcaatctctctctccgcggttcacgttttttctcaatctgtccggagagagagaaactcaccggggaatcttgaaatcaccatcacatcctctcttccctcgatctccgttatcgactgtaaatcgaattttgttgttgctttgttttcttgggcgaataaaagaggataatttagtggcggggttttcgagaaagagagagaaagaatgagttttcaagatttagaggcgggaagaggaagatcattagcttcttcaaggaacatcaatggtggtggtagtagacaagacacgactcaagatgttgcttctggtatatttcagatcaatacaagtgtttccactttccatcgtcttgtcaatactcttggtactcctaaagatacgcctgagctcagagagaagctgtaagtacttctcaaagttaaagttatctcctttttgagttttagggtacttgaaattgtttctaattgagtcaatttgcttgttttaggcataagacaagattatatattggacagttagtgaaagatacatcagctaaacttaaagaagctagtgaaactgatcatcaaagaggtgtaaatgtgagtcatttatgataaaggaagattcttgttcttcttctgctacttctgttgattaataggaatttgattggttggttagcaaaagaagaagattgtggatgctaagcttgcaaaggactttcaagctgtgttgaaagagtttcaaaaggctcagcgtcttgctgctgaaagagaaaccgtatatgctcctcttgtccacaagccatctcttccctcaaggttaatgctcattgatggtttatgtttacttttgtggttttgtgtattgatttcctggctttggtaatgtagctacacatccagtgagatagatgtgaatggagataagcatccagagcagcgtgcccttcttgtggaatcaaaaaggttagtttatacagacaatggtgtccatctttgttcggttgatgagttatctattgattggtttgttgttttttgttgcagacaagaacttgtactgttggacaatgagattgcgttcaatgaggctgttattgaggaaagagagcaagggatacaagaaattcagcagcaaattggcgaggtgcacgagatcttcaaagacttggcagtgttggtgcacgatcaaggaaacatgataggtaaaactgattccaactcttgttatgctaaaactctcacttatgtcttcaaaacctaagacgtaagacctatttttgtgtagatgatattggtactcacatcgataactcttacgctgcaactgcccaaggaaaatcccatctcgtaaggcatcaaagacacaaagatcaaattcttctctggtaatatattaaagcttttgatcgtaccatgaaatgtgtttttgaggattttggatgatcagatcagcctactaacttcttctttccattgttttttctttttcttgtagacgtgcttgctcttggtgatttttggtatcgtgctcatgattgttattatagtgctcgcagtttgatttccccaagctcataaaagcatggacaagtgcttcatcatcaatcaagaagcatcaatgagtatatgtttgtcacgactctctttgttcctacaatttagtctgttggactattggtctcttgtttcttgttatcgagtatatagagtagttcactttggtttgatttggcttgtgtttgctgagtcttggttctgaaggagagagtgttactgctttgtctctgtaatataacttggttctgaaggaaaatcctctgtttgtgttcttaaatgtgaaatttctggtttcgattagctaaagctatggcgaatcttcaaaagtacaaagcttgagtcaataaattttagtcatatgttgtcagaacaaagtttgaacaaaacaaaatcatctagaaaaaagtaggccttgattgagataacaagcagctgtaggatccttaaggcatccacagaacgcctcttcatctttcggaaacgactttggcaatggatgatcaggagttacaccgacctatacaacaaccagcaacgagtcaagactgtaagaacatgtttgtatgtagtgtagtgtagacacagagggggttactacaggaagaaagtagtttcatactttgtctatatctgtgtgagctggtgtttcatatcgagcaactgttactgccaagcccgaaccatcagaaagctcaaaaaccgactgtatcttgctgcaaaatgcgttaaagtctcaggaattttacggttcggtctctgagaagaagaataaaaaatagcgccattttgtttacccttttccgtaagttggttctccataaaccagagcacgtttattatctttcaaggcacctgctaatatctcgctggcactcgcggtgcctttgttaacctggaaaagagaaagattgtgtgagaatgaaatctttcatggcatttacagattacaataaggactagatttgaggaaaggaaggatggaagctcatacaagaacggcaagaggctcagaggttgctatagcattgcttccatcagtatcatatatatctctaacacctcgactatcgcaaatatacacaatcactcctttatctaacctgtggatagcaaatgttgaagtttctattatgatagctgtggatcttgaaattttctaattcgttatatgtaacggtttatgaggttattaccaaaatttagcaatctcaattccttctgggaaagaacctccactgcagcaagaacaatttttttaagaaaggctgttgcaaaagcaaaaaagagtttatgttctcaaaaaatcatcacctattgtctcgaaggtccaagacgaatgcgtttacattgttgcctctcaaggtttcaatagcttcccttaccgcacctacaaaaaaagtgttaagactttgagagataataaactagagagtagataaatttgtaagaaggaatcagtaatgccaaagaatacatactagaagcattttgattgaatgttgttagcttgatatagccaatcttaggggagttactcccagaaccaggaagttcacataatcttgacttcactggattcacagaaacccgctctcgcctgaaataacaacaattgtagttaccaaatgaacgtgacaacgaagataaatgtaggcatgagagaaatacgtcaaagttaagagtctcgtttcaggtccactgcgaatcgctagctccactgcacttccttcaggtcccctgcatttcaaccaaagcattatcatcatttcttacttcagaaccattaactcgtcacacttagatttttcaaagttaaggaatgatgaaaaatggaaatgtaactcactgcaacatctgtgcagcatcgtatatggtaagagtttctgtggttgtattatcaattccttgaataacatcgccaggtaatatccccgccctatttgcaggacctcctggagcagctgatataacaacaagcccagctggtggtccatctgatgcagtggggtaacctatcgacagcccaacacccgtaaccgccccttgagtccccgactgccttcaaccaaaccatttaattactagatcttacatacagtctatttgctaaattcagaactgtatattttcaggaaatcttacccgcaaactcttgaactttccgggctccaagaatcgagtaaaaggatcatctagtgttgccaccattttcttgatagccatgtctaaacacaaaccaacaccaaatttagaagcaagttgtactaattttgtaaaaggttaataaagctattcacacatacatgtctcttctcgagtgttcataggctcatttcgtaaagcagtctctctgtaacgaaaccagctttgtccattaaaggttttatcaatataagcacgatcaattgttctccaagcctcgaggaagagaagattctcttcagtaagaccccctaaagagacagagaaaaaaagccacacaaatgaaatcaaattgcattccccgaaatttatatggtttctcaacatgtaaaaaaaacagaacttacatgatggtggtgaatcagtggtaacaacagaaatggaagagacaagcagaacagaaacgatccgaactaatgcaacagagagattctgtctgaaattaacagaagatttcatcataaccttcccagataatttcctctgatcatttctttcgataacacacagaaatctattacagacgaacacgactcctgggtttgctgcattgctccttgaaatgttactacgactacgagcataactaaatttgctagcttttgaaatctttggaggttgttttacccacaatttcacctgcaaaggttgaaaattctattacacagctaaacggacacaaattggggaattgcaggagagaaacttaaaaaggagtcaactatacgaaagaaaagtacctggattgagaaattagggtttattttgttaggcttagtaaaagaaattggggataatgaagagctcgcaaggacctccattgaaaagagcttccccgggaaaattccaactctgtttttcttatcgaaaaaggactacaaatatgattggacaaagtagtcactttctacaataaattagaaaaaatggcattttctttttaataataaatacaactcttctattatccaaggaaagatttctgcacaaagttgcaaccgtactactgagtcctaacgataatgttagtagagaaagactttacaatggatactaaacataatcctttactagtgttctgtttctgatgtgagaagacccaattcttctataagcttatccatatgtctaccatttgtgttgttgttgttgttgttgttgttgttgttgttgttgttgttgttgttgttgttgttgttctctagtgtagttgcatctccaaaaactgggctttctggcatatattcttcaaggaattcaaagttactcattagttcatcaatctcggggtcttcgggtattccctcaagctgaatcgggactgaaccaccatcaaggaatgggcttggagagatgaatgcctctggaacattcttctctgtatccatgaagttttctgtagggaagtcgttgatactctctcgtgtcaattgtggtatctgggaagtctctggcattatggtatccgggagagaagttgaagtagagggtaagtatgataaaggctgtcctgatggtacagatgcatatgcctgtgactgtcctgaagttatgggtagtacctcttgaagagtgactcctgatacctggtttggagatgagaacccgtcaagaaacggatacttatcatctgttttcatcatgttccacatcattgaatcgtttctaagtggctgatacttaactatctgtccatctgatgcttccaagctatggctatgactattactctcagtagcagcagtactatcctctctgagtctccgcttcttattggcctcggttacatgcatattactatcagtctgcttctgtataaactgagagaggaaagtaggattctgtacagctttagcaaggaaagacataatctgttgttgcctctgctccataacctgaagatgtttaaccaaaacctgaagtttattatctgttgtttgttgctgctggcgtaacttaacgagttcctgcatcaacacgtttttgtctcttttaagctgttcaacttcttcctctaacccaaatttcccaacctcaacacatgaagataatgcagccattgaaccttgaccctgagataattgctgagattgtggattactactactactaccatgtccctgaacagattttctccggcttatcttcttcaatagatgtttttgacctcttaagaaaccttcattagcaaattcccatcgatctggatccactttcctaaaaccctgttcatcaaaattggcacatgaatcatataaatcttatcaaacacatcaagcactaagattattcaacgaaatcataatctatacacagtacaattagagaaatcaatggtggagaaattagggcgcgagagaatttatacttacataggtgtttaactggcgaacaaagctggagaaattgttgtgtttgaagtatttaggtagaagatcacgagaaaactccggtggatcccaaacaatgaagctattgttcgtcggactccatgagacaatcgcgtccgtcgccggatcttccaccatgtcatacgtcttgctaaggaaagggggcggtaaagagttcgcattaagtaaagtcgctggatgcggattccgcggtggtggcgccgtcacagcctcgccgatattcgttcctccgccggtaacaccgtccattttcgtacggataaagaaagagaagtatttgaaatttacaaacatacccttttatttctctgtgactcagatataaacgcgatatcataaagatgggcttttatttttctttttagtttgtgtgtgggccaaaaagatcaactttattaataactgggcctgctaaaacaaatataataataatcaatttaattgctatattgtcggcatacattttctggcgggaaagcagaggaaggagagtgagagagagagagagaaatgagttcgtcctcgtcgccggcgattgaaccagacacaccggacctgatttgccagctcgataatgttcaaggaatggtcgatgcactcacttgcgtccgatggaaacgccaccaggtttttatctccatcctccccaaattcaatctagggttcttctttgattttctgaaaacttctccgtttccaggatgctttagtagaattatctgaacacggaatagttttgattgttgaagaatcaggttgtcttcaagccaaagtttatcttcaacgcgaggtatcgatttctgagtttatcttaaattttctaaacccctaaaattcgattgaatccgaaatctgtttgatgtgttatatgagtagctattcacgaaatacgagtatggagctcaaggtaggccgagattcggaatcagcttagggcttcttgttgattgcttgaacacattttcatcacctggacattctaatactatagaaatcaagtatccaggacctgatatggagcttcttctcaagtatgtgtactatgatcctttgctttgtgaatatacggattacgagtaattagctgattggtgtgagtgtttgattagatctgttgataccttaaactcttgcatctactctgagataagaactagaattcccgaaactgttacttgggactacaactttgagcaggcgggaatcgcgccacttacttttacagtaaaggtagtaacatagtttagtatcgtttttcgtttaacattgttagtctgagctttttctcaaatggtaattgataatgtatctatcagtcagcggcgttgaaggaagcaatagatgatcttgaatggcctggttcaagtgtacagatcagtcttcaaaaggaacccccttgtgtaatctttagaggagaaggacatggagacttgcaggtcttgtttctcacttgtttcttggtgatgtatattatcttaatgtgaaagaatcaaggaacatatttcgatctatcctctttgcagatagacttcatgtattatgccaacacagatcttctccttgcctttcattgtgataccgaagtctcttacgggtaacaatgaactcaattctttctctaccgtagctttatggttaaaacacacgctcctacgcttgatttaccaatcaagaatagtagccagatacatttgctaaacttctcattgttgattgtaggtacaaatacaagtttttgaaagcaacaacggcaaacataccgggaaacgtagtgagagaaaacaggggaagcaaactaacaataggaagaggaggaatgttgaaagttcagcacttggtttcagtttctaaagctttagctccacaagtggaatccgcagggtatcagccaccgagtcggattgcttatatagagttctttgtgaagcctgaagagcctgctgattaatagattttctccttcagttactttatctttgtaattctagttcttctttttagtcagtctctcaatactatcagtatcagtatcagaaagaaagaaagaaaaagtttaaggcttgcaaagaaaaactgcgtgtggtttcactaaattagctcagatgtctcgtcgtttagtgttatatcgctgaacgacgtcgtgcagtggagacataggtatgtcataccgaaaaaagaaaccgggtgtatagttcgggggattgaacccgacgtgaatcgaacacgcaaccttctgatctggagtcagacgcgctaccattgcgccacggatccggatgtgtaacatgtatattttactatttaatatacaagttaaaaatagcttcaccgttataatttgatctctgattatgattggcgaaaatatctgagatgggttggtgttggttggatcaaataaataaaaattgtaagcaaaacctttaaatgttctaagcttgacacgtggagttaaaacagacgtccaagtagctttctcactatttcaaagttggttggacttttttctcatgattattaaatcacactcaaaagagaaagaaatataaatgactcgaggccaaacaccaaaaaaaagtcttcaaaatataattttagaaaatcatatgattatgttgacaaaaagaaaaagtaaatcgtatgattagtgtttctaatcttcttaagaaaatgattacgtttgttaaagaagagtttgggtgatgattttatactaaagttagcagtttgtgtgttttctttaatcattttttgtaaagaaaattaccaataatgttgacatgatatcatatatcactaccatctattggaaatagtttatagaagaataattaaatgaatcgacaagaactcacacatatacgcaaattgttatgtatgtgcacctaatgtagatttgtaggcattatatggtggggacgtgttaccatttatattgacattaatgatggtattgacacttttgtggacctaatcatgatacaaacatacatcaatgctgcttatataatatacttatatgtctatgtcgcgcacacacacccacacatataaacggtgggaatttatcgaatgatatgctaatcatttctgtatactaaacgtacaatgtctcatttgtgtatgtatatgtaccgatgtacgtataaaccaatgtatatagatgtatagaccagagagacctaatatacatggaaaaaattcttactagagttaataaaactgatgaacctagcgagtcactgagacatgcgagaatctctcctttttgaatgaactatatatagtctaatcaataacatattaataaatttacggcaatttgcaccaatttgataatctaatcatatattctttgtcgggttgataatctgaaaggacattataaacaatgagaaatataaatcctattatatacgaaagtataaacaaatcattcctttcgaatcttgacaaccaataaatcctaccctaagagatttaattatatattgattagagaaatgtattgtattcttcgaaacatatgctcatgagcacggacacggtatattgttttactgatcatcggtttaaacatttgaaattttgaacttactatctacatatgtcttcggtgaacaaacctttatacggattgataaataatactcttcgaatttattaatcttattaagcccacttggcgtgagaagaaggtatataaatactaatagtagttgaaatatactacaataattactaaagtaactgcagtagttaagatttaatttaaccatagtcaacgaaatcgacgctgatattgatatttattggaatttcgacttgcgagcctcttcacatgaatttaggctttgaaattagagttatgatcattgaagttaatgtagcgatccaagcttattattttaatttttaatagcatttctagtagtagtagatagtgaatttaatttggactgtccaatttcttttattaatacatagctgatattatgtattttattgaatttaaatttggattttaagttacgaaacaaatacaaatttagaagtttcatattgattaaaaaaacttattgctatccaaattatattaaaaaaaacttatagctatcgttttataattcgaaaacaaatttaaactaaacattatattatattaccttcattttaattacatatttacctaatgactattccagcaacaatgacatcattagttcaattgctttaaccatttgaattcttatataacaggggagaaagacaaattaaactagatacgaactgtgttcctcaatcaacaaagacatcaagagatttgttgtcttttcactcacaaattattaaagttaaacatcaaaattattatttatagaaaacgaccactgatcaacattaatatcatttttttattgcattattctaatgcctagcttattttacacacccaacaacaaatctatcaagtttctaattcccaaccttaaatgatgcgtattagtagaaaccaaaagaatgtgattaaatagtatgttttaatacctttgtctcctatgtttggttataaccacttgtaaatatatcttcctaaaacatttagtcacatgaactaagataaataataatgttgtttatgcttatggatgctttgtatatatctatatttaaatccccataataaatatttttacaaaaaataaaagagaaactagtcacataaaaagaaaaaaaagaaaaatttatgtagcaaaatataaaaattgaaaaagttaattggcgtgtattttctttaacaaaattcatatttcgacctttttttcttttataaatattgtgtactcattgtcatatggactatcaattacttccattacatgattggtcataaaaaccagaaaactattgccgtatggagagaaagcagagaagagaatcttccaaaaatgttaaatcttgtgaaacaaataaagcatagcaaagcaaagtccaaagtccaatgagctaaaacaaaatcaaaaaggtttctttatgtttttttttttgaagtaagaaaaaaaaagagtttataaagaaacagtggagaaataaatagcagaacaaagagaaagatcggagaaaagaatctttttaggctctctctcgcagacttcgcactcacacactcacttccattgctccaaaaaagtgagcttttttcttcctttttcctattttcctgatcatcttctttgcatcttatgtaactgtagaatctgactaactttcagtaacccaaagttttgttttttattttcattttttcctccagctgtgtgttctgatcttgcttgtataagtgtaagctctggcttaagcttttttttttttagttgttctaactataagacatgatttctgactacttgaggttacatttatgacgcattttgattatttgtcgttgttccggcatgtgtttgtctgcatataagctgttcgaggttttgtgaaatttgttcttttgatttcagatttagtctccactaattgtgtctagggtctgagatctgctggttctgtccccagtttttgtaaaaaaggaaacctttacctgagatttttagtttctgtttaagtttgaaatgaatgatctttgattaaagttttggtcttttgttaaattagactaatcaaagttctgatctttgttgtgtattttactgttgcagacattgtatctacttcacttgctgtagagatatggtatcaagatcttattcaaacctcttggatcttgcttctggtaacttccattcgttttctcgagaaaagaagaggtttccaagagtagcaactgtcactggtgtcttatctgagctagatgatgataacaacagcaacagtgtctgctctgatgctccttcttccgtcacacaagatcgaatcatcatcgttggaaaccagcttcctattaaatcacatcggaactctgctggtaaattgagttttagttgggacaatgactcgcttctcttgcagcttaaagatggtatgcgtgaagatatggaagttgtctacattggttgccttaaggaacagattgatacagttgagcaagatgatgtttctcaaaggttgcttgagaatttcaaatgtgttcctgcttatatcccacctgagctattcactaagtactatcatggattctgtaagcaacatctatggcctttgtttcactacatgcttcccttaactcctgatcttggtggtagatttgatcgttctttatggcaagcttatctttcggttaacaagatctttgctgataaagtgatggaagtgattagtcctgatgatgattttgtttgggttcatgactatcacttaatggttttgcctacatttctaaggaagaggtttaatagagtaaagcttggttttttccttcatagcccgttcccttcctctgagatttaccgtactcttccagtgagaaatgagctcttacgtgcactcctcaacgctgatttgattggctttcatacctttgactatgcaagacacttcctttcttgttgtagcaggatgcttggtttatcctatcagtccaaacgtggaaccatagggcttgagtattatggtcgaacggttagtatcaagattcttcctgtggggattcatatcagccagcttcagtcaattttaaacctcccagagactcagaccaaagttgctgagctaagagatcagttcttggatcagaaagttcttctcggtgttgatgacatggacatcttcaaaggaatcagcctcaaactcttggcaatggaacaacttctcacacagcatcccgagaagagaggtcgagttgtacttgtccagattgcaaaccctgcaagaggtcgtgggaaagacgttcaggaggttcagtctgaaactgaagccacggttaaaaggatcaatgaaatgtttggaaggccgggctaccaacccgtggttctgattgatacaccgcttcaattctttgagaggattgcttactatgtcattgcagagtgttgtcttgttacagcggtaagagatggtatgaatcttataccttatgagtacattatctgcaggcaaggtaatccgaaactcaacgagactataggccttgacccttctgctgcaaagaagagtatgcttgttgtctctgagtttattggttgttctccttctttaagcggcgccattagagtaaatccgtggaacattgatgctgtgactgaagcaatggactatgcattgatagtttcagaagcagagaagcaaatgcgtcacgagaagcatcacaaatatgttagcacacatgatgttgcttattgggcgcgtagctttatacaagatcttgaaagggcttgcggggatcatgtgaggaagaggtgttgggggattggattcgggttaggctttagagttgtggcgcttgatccgagttttaaaaagctttcgattgagcacattgtctcagcttataagagaaccaagaaccgagccattttgttggattatgatggcacaatggtgcagccaggttccattaggacaacaccaacccgcgaaacaatcgaaatcttgaacaacctgtctagtgatcccaagaatatcgtgtacctcgtcagtgggaaagacagaaggacactaactgaatggttttcttcatgtgacgatctcggtttgggtgcagagcacgggtattttataaggtaacacttggtttcacattttccttaaattactaagagcacttgaaaagttgtttttaaaagttgatttcgatttttggatataaagcaaagttatattttcttatcttctttacttgaaaagatcaatcttttggatattgaagtaatgagtttacattttgaggctgttttcatatcttcttgaatcactaagagcacttgaaaagatcaaactttaggataataaagttatggttattgcacatgggactgctttcatatctttttcagtctcttattttttgaaaagatggatgttttggatataaagttttgatctttttgttcatgttggggacaggccaaatgatggaacagactgggaaacgtcgagtttggtatcaggttttgagtggaaacaaatagcagagccagtgatgagactttacactgagactacagatggatcaacaatagagactaaagagactgctctcgtttggaattaccaattcgcagatcctgattttggatcttgtcaagccaaagagcttatggaacacctcgaaagcgtgcttaccaatgatccagtctctgtcaagactggacaacaactcgttgaagttaaaccacaggtaagacgttaaaagagttggtttattgtctgttttctcttttcaagcatgaaagttccgatagctaaacttttttgttgttccgataaaaaaaacagggtgtgaacaaaggtcttgtggcagagaggcttctaacaacgatgcaagaaaaagggaaacttttggatttcattctctgcgtcggtgatgatcggtctgatgaggatatgtttgaggtgataatgagtgctaaagatggtccagctttgtctcctgtggctgagatattcgcttgcaccgttggacaaaagccaagcaaagcaaaatactatttagacgatactgcggagataatcagaatgctggacggtctagccgctaccaacacaactatctctgatcaaactgattcaaccgccactgttccaactaaagatctgttttaaggatttgtgaacgaaagttttagtgggtttgttgttgtgatttgtgaatgctttttcaaatataatggattaaggtaatcaaatcttcttatgtcatagggcaagataagaaccgaaagaggaagagaaaggagttagcaaaataaatcttatatattaagatgtagaaccaaactatagtttgacactaaataagaagagtggtgaccaaatggaacctactactactagagtcgttaagggggcatttggttctccggcgatgatgggggtatgaagggttgatttctgaggaagtggtgctaaattttcaaaaaaaggagatataacacaagtgtctgcggagagataaagaatctcgtttttccttggataatacttgaaaagtctcttgtgattatcatagaagacaatatttccttgcttagaaaccgacaccggggtgaaccacctgttccgcctttcccgggaagcaactctattctctaaatctatggagtaagtcttggtccatgtttctacttctgtatccatgctccaaatctctagtttccattcagtcttagtataggtattggctatggccaggcggtcctcaaggttcactatttggaaggtttcttgcgtgacactcatatcaggaactgaaatgttatgtaactcttctttgtgaagatccaaggctagtattgtccaagccctctcagtaggtttgtgtaaccagtagatcgatccattcgcacactccgattttcttacctcaaagaccttataaggaggtggactcaacatccgccattcaccagtttcgacatcaagaacactatactccacctcaggatcacgtgcacaaatttcactgaaagatattaaacacatcttcactactttatagcttccggtaactttatctttaccaaatcccattgcccaatgtcttggagagaaagccgaacctactccaaatatggttccaaatccgaatccgtatcgccggagttgccttgtccaggggttcaaaacgtctatccaacgtggttcgagaatgcagaccaaaccgtcgcaagtaaacgagggttgtgcggcgttgcagtgcagatagacgatctcttcgttccctttgcactgcgacgacccggggaggagcctaggctcccagccgcatttgcagttgtaagcagccaggattttgcgcttcttttgaagactcattcgtctctccacgaacgtcttcgactcaagaattgatctccatcgttttgagacgcttttcgatatgagaatggatttcaagggaagtcgaaggaatatatcttctagaagatcggcaactatgtagatcgaactagggtttttctcttcttcctccattcttggtgactgtttgttttttgattttttgtcaatctttctgttagaaacatcgagagattgacattttaatatatttccttattggcaaataggtgaatttttattaaacttgtgaatcaagttatgtttccatagagttgtttgattgtataaattagactgctcgtagatatttatccaaaatattgttattaaatgggcaataatagaatggtgattacaatgtgtttctttacacaacaaccaaaccaaataagaacaaattacaaataagaattcctttacaagaaaatatacaaactttaaatcaatatttaataacaaacaaaattaagagtattaatcgaatatctttgtgtatgtattgtctttaaaactatgagtatacgacccgaacaaaatccagttctaccatgggacaggtgacgatgtgggtgacgttaagctgcagattagataaaacaattctgttaataaaccataaatataaatcatatactatgttaatcaatgcggagatagatcttactctaagaaacttttccagcaagaatcacttgtttcatcatcaagaaacttctcccagtcctctaggaaatctgaaccggatgagtgttgagctgtactgggatggttcaaactggttgtctcgggagagaccgataccgaaccagtagatggggtttctagtagttgatcaccatagtaacacggcatcataccggttctgatatgatcatttaccttggtggtcgtactggtacccggttttgctgtatttaaactctcttgagaaaccgtaaccaaaccaggaagctggttatcttcaaaaccatcccaaacattttcataagatggaatgaaatccgaggcggcctcaggagtgattccactttggtttatgaaaagaccagccgggggatccggtttaggattcactgaattggtattgaagctattgactaccggttctggtttaggattcagtaaattggtcttgaagctactgatgtttggtatggctttgggggttatgatttgaagcattttatggatcaattggagtttaagaatatcttccaaagcggtgttattgttgaggaggttattgttaccaaattggccattgttgattgctgccgcgagcatttgagaaacatcgaggatagggctaagatcgttggttcttggctcgtgcgtcactggatcaatccccatttgcaataacttcttcctcatatgagtgttccaatagtttttaatttcattatctgttcttcctggaagatgacccgcaattttcgaccatctgtatggtaaaaattcgactcaaacgttagtaaaatgaaccaacgaaaacttaaccttttgtatggttagagaattataaactaaagtttagactatagtcttgaggatgtgaattctataatagcaataataaactatgcaatggtatccatacgtaaatttgtttttgcactttatattaattttaaaagaactgaaaatggtttatattttaaaattatgaaaaaaacatgtaaacaggaacacataattacgtctgaaacaagcgagacctaaatcatttagtgctaacaaaatagcataaaagctttaacgaaaaaaaaatagtcttacttgttgccaaggagggcatggagtctaacgatagtactctcttctccatcggaaaatttgcctctccggatatcaggccggagataattcatccaccggagccgacagctcttgccacagcggttaagtccagcgagcttaggaagcgaccgccaattcccataaccattctcgtttatataagcagtgagcttatcatcttcttctggcagccacggtcctttcttcacgcctttgtcttgatcgcaacacggtgatcttcccattttgtttatatcaagaaccaaaacttatcagaggtttttgaagatatgatcttcgtttcgtcgctccctacgattaggtttgtatgtatatatagatgtgaaaagcagtcatgacataactaaagtaaagttgtgtatgcattcgtcagaatttggtgtaaatattatttttcatagtgtgtcataagtctacaatatatgagtcattcaataaatcagttaaataaccaaaatagttataacaaaatcaagattaggtactgataatatgatatgtgtcatggcgttcgaacttcgaagagtaattcgtggggatgatgttcaaacaaataatttttatataaaagaatacgaataattgttaatgcattaatggattttgttattgtgggttagatgtataaaatatttgccctagctatgttagaataaaatgttgatatttccctactaaaatcttttttttttgggaccaaatttcttacgctcttttacttgtaaaacaatcacaaattatatactatttcataatctgcaattcaaactaatcttattgaaattatgttataaaagaaagccacatttttcaaaaattaaacatgcatgtgatcatttttgaatatttcctatatatgtgtatatttctctatttagattaaaacctacaaataagaatttcgcataaatgcatgattataaattaaacttgttaactacttttcttgaagggtatatttaactaatatttaattgaaaagcaatattatgttctcattgcaaagttcatcaaaattggaatcttgcatttatcattatgtgattgcttccaccgcattcaaagaattatctctacctgcttcaatgtctcatggttgatcaaagcctaccctttcgcttcttcttcctctatttgaattcaaacgaagattattattattctccttattgttaccaaaccgtcgtttgtgcctaccatacgttctgaatttcaagtcacaaaaaattacctatgctattatcatttgttttttgtttaattgttttgtaattttttgttacgtgaaaatataaattttttacgtgaaactctctttagtataggttatctcaatttctgttttatattattcgaaaatatacatatggatttggatgatcaagttaatacgagattttcgaattgatttactttgataaaggaaatggatagcttttttcgattgactaatttaattaaagaacttctctcgcgggttccaaacattaagtcgatagcgtgaggaacacataaacgagtaagtggattttattagaaggtgtaactataaagttggtattatatattacgttgtattatactattggatctttgaaaaaatctttcataatagaatcttgttgtcttcaaaggaatgagaaggatcacgacaaattagaaaaaaaacataaaacgaaatttcctacggttggagaaaatgtttactagtataatttaaataatgaggtttaatttcactctcacggaagatcttgtttacatacttaattactatttttttaccgttaaattactgttatggtttaaagggtcaatgttcaggcttgtttcacattgtcaaattaaaaccaaacacttaccaactctctatttatcacgttgactatttaaacagtcgtatatattaagggttccatgtaattagtagcaccatatagtataaaattcctatgctatatttatttgacattgtcaacgagtatagataagacaagccttaaaattctatgtaatgttattgttacgcggcttacgcaacagatacatagtcgtcaatttgtaattcaatggctgcttcactctttcggtctctgtagctaaaattgacttccgaattcaaatgagttcataacattgtataaactttcagtctagatcggttatcttttttcttgtttggatttttgttcctactcttgaacatctttggaaaccgatcgatctttgaattataaacttgcaccatatagaaaacagtgaaggtcgcttgaggcaccaagagtatcttccaagttccaacgaccatccaacgtatgttaaagtcataaaagctggaaactggtttcaattagagaacaactgttagcgtacgtacgttggatggatgtgctttagcaaaaaaaaataacaactgcatggatcggatgtgatctctaaaacacataatcagaacatgcatactgagttagttggcataatgatgtcttcgtactatattagaagtaacgcttaactcgtcccatcaccagtgtttttgtgtggataacgatgaaaatcgtgaactcttctctcgtttggtgataacaatattctctagcttgactcagaatgcggatttgctgtagatctttccgtgaccctaaatccaaatcttatatctttatgggtcgatttctaatagaccaaatttatctttcacagtatatcaaattcaaattatgaattgggatcgttcaataggttataagacaaagattgcttctttgctattgagctaaattttgagttggaaagagacttttgatttcacttaataccaaaagaaatcaaattagtaggtgtcaaatgccaaaaaaaaaaaagaaaaaaaaaaatatatgtaacagtatttatgatgttatggtcaataaagtaaagagagatgagtttgggataaattttctcctgctcctatctccctttcttgacaaggaagtatataattcggtagatggaaaatcttggaaaaaacagttaacgtgtaaaattatatgaacaacgaccaaaggtttgtctatacgcaatatagaatacaaacacaagagttttgaaacaaataaacataattgcatataaaatatccatttgcaaaagtttctaaagagttgtcctatactaatgcgaaacatccgtgatcgtgtctcttggagacgcatatgtttggttatttccagcaaaacaaacattaattgtcatatcataagttgtcgttacataatgaatccatatatattttatttctagaacactaaagtcattatttctagaacactaaagtcaaaaatatttttggctaagaaatagtcaaaactcctacacatatcatccgatttatttaaaaaatcttcaagtataatttgtggattaagccgtctactaaagctcattaatgatttccatttaataaatgctctgttgtgatttgcgaaataaaacaatctgtttgagcttaagagaaaaatagtatgaaaatttgtttatacacaatggatctatatgttaaaacaaagaagctatcgtagttagatattcacttcaattagtttatttaaaccaaatttagatttcttttccctcaaaaagtaatatattaatcgatcaaatcatcacataagagttgatttagccatccaggcggtgttacggaatcacaattaaaaaaaaaaacagagtggttacaaccatgcttagcaagatgatgaactatattattacgtacatgagcgttttgtgaattgaaaagtgtcaatgtaaactttgaacgtcaatgatagatatcatgtaagagattggaaatgtgggatgaagttataggacccttgaatatgttaattaatatcgcctttaaacacaaccgtggtataacctcttatccaaactttttgcatagccgctaggagcgctttttcttaacgaaagagctaattgtttctccatcaaagtgtcccagtcttaatactctttatctatcgtccatctcttttatcgccgctcaaaatcttctgtagactttttctctaatcgtttccacatctttgaggaaaaagaaaaaatcgttcccacatctgaaaatcaatgttaccacatgtcatgttggtacttttatgagaaactcaagtttccacaagaaaaccttttaagtttttaatttaggtcaatcaaatgttgaatatgtttggaacgtagttagatcaaactgcatgatatttttctttatagtccttttgtctcacaaacacaacacaaccttttattaaacgaaacccttatggtttcgctttaatgtattcaaagagagttttttcataaactgactttgactgaagaactaattcaatacagataattgagagttaaaactagattaggtgatacgtaagaattttattctattttatttatcaaaggccttttgattttttttgggtagactgtgtggagttgtaatactataaatatggttcggacggtagtactatacatagttgatgatagaaaatgtttaaatatgttattccaaacggtcagatatgtatatacttcgtttgtaataaattccaaccaaaattttaaaaatacttaatgtttaaatattcctaaaaaaactcatttcaaagaaattttggttcgtctaaaactagcttggttcagtcagtttgtacataaatgaaactgaactggttgcaagaaacactatatttcgatttttgattcggtccggttcaatcatctctttggtgtttggaggatgaaaaacaacaaagcgatgctggttttgtcgaaaattgaaccagaacttttgttggtcagagaaaaagcctctttaattatagaaagcaaaagggaaagtcgaaagagcccacgacccaatgaaaagataaagctgtgaatatgcactattggaaccatttctatgaactgcaatatcaaacggtgacaaacaacaaaaaaacatcaaacattatgtagtacgtgaatatttctatttggctatttctaacaaaaatggttccggatataaataaaatcgcatatgaactttaatatcgaatgtttggaattcaatgcaaagatccatcgaggctatctagagtcaatatattagactaagatgaaaatgtatgtggtgatgatgatgatgattcattgccatggccatgaatcttttcttgttttgtatgatactatatatctatcttttatctttaataatactatgaatgtttcttattatcataaccaacttgaaactattaaattaaactaaagtaacccagaagtgttgcacgctgtgtctgtctctttattgcctttaacaaaagagaatccatattgatttccatcttacattatcctctgtatataaaaatggtgtatgtgaataagttagcccactaaaactaaagcaaactctcttttttttttctttgcaggatttcaagttcgattcagaaactataagacttttaagataagtattttttgcagttatttaattattcatcttggccttcaaaatgcacctttatgttccatctcacaaattcttttaagcaaagtaagtttatcatttttctcctctatatatatgtgccaccattcctcttatactcataactctccccaaattcttgaccaaaaatatccgccactttctctctggttcatgttttcccctcaatgaaatacatacacattttgattttatttaaatcaagatcgacgtataagctatccaccaatcatacttaagggttcccgtatacatatatactatatatatatatggaataatagtcgtgcctggctccctgtatgccacaagaaaacatcgatttagtttcaaaatcgatcactagtggcgtacagagtagtcaagcatgaccaaagcttatcataatatctacattatatgtatatgagtactttgtctccatagcacagcatacatgtgcatggatgatgtctaattgtctataaccgttttgttatatgcatggatgtgtgtagagggtactattttctgatactcttatcttcattgttttcgtacattctttccttcaataatatttgaactgtagttagcaattactactatataactaagatgtcaacgaggtgtttcatattgtttggaattattgttggcggtaaaaattacgttgaagtattgaataataatctagtttgtaggcaataattttttataaatcaatcattcttctggtttttgtttaatttgcataatcacatatgtattaagcgtccgtttatgttcatctttaccaatcttaatcgtttcaaatcttccaatcaaggcatccatcattcaacaatataacaatttttttttatgtatccctatcttcttttttttgtaaaattttgtgtggccctatctatcaatagttcaatgccatacctatttaatcacactccgagatttggccaaagttgcaaattgccatatttttttgtatcattaacggtttaattttctattcattttgttaaaatatatggcaataatagcattggcaggtggaatacaataatacatcgtaaagacctcttagtctcgttagcggtaaaagcctccctttgatagagcgggtttgaaagacaatgcatgcgatgcgttgtaggatgttgtcttttcttgtgtgacagaagaaatagagaacacaacacatttgtctcgctattcatacatttgtccctcccaaatttctcaacttttttttgttatgatgtttctttcctcaaaatcatcgacactgattaggtgacagatatttcagaggtcaacctaggtttgtaaatctattattaatatatacaaattgtatcattataatagtaataataacggatttagattgttagtggatcaaaaacttttgacatccaaatgacgtttttggagttctgcaataatgttaatcccctcaaatgccgtaacacgaacggatttgcattttacttgagtagttttccattatcttttggcaaggaatttttttatcatttcactgctacagaattaattcagttttaagtatagtattattacttcaagttcttatttttcttttacttctacagcattaagtatagtacatattctcttcatatatctatgtaatttacttttgtcgtgaagcaacataggcaattataagctcacatgttcgtttaaacgtgttatgtgccatattcggtgggcgaagcaccacactatcaattatcaaatcaaaaattgattgtattatatatagaatgaattgttgatttattgttaatactcacaattagagaagtctgattcaagatacaatgctgactgtttgttggttacgatgttgattataatatagtaagattagtattgatttaaattaaaaagtatatactatatactaagattagtagtgagctaattttttatttaactattaactcaacaaataaattatcctccataatataaaaagaagtaatattgcatgcgtatgattttttctttaaattggctatatttatatactaacaactgtaatatttaattatctacatagccatagcttgcaggaatcatgtagctttggttataattaactttgtttatatgtgattcttatgcgtaccaatcataaacattttctaataatacggacaaaattaaagtcatcatgtataatgtattcatctgtatttgaagctattggaggtaacatggattatgaatattatagctaataatttatcataacttagataataactttttttaaaatgtactatgtcacctttagtttgaatcgccataatttaaacaatttttaaatagatctgtaaaataaaacttcctaattgttaacgaatttgggtatacgacatgcatatatataaagctcggggctaaatttataaaccacgaaacaattagggccgcaaaaaacttttaaaggtagaaattagttttgttatttatttttcaatttagatttacatattaaattccaaaaacaaatccttcaaaatcaaaattcgaatattcctttatatttattttcttccttcgtctccttcaaattcaatctttctccgtcattcagatttcgaggagacagagacagagaaaaggattcgtgtaaggaaaagcttttaaacttctctttctatttatccctcctttcttctatctctctctctctcgatatcgatacaagagagatggagaaagaagaaggagaaacaacaacaacgatcggcgttgttccggcggcgccggcgaaattaccgactccgatatattctctgagcttttgggaggtcacggcagcttccggcgtcgttttagggtttattttgggtcttgtttgcgtttatctcacaatgcctcaatctgattacagctttctcaagctacctcgtaatctcgaagatcttcagattcttaggtaaatttattgtttttagtattgattatttctgggtttttagtaaatgttcattctttgattcaaagaccgtgactttccaatttaggattctggaatctgtatatgcttgaaccatgaagctaaagctaatctcgtgttagggttattgctaatattggcaatgtttgaatctatatatagaacatgaagaaagttttgattttttaacatattgagctttggaattgattgatttactaacatttagtgttttgatatgcagagataatcttgagatatacacaagtgattacacagttcaagttcttgttggatattgtctggtgtacgtttttatgcagacgttcatgattcctggaactgtgttcatgtctttgcttgctggtgctctctttggagttgtcaaaggaatggctcttgttgtctccactgcaacagctggtgcttcctcttgttatttcctctctaagctcattggtagacctttactcttctcgctttggcctgacaagctcgtattcttccaagatcaggtttgaaaaactaatcaaatcaatcttattgcgctttcttcgatataagtttccgaggaaattttgaaagagtttttgcgggttttgtttctttaggttgcgagaagaaaagatcggttgctgaattatatgctgttcttgaggctaacaccaacattgcctaacactttcattaatgttgcttctccaattgttgatgttccttatcatatcttcttcctagctacattcatcggtctgattcctgctgcatttgtcactgtccgggtatgagaattttcatgcatcttcctggtttttgtcttatggtttcaatgagtttgaatattatctaacgaaaatgtgtttgactttgtgaccaggctgggcttgctcttggagagctaaaatcattgggagatctctatgacttcagctccatggcgactctgtgtctcattggtgtgctctctgtgactccaaccctaattggcaagaaacaagcatagaagatgaagatcaatacgatgatgatgatgaaaacagagcatttcaacagcctctttgtgtatatatcatgtagaatgttaagaacttaagatcaatcaatcataaaactctgttctctacttgttttctttactcggagaaatgtactcgaatgcacatctcaaacaggtttcatgggccttggcattaagtttatgggcctaacaaaaaaaatatccataaaagtagtcagaacctgaattttctttgcttgggtttcgattttagtgagagtaatgactaatgagactagatttttggtgtgtgattcttttttaaaatccatatacatacacgaatgtatttggtgtgtgttgtttaatttgtttatatacatgtattgttggttttgtgtacatagtttacgtacatatatacacagatgcatgtatttatagatttatcggcttttgagattattatgagaagggcccaaaatcgttttatacgttatctgatttctatagtgaagaattctatatatactttgcagttttaagatcgatagagcacaatttgaatcatctagggctaaatattctcgagtgaggtgagaatatttgaaaatattctcgagtgagcacaatctgcaatttaaatcatctatttccctataatttaacaaaaaaaaaaaacaatataaaacgctacgtcattgaatccatttatatgtagtatataatcacaaatcacaatgtcacattgaagaaaatgagatatcttcgaaactttttttgaaaactctactgccccggcttgcattgacaaccaaaggcttttccgttaatctaactgtaaggttgataaaataaaatgatcttatagatgttgttgaagttcgatgatgccttaagacagattattcaagctaatatatatattctcaaagtagcaatcaatattgatatcaaattaattcatcattctttcgattgtgacaatgtattctacaaaagtataactgtagagtattttactgtatctactgatataaattagataatcaggcaaataacttttgtttttgaccaatactaattatgcttccagtttttcaaataaattatcagtcaaatgactttatagcaatcaatagcaagatcaaaaacttagataggcaattcttacatgagctttttcttttttgttagagggttttcttgcatgaactattttttatgtaagagaaaaacgttgcctttgttctattttaatatggacatagatacaaagcatataaacttgctaatataaaggcaataaaattttacaaaaataaacagtgaaacataaatctggtctccctaatatgatcaacaatggatttgaaactcaaataatatttctttcaaaaaaaaactcaaatattctcatgcattacatgtccaatatactcttggtcgtaattattttaaaaaggaatataatatacagaaggaaggtagcataactaaggaacttttttcaaagaatataattttcaaataaaaagctcaattgattaatcaaaagaaaattctcttacagataagcacaacaccacatcagtttaataacttaataagtctgctaccaatacgagattccataaaatcattaacaatttagctatattattataagcattggaatctaatatgaagattttaactaaaggagaagaagaagaaaaaaaacaatcatcacccgtacaaaatcaaacttaatttcatccacactagttggaaacacacattaatatatatacagctatcactgaaaatatataaacaaaatcgtataatatatagtaactttttatattgcatccaaggactaaaatatacaaatccacatcctaaagaatccaaatatttcccttcactgtgtacatatccaaagatatatatagagtgacatagagatagcaagtcaaatagtaaagacactcacaaaataagtataatacaacctaaaacatgtcgtcgtgacacaaataaaaatcggataagtataaaactcaatgacaaacgaatatataggtttcgttgtttagttcgtcgagatcaaaaccaaaacagaattggtcatatagatatgttagggctcgagaaactgaaaaccaatgttgaactgacaccaaatcatagaaatacatatatgtatatatatgttcattactatgccacacacacaacagatgtattatgtctacctatatctatatgtatatataagtaacatatagcagcagataagaagagcatccattaagcaatctttttgttctagtcgatcacattgttctatttgataaaaatattagaaaacatatattgaagtcataaattctatcaccaaatcccccaaaaataagttttgcacttaatcatagcactgaccaaaacacaaacatacctgaacttaacccatttttatatgtacatacatatcaacaaacctatgtaggacaacattattatagaaattttgattcgtgaggaatatataacctctaatcaaattctagtcggctcttatcatggtcgatatcaaatttgtgatacacgaagtggctagatatgaagaaagatttgagaatttttttttccttcgcagacgaacacaatagagtttcacagaaaaaaaaaaggattcaaacataaaattctacaaacgacaaaaaataaacctaagcttaacatgatgaacaagacaatgtccgaaatcacgatgataatttgaaattcattagtccattaaaagcttttctaacctttcttcactctcgcaaattcttcgccggaaaagcttctccgccggtatatatataatgattatcaatatatacacatcagaaaggacctcttccaccggaattccccggccaaccttccaccggaagttgcacatttggttgcatattcatcggtaaattaaagaacggaagtcctcctcctcctccagctgccacctccggaaacaaattacctccgccgttagatcctcctccaagctgttgctgctgctcatcttcttctaaaggaagtctctcataagcaacattagtaaacgaagctgcaatcacaatcaccggtccagccgccgtaagctcacccacaacgcttcctccaaccacctgaccttgtcctccggctaagaaaattgtcaaactcgttgctccgggaggtgccggaggaggaagaaacgatccggagagagaaagaatctcgaacgttccttgtagcgtcacaaccgctccagccgcagatggctgacgtatgctgacgttcgtgaccgttccgctaccgctcagaacgcagatccctcgctgtctccgacgagcataagtcgcaacgcagtcgaaaacatcgcagccgtttgttacttcaagaatgtgagctcttagagtgtttgcgctctcgcgcgtgataattaccggaggtttcggtttgttcttggatcccggtggtctgccacgtggacgacgaccaacgacgtctcctcccccgccgtgacctcctcctcctccagagcttcctgatcctccaccagaggctaagtcaagaccttgatggttgttgttgttgtcttcgtcgtcgacggtgaaatgacccatcccggctccgggagtgacgtcatcggaggaggaattgtggtgaaggtggagatcgggacgatggagctggtgattaacgtaacgaaaagctgtgcctagatcaagaccagccatgcccacatcaaaagcaaagaagagattttaatttgaaaaaaaataaaaattatataaaacacacacacacacacaagattaaaataaagcttctcttctctgtagatttgtatatgtttttttctattttattgaaatttaaactaagaaaaaagatatgagagaggattgagaagaagttataggaagactaaaatgggaagagaaagggaaatgataaaaagtagaaggagaaggtgagactaaaataaagcattaatgaagaagaaaaaatgtttgtatatatatagatatatgtatgtaaatgcagtcacttgtctaacctaaactcttacaaaatggatattgataaataaaaataaaataaaaataaaaataaaatttggtatcgacttcaattcaaattttgttctcgttgagttttatgtcgttttgtgtgttttggactcgacaataaactccactcttcttcttcttctccaatagttagagcgtgtaatatacgcggctaccataagcaaacacatatttaggtttcactgttggcttttgtgtttttctttttgctatgtttataacttatatagtataggatatttataataaaataaaatattatgtttagtattttagtcgataattattggtacaaaaaaaacttgtttgtaacatgtttgtatatgtttacgatccatacaaatatttgactagaaaagtattattaattatttcaaggtatgaattcccttctctctttttttgaacatatacacccccatttaaaaccgctacacttcttctcatagttgattggtttaactagataaattacaaagttccaaagttagcaatacattgttatgattgtatcaagtagcctaacggaagtagtctccacgcatattctaggagcgtgagaaattgggaaggagatgtatgtgagtgggtgtgatctaattggtataataagttaaaatatttggagaaaatgaaaggttaaagtttaattaagatgaatgaagccatcatgataatatgtggttggggttatcttgtgggtttcattaagatgcttcctcttttctgtctttcaaaacattctccaccatcattgccttgccttaatttatttaaacttaattaatattttgtacactcaggccttatatatagcaatcatatcagtttcctaaattaagatgtaagccttgcaacaaaaaaaaataacgtgtataaacaaagctattttgaagaaaaaaacttaggctaacacatatacctatataatcacttattcattaattaatcttggacataaataaatattttattagttaaccatggttaactataaagttgaccaaaactaatcaaagttaaaaattaattagagagagagaatagcaagtggggagagaagagaagcggcgcgtggggtccacgattgtctgaaccatttggatgggtttctcttggtgctcatggagagctaagcatttttatttggctttgaccgtctttggttggaaattagttggatctaatcatttcaaaccaataatttcgtgcctttattaatgttgttacattcaatacatattaaatttacgttttgcattaacatttttgatttccttatatagatgcatgtatgaattaaataaagctcaaaagaaaaaagaaaatatgagaagctcaatttagtgatcaggcgtttacatcagaaattacttaaatttcttgccatgtgaatcatttggtctagattttttttttttttttaatatgactcattttttttgtatgttgactatgatatgtttgaaacaaactttgttttcttatataaagtttcatcattatcggtttccaagtgttagtcgtcattttaaaaaactgaaatattgaaaacatctatgattagtgtttccttatacgagtatgcgatttttcaagtgaataaaatattggaacttacttgattttgtttttgtttacgatatatagtattttggcatccggttcataagagttttttcaagacgaccaagaggtccaagaaatattctgttaccacatatgtaatgtaacggatgggctagacataactacatcatatgtcgtgtaaaaaatcgtcaagaccgaactgaaacaaccaattttaactggttgagatatcatagcaaaacttggagtttcttaatttcgaaatagtatatttatttcttactctacattatctgatttctagatgcataatatagtatgaaatttatagaacagtttctatgacataatgattaccatcaaatcaaagaacctgtgtctttataattcattaatttgtttagttggcttcgatattttagggtaaatatatagcacattccacgtgcaaaagtttttagatctttttaacctttagaatttataattgtttcacgttatgacttagtcactgatatataaattaaagggtgtgctttttcagtgaaaagttgttaattcagttttacgtatacagtaataatataaattagtgtatatgtgtatgagtcgcttccattatttaaattatagtatctgacatattattttaataacttgataggttgatttatttgtaaccactaaaatttaaaaggaaaacctattggcaatgacgacttttggaacgaacgtagtgatgtctgacaaagccatatatataatatacactgttaatacatttattttatgtatattttatgtatattcattattttctatattatattttaaggatgtttgtgccatatatggttccttatccaatagcattgtgtaggcacatagaacttcttttacaaagatatttgaagtaagtgggtcttcaagttattaaattagtcacagtgccgtcctaaatatgtttaacaaggtaggtaaccatattttacacacgtaatacatgcataaacctaaaacatgtatatttgtgtcggtagatatattataaagtagtttctatataatttattgcccatgtaatattgaagttgttaaatactaaccgaatcaactccgatcgtttcatattataagattattcaccatgaagtaattaaatacaattcaaagataattttatatagtttcatagaatctagtaatctacaaaattaataaataaataaattcaacgggtcctttaagacaaccaaaattcattaatattgattgactatcgtccgagattaatgtatactcttaaaagtaaaatatactggtgcacatattttagcgtatagtaaaaggaatacaaaatggtgtaagaatataaaatatcgatgtgatatccgcaacatcgttactggttatgtttttttcttcaggtggtgggaaattaaagttgcaagttgagtaccagtctaccactttctaaatcataataacctgtaatttgttttattagtaaccagtttaatcgattacaaaaatgttcgtaattttactatttgattggaactcgtatccgattttcacatatgtaaaagccaaaagagctctcttttttagtgtcaaagaaaaagttgaagtctttgtaatggttaaaaagccaaaagataactgtaaatttaattacatggctaatgacgtaattacatagctagagacacgcgtaagttaaacgcgctaagttgcgaactttctcgcttaatttacttttgtaatttagtttaaaagaatcggagatgtcaaatccaagttcttggatcaaagcacgtaacctctagggtttctctaaccaaggaaaaacaaatttataagctatattatctatcattatatagacagaaaaaataaaataatttacttgtgaatatatatgtgtaggtttctacaaaagtacatgatgaatattgaaatacctaattatgtttacgcaaacacagacattgaacagtgttggtacgaggttgaaaactactgttcgtaagcagaaactggttttatttccaaaaaccaataaaatgcctgcaggctgcagataaataatagtaacaactctataataacaatttatccgaaaaactatataacaaaaatatatatatatgtgatagttaacatgttagaaaaataaaaatttgacgtggaaatatatctccaagatcaaactttatcaaaaagatatttatgaaacaatgaacatacgggtccttactccttgcatagtgcatacatgtatgatgtatctatggaaaatacgaacagacacgtgcgaaggagaagggagacacgtgggaaatggaaagagtagagagttggaacgtatagctgtcggccacgaagcagctgtcacttctctctcatgaaaacattgggaattgctccctttgtttctctctctcaaagcccttaaatttcgggggagagttatgtaagaacatctatctactaggcttctgcattttcacctgccctaattcactcgaactttcttttttacatcaattcaccaattctatattgtcttcaaaatatgtactatatgacaaagatcaaatgcacaatgtttagttctttggttactctaaaatatctgatcactaatttcttaaattcaccatttaaaaaaaaattatagtatgcacatatgacatatgcataataatcgcactaatttattttacatccccgatccatacctttgtccaagtaaactataatatgaatttccacgaaactggtcctagtaatctattgggttcattgaaaaggacaaaattagttatcacgtctatatatggacaaaattgttcggatatatacatatgtaagtacgtatatctatatgagtgtgaatgtggtgtgaggataaagaagagcaggtaaaggatgcagaggtatggggtttgcttgaagttggagatatcctttttaatcatttattaagctcttcgtgcttccctaaaaagcctccccaaaattttaggtgtacttcccaaataaatccctagctcttttgtgccttttctctattaatctacttgctttttattaatggaaattaatataattactttcatatgactatattgaagaaacaacgttttaacttataaacgattatcaattgttattttgttgcaccattggtatatggttcggttttgttgtcaatgatggttcaaattattaagatatattgatgttaccgaacgatattttatatatctagggtaaacatttcgtttttcccacgtagaaagcacaaatccattaaacgatagaaaaatattcagcagaagctaagaaaaaaaaatgttatctgacaaagaagaaaagacttgtgattgcttattgggaaataaattctggtattaccaaaaaaaagaagagagagtaggtgtttcttaatttcttaaaatacttttaaaaagattgtttaatgtttttcatcatatgaaactgatcgtattcaaatgtttttcaactttagtttttacctcaaattacccatgtacttatggtcattctccttacaagaaaatcgctttacatccaaaatacacacatgcatgtgtattattcagttatattcaaacaaaatcgagcttaagttctaggaaatcatttgtttgagttttgtatgcatatacatgtggttttgtcattattattttagaataagaagagctatcgtagaaccatttttggttacacttgaccaacacgaataattgaggccactaagagccttttgtgattcttccaagtgcattaatctctaatggagtcttaatgcatgagctaatttgtccatttcccaccatacacctaattaacgaaatatataagttaatacaatctttaattaataatagaattagaccaagaccaactggatgatgactttcggacgcgaaatcggtgattagcttgccataatgcgtttttacgtccgaagtccccacaattataactttatgccttgaaaaccaaaccctccactttaaattaatcaagtaattaaattaataaatgtcgttagcttgttaattttgtaattaaatatacaaatatataattgtcggcctctaagacggagctttggatgctacacgacaaaaacctgaatgcttctctgaactttttaatcgtttttttagtgaacttaattcaaaattttgattttaattacttcgattataaggaaaatataaggtgatattttagttttttgaaagatttaattaatattgatgatattttcatggggaaaaacatatcgagcacaatttttcaataaacatgtgatttaaggcaataaacattactagccaagataaatgatttctttattcatttaaatagtgtaaaacggtgtaattaaacatcataacacatacttaattctgaaattagtaatgttaaaccccattaaagtgtgacataattataataacatgaagattattcaaaacaatatgaagttggatactgtaatacaaaaaaagaatagaaaaatcgatgcatttttatattgatactttccttgtgtaatactataaacctacaaattttaaaaccatttttgattaagaaaggttggtatattaaaaatttccacgatatcataatgtttttattatgcaatcattatgcaatgaacacctttcttattttttaggacttatacataaattgttatgtcttttatgcacacacccacgtaataatagtaatatagtagtagtttttaaaatatccacccatttattagttaaagaataacgtgagttgtatacaaaaattatttaatcaatgatctatcaacaaagggaagatttcatatatatatagttagttgacaaatgttactatttgtgtaaaagtaatcttagtttaaagtaatttttaatggttcaatattcacatgcttgaaaacactttccctaatcagtacttgtgaaaacaatagtacgcacacacttaataactaagttaacctaatgaatcatttttatagttattgggaaaaattaaacgagattgtcaaatcctaaaaacttcgtgtaccgcaatacgatgtttattatcttctcgtcattctatcccggagatgtataagatcacttcacacatttatatttcagtaattttttaccattatatatagtgaataataaatgttagaatttgaaactattatagaataaaaggttcaaatgtaatttaaacatcgaataaataagaatattaagaaaatctaacataaccttgattacttgtgttttcttcttctagcaccaaagaaaaatttagtgtgaaaagatatgtaatcaattcccactaatagaggaaattgattatgttcacatataatatttgtacctttttttttcctttatactatgcatagatctaacattaatcacttctttggttatttttctgatgacataaatttacatatgtttttttttttttgcttttccaagtatatatagatattatttgtaatgggctttattccaactttcatttactatgatattgtcctttttgagcttatatcttcaagcccgcaaagatttgttattgggttcctttccaaaagacctcatactagttggagttggacttgacttatatattaaaaactctttttctaaactttcgatgtgggacatttggtttgtacccaacaatttgtagctgttttttacatttaaatattctcaaaaatacagagagcatggaatttaaatacatatactgtaataaacttacattttcaaattcaaactaataaagctgaaaaaaagtagtgtaaactttgtggcacatgttttgtcaaactgatgttttagttttatatcaccccattacatgtatattcgtcatagtctttcagttttgttacgtttttaaatatcttataacgtattaatttttaataactttaaaataaactatctaacaaaaaataaaaaaatagaattagtgtccgtgtgcttattttacctgcaagtacgggcatgaaggcaagggatttgatagatagccaatacgaacacgcatcacgtgcttttctaaacgcttcgatcactctgaagacgccacgtgtaaaaatctagccaaatagagtcagaacttaccatgtgggcacgtgcgattcccgcagctctaacatctatgtatgcctccatgactccatgtgatcatttgagccaatctaaatatattttgcgtattctttttcagtatacacacattggatacgaattgattttaaattttttacacatgatagattgttttgtaaatataataatactaatattatgtcatcgaaatgcaccaagtcgttgtttatgataagatcattaatggaccgattaggtcttaattaaccaatattttgtttcacggaaagcaatatgacaaagcacgtattaattagtgaataaacaatagccaatagcttggagacatgaaatacaataatgaaccgaatcacacaagacttagtctatattattttctgaaacatgaaatcatcatgttagttttacagtcaagaaaacaatgcgtctataaatttatttcaaatcaaaatcttatatagtaaatgttgacaaaagaaaatcttatattacatatgatcaggattttttcttttcatcaagtatctgttaaatagataaatatagagaaagatgtgatgggcggccaaaggtcgtcgtccgggagaagcggtcgtttgatagctgcaaaaggattctctttgctcccaaaaagcttcgctggcaaaacgtcattgtttgcttctcccttaatctatctttcctttattctcaacttcaatacaataatatagttatatacatacaaacgttttgacccaatgagatatacaagtaccaacattggtatatatgtttaactcggagatgcatattatcgggttaagcttttttcaacatcgttcgtctaatgtttgtgatggataaactcgaaaaattatatatgcttataattaacttatgatattaaaatgactggaattattgaaacttttaacccaattttaattagcacttaaatttgtacactcattgtcaattaattttggattaaaatcatatagtgttcctataaacaaacatattttatcactgatcatgatgaagtttttttcgcattttaaacaaaaataaaataaaaagagcgttaaaaggcctaaattacgtacttgtccaacggcccattgaaagcaaacgcaaggatccataatgacctttatttgggctgagatttatcattgtactgtaatttgactattttccaaggaaaattaagtccctttttatgtttttatttatttgaaaaacatgacaaaacaaatgcaatccacatggtccaacgaaagagcgatctagttgaaatctaactaagttcccaacgaaaccactgttaatgtaactttacatggcaaatatctttcggatatcaaggcccatcactttcagctcttctgtttttcatttttttcccaaaatttgtattgtttaatattcctagatttcaaattgtaataaaattttcatttggcataagaaaaaaaaataatatctttttctacatagaaaataatatatataatatgagttcatacaccatacatgtgtgtctatatacatatatatagttttgtaatgtatgtatatctcgaattgtagccatatgtaggatgattatctaaaatatatggtcataatgtcacagtgtaaagctactctagtcatttgtcagattctaacaagagaatcttagtaatgatcacgcaaagctaagatctttgcttcaccatttaaagcaaacaaactttgtcttaaccttacataggacatcaaagtcacaaccaactttttcctctgtaaatcttcacctatttatataaaatgcacactatttttttatttataattgggcttcctatattaattaaatgcatagcaatctatgatttaatgtctttttgtaacaaagtaccaacgaagatagaagaacacacctaaaagtgtagagttctataaagacgtaaagtttatgtaaatttctgaaagtagctaaatatatgtaagtaattaatagaaaatgagatttcatttttacttttctaacatatataagttactaaaatatgtttgcactggatttaatagaaagaaagtatattatatttgcaaattttgaattatacatgtgataatcaaaatgtgtgtgctcttacactcagtaaaatttattatggtaaaatttctttcatttactgaaaatgatattttgaagataagtgacctatctatgtatatatttcgggtccatctttatatttattattgaatttacatcattatccaccaaccccatcttcttcttattcttcatcttctactgagatttctctttttttttcaaaaaaaactcatccttgaatgaacggtggtgcatggatgtggaaccctaacaaaattgaagaattggaggatgatgatgaatcttgggaagtcaaagcctttgagcaagacactaaaggcaacatctctggtaccacttggcctccaagatcttacacttgcaatttctgccgccgtgagttccgttctgctcaagccttaggcggtcacatgaatgtccaccgccgtgaccgcgcctcatctagggctcatcaaggttccaccgttgcggctgcggctagaagcggccacggggggatgttactcaattcttgtgctccgccgttgcctacaacgacacttataatacaatccacggcgagtaacattgaaggtttgtcccatttctaccaactgcaaaaccctagtggcatttttggtaattctggtgacatggtgaatctttatggtacgacttcgtttcctccgagcaaccttccgttttcaatgttgaattctccagtagaagttcctcctcggcttattgaatattcgacaggagatgatgagagcattggctcgatgaaagaagcgacaggaacatcagtggatgagcttgatcttgaacttcggctagggcaccatccaccgtgacatttcattttcatgacccactcgaggctttcacattaatatctattcatacacaggttctttaaatcttaatttacatgttgttgttaaattctgaattcaatttggcttgaattgtgtatcacaattaaattcattcgatttcatgctttggttccttgatttcagagcgtaagtttacaagtatatgtttacttaatttgattggttagatcgaaatatatacaatgaaccctgcattatatgatttgtatatacttatattaaatttcatctcagaaatcccatagaacccatatatgtattgattactattgctttttatatattctgtctttatcattacttggtttagtaatgattttcttgaaaagtaacaaggctctttgaattcaaatttccgtttgatggagaaaatttacaattaacgaacattatcagtagtttgtttcaaatgctcaaaactttcaaattattaaaagcgtctacacatttaaaaaaaaaaaaaaaaaccattcctcaacagaagataagaagccaatatttttttacatatttcgtagaaggcaaatttgttcttactatttccatatgctttagggttttggagtattggaatgatgaagagatatgcgttgaactgagttttaatttattccattcgttttatacttctattactccatgtcatgttaagtagtttgtacatgcattattttgatttagtttctgattaaatatttaactatatatcttttttgaacgatttatggatatcttgtcataattagttttctaatgctcaggcgactcagaagtatcattcgtgacagagaatctggtttttctttttctaactaaagttctctaatatatctgatatttaatgccttttttatcacgatgtaggggagaaacttgaattaatcctggtcttatccccgactttagctaagagatcaattcaaaaacttgattgaataagttcttgtaagtttatgcatttcacaaataatatgtgatgtacgttgcttctacaataagggtgtaactatatatctcgatattaaatactttcaattcagtctaattctaaaaaatacgtagaacaaagaaacgtcacaataataaatagagggcctaaattagggtaaaggcaattggaatccaaaaaatggaagaagatttgaggaccacctgaaaatggaagaagggatagagaaggcatgtgagttctttttaattcgttgcatgtttcttcttactcagatctatttctgtctccacaaccattcttttattcatttcttttcgtttttttcatttttttcttcaatgtagtactctctttatattaaactacaacccgaatattagtacaactagactagctacaataaattgtgaaattcaaaaacatttaaaactaggcaattagatatatatatatatatatatatatgtgttgtaaacagagaaagagatagaggaaatcagtgtattattccattgagataaagggttctttatataggagtacaaggaaagggtaaaaccctagaaacatctcgatgatgggcttagataatgggccttataatgggcatctatctttattcataacactccccttgatgaccattatagtatcataactcgtaaagtatttgaaatgctgcctcattaaaaaccttaccaggaaaacccaatgggaaaaactatggttaagggaaaaagagtgcaacatacaattactcccccttatgagtatattcgtcgagatctttgagacggcgtaatccgatacgatagactaacttcttgaaagtagcagtaggtagcgccttggtgaataagtcagccagattatcattcgaacggatctgtagaactcgtacatcgccgctcttttgtagatcgtgtgtgtagaagaattttggtaggatgtgctttgttctatcgcctttgatgtatccgtctttgagttgtgtgatgcatgctgcattgtcttcgtacataattgttggagtctttttccctgcatacataccacagtcttcttgtatatggtgaactatggatcttagccatacacactcgcggctagcttcatgaattggtaaaatctctgcatcattagaagatgtgacagagaataaacagtatttgagaataagtctgccaaatcttctcttgaacaaatttctggataaagtacaacgccattcttctgctgctcatgaatcttttagatgattcatcttgaccatcttatttatttctctaaatatcattagtgtatgatattcatttggatgattgatagaattttctaatattcatcaagtgtattatttgcgtgttctttaatgtcttgttaaaaactttgtcatagaaaaatcatgtgggataaaaactatgataaggaaaaagggtacatccacgcatatcattcaatctccccctcggaaacatcttcttcaggagatgattttcaatcaaatacaatatctcgttggaattaataaccataatcttaatgatcaaaattatatggttttcatatagacatataaatatcattatctagtgatattttatcatagattattgtcatcgtattacttatgataactttgtaggagttttaatgattttcaaaacaaatattagtttgatcaatatattttgacaaactcaacataaatatacatttatatgattatatgtcatgttacatatttcttcttttttttttttttttttttattcgatcgagtagagttctagagaacataattctcatataattaatccttcagagattatatctttcaagaatttcatataaatgtcatatccagtgttacgtctcttattgccagactttaatacatttcttcataatacatccaccacaagagaatatatctcttcataatacatttcttatctttgtgaaaatctcattaatttcactattctttcacataaagactcatttattttccactggttttacacatcatgtgcatagactactagtccaaatatctctactagagattataattatatgtctatttcttcttttccatttttggctaatcattactttgtgtacacttttcaatagactttctttcatgatcctcctttttgtctataatatcaactgctcatagcatgcaaatatattacgacgtcgatttgcttttgattccattatattttgacatgacatagctagctagatctcttcattgtcaagtacttgaatgtttcatttgtcatgtttatgtctcttttagtgatcattcactctcttctagagatcattcactctcttcaagagatcatcaaaatatttatttcctcaatttggtcatttttaatttttgtgctccttcacttttacgaggatatttatatttggaaccaaggtcctattacgcttcatgcgatcttaagactcaatagcagtttgaaattgggccttacaggacactcattatattctggagcatttaatttacaactggtataagtgacttcatcactttatttgggtcagcaaatgcgtctggcaattacaacgctaaattctataattaaattatcttttggactcttaatatacattctttactccgaggatcattgataattcatttctttttatctttttttcaccagctgtatacattctcccccttatgttggaatagctgactatataatatgatagtgttcaaaacgagcggtatataaatccttctaggatggcttagttatcattcatatccaacatgtatacttattctcctttgagggttcatctcagcgtgctgtggtggagcacttttcacattcaaagattttagatggaaactatttggtttctgacccaaaaccaataatgatggggaaaactattaattattcattggcttgatgcgtatcgatattactaaaccattttgtgtatgaacttgaatttcaaaatgttaaacacttatcccaacggatatccaaaaatggttattataaataaacactgaaatactcttgtactttaatcaagaaagtaatctcgcaaactctatgttgcgggtttataacaaggataaatatgaccttcttgtcgatgcaacaatcgagtcaatgcgtcccattgaatcgatgcatcttttatagccattaggtatctaaatatcatacagtgggtgatcaatccataatcatctccttgtatatacttacgaatagataaagtccaaattattttgactcgtaaaaaatcacattatcatattgctttcggagcaagtaacaattgataaatcattagggagaatcttctggtttttcacctaatgtccacataattctcaatactttcacatcatcattaaaccaggatgaccaatccggttaagccaaatatactcttgaaacttttaattcttttgaaacttctagttctttcaaaacttctaatttacttttcattgcttatcagttactcccttaatgagatcttataatcaaaattacttccatatattttaataatcaatcatatgttaataaaacaataacgagataataattaaaattttagattctaatataaacgatattaaatttaatttgactagttatgtaagatcttatattcactttagaatatgagtattacttatcatcaataactcatatattttttttagcctttgaaaaacactcgatttaagttcataatagtttttaaatttctttcaaatattgtgtctacaggacaacgatacttgcgtaaaagtttaatcgtctgttttaccatctccgcatcagagatattctcttaacaatgtgagttatattcaaaaagagacttcaagtcttgaagttttagtaataacttattttagtaataatttattttatctaataacacattcatataagaattgctttatacaacttttagatctttagtagtcaaagattgaacataatcttctggatatgtcacttattatccattcattacttctctttctcgagatgatgaaacttcaagttcatccatctcgtattgaattccactctagaatcataatgtatttatatctcatcatattaactttgagatttggagaactatacagcatcgatgattttaattttgtattcccatagaaaacaatgtatatgctcttctagaatcttttaataagattttatactacttgatatactagattatttcatcgttagaaatgttttttttttttttaaaattattttctcaacttctggtgataatttaagttcttgaaaaaactttgaccatcaaaaatatgatattttcttaaaatacattaaactagtcattcatgaaaatttctataagtgattatacctttaaattaagttatttatcaatcaatttatttcataaaataatcaagtattatatactaatacaattttaatgcaatattgtaaaaccaatcacaataaaactattttgtgcaaaatttggattttacatatatcttgacaaaacttttatttagggtaatatgaattcgtgtaagatttaggtaaaataatttcgtgcaaaattagggcaaaaccatgaacaattttattttatttttttattttttttttagataccacaaagatttagagaaaagaatcttataaaaagaaaaattatcttgcaacgtttttagtaaaaataataataacacaatcaaatatatggaaatcaaatatttaatagggaaaagtcaatatctaaaagtgataagatatgtataacgttttaatcaaaggagttaaataagggatatcatatcaatcataaatggattttagataatatagtatttataaaatgatattgaatatagatgcaactattcaaaactggaatgctaaaacattaatacatgcttacatcacccaccaccgggctatgaatagttacaaaattagttatataattataaaattggtaatttatatattcaatattgtaatagtaaatcacaaagattaacaattaacaagcatgattctcttctttaacgattttctttgtagaatcattgaatcatgcgatagtaattatagaaacaaatgataagcatgattctcttctttattgaatcattgaaaacatgcttttaccgatctatactataatcatcgatcgactcatattgttttgtttcaataatagaaaataagtactatgaaccatgagtcgataagtaaacatggttcttaaaaaaaatgtaagaatctctatatctaccttttagagcgtgctgataacgtgttgtaaacagagaaagagatagaggaaatcagtgtattattccattgagataaagggttctttatataggagtacaaggaaagggtaaaaccctagaaacatctcgatgatgggcttagataatgggccttataatgggcatcctcttgattcataacaatatgttgtttcttctagttttggtccccgcttcctcaccatctctagctagcatcatacattttctttattttataatatatattttcgacatagcatgtagattttctatttatcttttttaaaatttacaccaatcattgatagtatatgtattgtaaaataaaaataaaaataaaaatatctacaacgcatggtcatattcaaacttaattctaatatttacccaaatgattttcttttctagcggttgaattaacttagaaaaagaacaatcttcacttagagatcccagtgacgatttggacgcttaattattagggttatcgactcttattaaggttcttctaaagaaagaaaatgtaatactttgaagatgaagcaagacaaaccgaagaagacagcagatatatatatatatatatatataccgaccaagattcgtgtacgtaaaagcacaactgagatatgaatttgttggcatgcaaataaattacagatgtttgatgctaagaccaaatgaaattaaaaagggatttagggattttgtatctgtgagaggaacagtccattgaatcagtgagataggatactttaattatactgtcttcttctgctcagcatggttcgaatccccatatcaatcatccattgtctctttcacctttgttttcataaatggcaaaaactttggttgcaatttgcgacaaaggatgacgtattcggcgccatttaaagttggagttttaaaagtaaaaactattactatatcatgtgaaaatataattagattgtgaagtataatttttagaattctgtcgtttacctcttagcattgttatttgattagactaaactaataattcaattaaataacaaatctaattttttcatagtcgaatttcattagttaatcgtttagttgtttctctcgtggatcttcacatcatcacatgtgccaagaagttaatattaatatatagtcattttccgagaagagtctatttgggttgtttgagtaaagcgtggatatctttttccaaagaccttttgagaacttatcaaccacaatcccttatatatggttgaagctgtgatcacttgtattacaattatattaacaactcaatcggcattaacacaattgctttcgattggatctatcagaaatcggcattaacacaattacattatatatcacgctaggtctgatcagctccatgtcaatctcgttgtttgtgtgctctcggtttagttatgtgactaagaagatgaaccgacttggataattgattgcctggttgcaatattttcgaaagtgataggatatcaactgtttcttttcaatccataacttacatacttaatgatataaccacatatatatagaatcgtgtggctgtcccgaaacacgtgaccataccatatcgtattcgaatgcacctacttatcaactatttgaactgatgtggatttaagaattggtcatatattatcctccatgcttcatagggtaatatccagagcgatgttgcaacagatccttacttgatgcgtggccaattgatgttgcttgtgtgagttgccatagatcctaaagccaaggaatacattttggaatccatagaagacatgaacaacattaagcaaagccttctgtagatttttaattctttttcgttgttgaggatagtgatatgtacattaattaatttggttccgtataattttttaattaattagcgtaacactccacccgaaaaggtccaaaaccttaaacaacacacgaagctcgtagacaagctgaccaaaaccttattagttttgtttgcaaaccccaaaagaaaaaacatctttggtgtaacaaaaatggcttcgtcttccaaagcactgatcgaatccataggctctcttgacaaagactcatacgtttctctcttatcaaaactcataggcgaatctaaattcgtccagaacaatccgccggagctcatccctcaagaggacctaatcgtcaaacacgtccttgactctctccgtccttatagcacagaaactggtggtggtcctctggtgatcaatcatgtcgcgtatcattcaggtagaggtaatctcatcgttgagtacccaggatctgttcccggaaagatcttgtctttcgtcggaatgcatatggacgtcgtcactgcgaatcctgatgattgggtaattttgattgattctaaatatgtgattttgatcggtgcccattagaattagcttaaaatctgatactgggttctgtttaatttccgatgaactgatctgaattgttccaaatttcaaagctttctctgttttgtgtactctagggtttaatcggttacattgaattttggattctctggttgacttcggtttttgttcataggaatttgatcctttctcgctaagcatagatggtgataagctt

SEQ ID NO: 590 - DNA, 99643 bp, Arabidopsis thaliana
gagctcatccctcaagaggacctaatcgtcaaacacgtccttgactctctccgtccttatagcacagaaactggtggtggtcctctggtgatcaatcatgtcgcgtatcattcaggtagaggtaatctcatcgttgagtacccaggatctgttcccggaaagatcttgtctttcgtcggaatgcatatggacgtcgtcactgcgaatcctgatgattgggtaattttgattgattctaaatatgtgattttgatcggtgcccattagaattagcttaaaatctgatactgggttctgtttaatttccgatgaactgatctgaattgttccaaatttcaaagctttctctgttttgtgtactctagggtttaatcggttacattgaattttggattctctggttgacttcggtttttgttcataggaatttgatcctttctcgctaagcatagatggtgataagcttcgtggtcgtgggacaacagattgtcttggtcacgttgctcttgtcactgaactcatgaagaaactcgggcaagccaaaccggcgttgaaatcaacggtggtggcggttttcatcgctagcgaagagaactcttccattcctggtgttggtgtggacatgctggtgaaagacaaacttcttgataagctcaaatccggacccttgttagtttccattctgttagaaatttcttggggagtttttagatgaaaattgaaggatgattgaagcttattgatgtgtattcttttgaaggtattggattgatacagcggataagcagccgtgtgttggaactgggggtatgataccatggaagcttcagtttactggaaagcttttccatagcggtttagctcacaaggtattttatatatgaatggattactctagatgaagttgcaaacttggcattgatcttttcttctgtttgtacgaaggcgattaacgcgatggagttagcaatggaagggcttaaggaaatccaagctcggttctacagagactttccgcctcacccacaagaggaagtttatggttttgcaacaccatccaccatgaagccaacacagtggtgttgtaagttttggaatctatagcatgttgtgtgcctaatgactttacatgttgtctacttacaataaattgtttggttttgcagatccagcaggtggaatcaaccaaatccccggagaatgtactgtttcgggtgatgtcaggttgactcctttctatgagtaagtctcttcacacttgtcttactcgtttcttcaatgcatttagacacactttaatggctttttggttgtttttgcagcgtgaaggaagtgataacgaagttgcaagagtatgttgacgacataaacggtaacatagagaggctcgaaacccgtggtcctgtttcaaaatatgtcttaccagatgagaatttacggggaaggtttggactttcttcttctcctgattctattctttctctcattttattgtccctaccgaaatcttaaaaagtcttaattgtcacttgcaggctcacgttaagttttgatgaagcatcagctggagttgcgtgtaatcttgattctcccggctttcacgttctatgcaaagcaaccgaagaagttgttggacacgtgaagccttactcgatcaccggtactttacctctaatccgagacctccaggtaaaccatttgataaaccgtactttaactagactcaagactgatctttcagagttctctacaacttactctttctaaaccaatgaatcatgctcttggtttgtaggatgaaggttttgatgtgcaaacttcaggatacggtattacaaaacccaactcggattctctcctttgctgaatttcctcatctttgatccttatctattttaattttgttgcaggtctcatggctacatatcatgcaaagaacgaatactgccttcttacagacatgtgccaaggctttgatgtcttcatcaggatcatttctcaacttgaacaagtataaaatcagatggaagatcataaaataaaagcttcacatagctactctcttattaactaaatggttctatacatttactttgcttctatctatttgtacaagtcaatggtggctcaatacttcagacactttacaaaatttaaaacaaaggataatgttttatacagttatttatctatcttgagttgttgtcaccttcagtttcaagtttctgaacacgtagccggagtctttgctgatgatggtgtagtttccagagaccattacccaatacaacggctgagtatataccatgtgtgatgataggagcaagaagattgtttgtctgcaatattttcagtttggtatcaacgattttactacgacatgtcgaaaaaagaaatgcgtgaacagaagaagtaaaaacctgaatccattcaaagccgaggtatagacccaaaagcccttcaagaagaggagagtagattttcttcatctgtcttcgctcataccacgctgcaaaaaggaacatagaatccttagtgtgtgatagtgaacatatctaaatccttatgctaaactgagttttacgaacctgcaaacaacttcttcagctcgtctcgggcagagcgagttttcaagaccggtgccattatataagttggatctaagagaaataacaaaacaaaatcagctatgaggttaaaggttttgtaacatagagaaatgttttaagtgtagaaggaaacctttaggggaagcagctatgtagtagagagaaccagtgagagcggctgtaatagtggctgcaaatacttgagcaaatggtacaaatggtggcaagagtccagtctgaaaattcaaacaattaaaagtcaaatacacttaaacgagttcaaggaacaagaaggagacaaggaagaacagaaaatctataataccaaagcaaccattcctcgagaatccgagataagatctgtgccccttaggaatatatcagctagtgcaccctgtcaaaacaatatcaaaaccacgaaaaacttcacatacctaaaacagaaagagaaacaaaacaattgaagactattagaaggcaaaaacctgaaacgcagcacgatagaagagctcttctccaactgaacttgcagtaactactaagataaactaaagaaacacaagacaaaggtttaacattttttctcaaagattcaatcaataagattctgtgttgagggttcttcacctgccaagctgacattccttgaaagaaacctcgaagctcatcatcttcaacatctctaatggcacgagcatgaggcgacaatttaacaacttcatcctatacaataaacaaccaaatctttctcataaaccccaaaccttcatagccatttaaagagacattcattatcactactaacttacatcaagaatgaagagaagagccataataggtggagaagcataaccaagtccagcgataattgtatctaaagaagcattaaaacctcctgtgtaatctattcctgctacttcacatatgaatcttcctgctactgccattccacaatatattcctatattttcccaaatcaccaaatccaaaatcattgtttaaataaagtttcaattttgaaatttcataaaggaaacttctttttcgaagttgctcaatcatctcgtgactcaccgattccataactcaacctaacaatagcaccgatcttatcccaatccttaaaatccccgccgcttccgccgacaaactcgccgacggaagtaacctcacctgaaggtccagctaaaccgccactaccagcaccaacaaattcgccgctactgaaacttccaaccgacgttacatctcctgaagtaacagctaaaccacgcgccgccgcatctccgtcgtcgatcacttcgctactgctctgtccagcggaagacgacgatgctttaatcgaccttaatttctctaacgaaagtccgtttaaccgtgaatttctcttcccgctacgtttcttcaaatccgatctcgaacacgccggagaatcgaaaagcttagaactactcctaaatccaccgcttccgctactacaccaagatgaagaagaagaagaagagagagtgactcttgtggaactacaagacaataaaggaagacccatttataacatgcgacaactctcaggcgaaattatcggaataacgccggtgatctcgccggagagattctcttcttcatttagtaacagagagagcgagagagaatcggtgaccgcgcgtttttattttctcattttattgtaataaatagaagtggagactttggaccgttggatggtagagaattatttgatctaacggttgtgtatagtttagtaatagagaccacttaaatttgacaaagagtaattgaacttgactacgttaccttgatcattgattttgatttgtaccactttgcatgtctacacgttacccattcgtttttgtgcagcacataaaatgggccatagttttagttaatgggctttcgtcagaatgagactcatatccattgcttgacatcttaacatatatgaatgagactgagcatgtataacatatgtatcatgtgggtttcccataaggtgtttcttttgggaggcgttactattacaacatatgtaacattcttcgtatttttttttacacaagaaaatgttgggttttgttaattatgtgaagtttatcctacgaaaaaggatacacaagagttgtgcctagagggatcttaagtatgtttgaaagagaagaatgactttgatggagtgtatgagctagggaaattctcataaagaatatgtcttggttttctgaaagagaaaaaaaaaaaaactctaaaaacaagtgtcttgggagggagcaccacgaacacctcagggagatggtatgctggatatggaactatctattattgtatgagattggtttgaatgcttttatttcaaaaacataaacattgtatcatccaacgagttcatatactgctaatcatgtagccacctattaagcctgcaaaatgattttatttcaaaggtattttgcttattttatttaaggaacaatgcaagaaaaaaatgtgctactctatgttgcaattcgacctacatgcatctggtaatagacgtacacacatttactaaaaattgacatcacaaacaatcattaattatcaatggatacgaggtgcatatctctaatcttaacatagggatgaaatgttagatatacatgatgtgcacttattaggatctggtaattgttgacgtccatcaatatacttaatatagaaacttcatgattccaaaggatactaattcattttatgtcatctatttcatacttaacacatataacgactagtttttaaaaaatacatataattgtgacgagacatatatgtacttctctatcacgattaaaagacaaaacaatatatactacttgatcgtatacaataggaaactcttttactatgtaactatatgtaacctaaagtttttgattataagagttaatataatatttcccaaatcctaatgtagccatttgtagagtaggcccaccagttttaggactaaatcgttgagttaaatcatgaatatacttgtgggcggttcaatatataaaaactacattacgacgatattacattttgttttcataacttaggttacacatgcaaatacaaaagtcatctcaatttatatgtattcttaattcaaacacatgtcataacaaaaataacaaaaatagagccataaatctatttctatttaaaagttaacaagcatatatggtctaaaattaattaaattaaattaaaataataatcaagagataataagagcaaatactaactgaatataattcctaaaatagataatcgaaatacaattcatcattaaattgctttagttacaaagaaaataaaataagacaagatatattaacataataagttaatgaattgatgtactggctctaaatttggtctttaaatatttgtgatcttctccctctttgctcatcactttttatgttgtttggacttttatgtaagtatttttcaaaattcatctatttatcttcactttgatttggatttttctttgcatcaagtgaaaaacgtattaaatttcgaagaattatggtttttgttttgattattttggctaaaataattttattgttattctataaatttaggatattatatatggtttatatttttttcaaagttatgaatgatttggaaattttatttgtgaagtctaattatgattcaagatgatcatttgtttataacttgtatcctgattatgaatcaaaaatcaaattggatcaaggattccaagatttttcatttttatcttaaaatttgatgatatcaaggagtgaaatataaatttattaagattgatcacttctctagttttatttatgaagattttttcccttttctctccttcaattgtgttgattttgtttgctctgttcttttatcgttagaaaatcacaatcatcaattctattagttagttcttcttatgaatcaggttttaaatcgtggttcattactattgatgtttgagattcattaatgttttagttttttttttcttaaagattcagggatttggactctaatagatttgtcaagaaataatatagaatatcaactatgattttgaacaatcatgactatgatcatattgttgtatctaaagaggtgacaccattattttcctctaagaacacatatgacttaaacgaatctgatattacagaacatctttctcagaagtagatatatattatccatttctgttcatcatgatggaagaatatatctttgatttccatggaaaaatgaatataattagttaattacgtatttacgtttttagaatgaggagcaaatgacatcgtatgtgcagcatgatggtgatggcgatagtgttaaaaatgcagaagttgcagaggctatactcaatgataacaatgaactgtctcatattgagcgagaagtatataatgattttattttaattaatttagcggatattagcttatgcatgttatcgatatatgatggtatatcaaataatgattttgcagataactgtttgtgatacatgtggtgatcaaggatatgaatatttacttgtgatctgttgcaactgcggagttggtgcagaacatacgtaatattttttgtcaacaatatacgtaacttttaactatgccattagatagtagcattgtttttatatgaatatctgttatcatttttttgttattgtagttattgcatgatggaaaaaatagataaggttcccgatagttggtcttgctatgactgcactaaagaggtagatgaaatgcgagaagaaaaaggaaatgaagaaaccagctctagaaaaaggaaagcagatgctgttactaattttttcgaggtaaatccttgaaaattaacgtatttattgaaggattatttgttctagaacatatcttaatttaattaaaaacaaagaccactaataatttgtttatttttgcagacagcagaaaaaacatcatctcaaagacaatttgatttgttgaacacagaaagttatcctaaaattagaaattttgatttgaacgtggaccctaacataaaactaggtgaaatctctggtatagatatggacaaagtacatgacatagatctaaatagggatcctaacatagaactaggtgaagtccctggtatagatataaacaaagtcatgacatagatctgaatgtggatcccaacgtgaacatgtccttaggtcatgcttcatcatttgaggcaggatattcaagtaactttcaagctcaatatgcaaagaaacctcgcatggatacataattctttctctgaaataaattttaaagaaaaaaaatattttgtagtttctcataagaaaaatataatgtaaaaactaaattgttatttttgttattttctaaaaaaaagtgttattttcttgtaataaaatatgtgtaatttttttgtagtaaaatatgtttgtttctcattcgttgaagattaaaatttctaagttgttttcattaaaaaactagattgatgttttattacaaaacgtctttctatagtttcccatctttattttctaagaaaaaggataaaaattcaatggatatttttttattgaaaatcttttttttgtcttttaatcatatacacaataaacacaaaattgttagcactaaatcgaaggtacactcaatcttaaatctcgtttgagtctagattcttaattatctccttttccatcactgtttttagtttgactttgttaaaattttggaatgaaaattagttataattttataagaaaataaataaaaatttgtttgaaaaataatttagttcacatttataaagtttatagaatttatataagaataataagtttattttattaaatttgaataaaaaatgccataaaatcatacctacaaattattagcactattattacgaagcaacaataacaatataatctgtgttaaaaaaaaaacaataacaagataagctaaaatggaaaaaaagaacaacaacaaagaaaccattgattagataccacattgtccaccaggtccaccgaaggttagcatctctccacttcgtatttcaaactcgcgataccatacatcgtaacactttggactatccacatattcctcaaactcgttcgaatcaatatctactagtcttttatcctcaaaatacttaagttgtttcatgaaacatgcaaacttgtttcgatatcctacttgtctcggaaaagttcctgcccccataggagggctgatagctccagctaacccccctgtatatccgccgaagaaaacttgtgatactccttgcatcgaaaaaatttgatagggccaatagcctatcaaggtttttctcgtcatcaataaccagttttttgttctggaatcctgtatgattggtgtacatatataagttctatatataacctactaaatatttaaatatattttgttactatatgttttttacctgaccgacgagaagatgagcagtggactgtcttttgcctaagacactaattttattgtaagccataccggggtagattgtcttatggacttggacatatcctcctcgacataacacattgtagcatccgttttggtgtcgatttgactgtaatatataaataataagtacttatttgataactagcacatcaaaaacgaaagatattaaaagtcattaagcttgacatttgaattgaaatataaagtaaagatcacttactatccagtatgttgttaaccttgggcgatcatctcggtacaatcctatatgcacctaaaagaagatcaattgtgcgataagttcttaattcggcatatgatgattcttatggacagctaggttttgtagtatacttactgcccaaccaaattggatgctgcttattacatctttttctctgtgatttagccaaatccaagctttactaaattgatttctcaatactcgtggtttgtaaatattgaaaaccgcttgcgctccaccccatatctttgtgtaattctcaaatggtctaataattgcatactaaccaaaaataatttatcatgttagtaaattatatataaaaagtcgcaaaaacaaattctataactatttttaaaatactgtagtttaacatcgtggttaaaatacttacatgtagattggcttctgtaattattctattcggttggacaaagtcattagtatagttaatttgcggtatgtgaattggtacttgtcctttaggacacctttcttctgctttaccagtgaataaatctgatgtttccggctccgtcgataccgtggtttgaaaatcgacacttggtctcatctaggatagagacaaataagcacttgataaataattttgatatgaaattgtgtatagataaactcatctttctaatgatcatgaacccacatacctggatttggtgatctttcatcaatggatgttgaaatgcaggttgcttatagatatccacacattcgtattctatttctttctgcgataaacattagatatatgagtcaaattacatgcaaataatgtattaactgaatatcgaaattttgtttcttttgctacctgaactgtttgagcaatgtgataagaacaaagatatatgaagatgtataataaacagtacgaagccatagattattgttttgatcgatcttaatctgctttccaaaactaacatagtgtagtatattgtatatataatcttgacaaattactaaagaaatccaaactcttaacgttatctggtcttaagtcagcgtcactgaattatattaaagtgattataccaaaagagacatgattgccaacagaaagtcaagtttctgatgattttgttcctaatttgcaatgatatttcgtacttagcttctatagcttataataatcgctaattgttgcaatttaatatcctatctccaaaaaatgcatgactcacacaaatcaaaataaaacgtaatatatatagttattatacatgttttccaaacgttatttttaacattttagtttaaatgtattagtatttagtatatacgcattgatttagatactaatggagatactattacattttaatattaatattttaccttttattttttttgttaataaaaaataaaactgcatactaatatatttttataacatgaaacagcatagaatttttttaattaaaattcatcaatgggtctcccaagaaatgggcaaagcattgggctcctacacatggcaaacaattccaaaaaggagataaaaacaaaaaatgaagccttcaccaaatgggaggatcagatcttgttgaagaccactagcaatgattcgaagcaataataccagcaaatacatgacctacggcgttgcggcagtggcactgaaccggaaccatcgacggaagtattcggttcacatctccgctccctttccgacgacccaccatacccgcaacaagtctcacacaatgtttaagctcaatttccgacaaaattgttagtatacatatacttatagaccaagtggattggatatcgttagttagtcacattcttttctttatgattaagccaaacgcaagcttgactaaactaatcattctctacttttactaaacacagcttgcgctccagcccccacccatttgttgagttcaaactcgaaatctttcttgtcttccctacataatgtatatatcatgtaaatttgttaccaattctttgattctttcagtaatcaacaagtgcttataaactcaataacaaggtgtttgcgtaataaatatattaaaaataattttactacttttaacttcaaaattaaaatggcatccttatgaagggctcttccttgtcaaacttgttcatgcctttttcttatcaatctgttctcggagcattttctctgcgagttttctctttgaagtctcttccctaccaccttgctaaaagattcctctccacttgtttgttcctagtaaatcttgtactgtataataaggtctctctcggatgtcctcttccaccgtttctctcccaaaattttctccctacaacttttttttaagaacaagtgtgaatcaagtccaaaaaagttgatctttatatcatctttttaaaaactcctcttaaaatgttatttatttaatgtttattaaatataatatatttctcttttttatttttttaattttatttttgaataacaggaggttctggaccgaagtccgtaatccctctagacccgaaaccacataatgtaatattagtttcgtctcaagcgtcactcgaactggcgacctctaaggttcgcctaaaatctttaccaattgagctaacgacacttaatttatttttttaataatcacaactcctttgcatatatatttatttttagttataaaaaaatctttttattttattgttaaagaaaaataattttattgttgcaaattgtagatttgtcaaagattcattagatttgtcactaaatataatacccaaccaaaatgatatctaaaagaattaatgaaacgtgagtatatttgttttcaacgactaaagaaacatataaacaaaacttataaaaatatgaaattgtttttgataatttcaaatgacaaaataaaaaactacaaacaattttcatctctaagatttcatttttttcaccaaataaaacctacgaatatgagttcttaaacaataaaataaaatcaccacactctttaaaaaaaaagaaacttatacgaaaataagacttattctcttgaataagtaacaaatccaatagtttataacagaaactccaggtcatctttctttaaatataaacagattccattttttgcattatacacccttccactctcacgtatatatatttcttactttacccttactatttaatataattccatgtttacccttcatcttccctctaaaatccaacacagagagatttcaacgctaaataaagagagagagagtctaaaagctcgtcgtcgtcttcaatggtgaatctcaaaccaattggataaataaaacaaaacaaaaaaaacttcacaaaaaaaaaaaaaagatccaaattacaaccatgccttcggagttaacaccagaagaacgatcggaactaaaaaactcaatcgccgagttccacacataccaactcgatccaggaagctgttcatcactccacgcgcaacgaatccacgcgcctccggaactcgtctggtcaatcgtacgacgattcgacaaaccacaaacatacaaacacttcatcaaatcctgctccgtcgaacaaaacttcgagatgcgcgtcggatgcacgcgcgacgtgatcgtcatcagtggattaccggcgaacacatcaacggaaagactcgatatactcgacgacgaacggagagttaccggattcagtatcatcggaggcgaacataggctgacgaattacaaatccgttacgacggtgcatcggttcgagaaagagaatcggatctggacggtggttttggaatcttacgtcgttgatatgccggaaggtaactcggaggatgatactcgtatgtttgctgatacggttgtgaagcttaatttgcagaaactcgcgacggttgctgaagctatggctcgtaactccggtgacggaagtggttctcaggtgacgtgaaaatgaagaaaaaaatatgatttaatttcttttattaaaaacaaaatccagaaatgttatttatgttgcttcgtataagattctcttcttcttttgtctgtttttgcttttttaacctcatatagtcatatttttaccattttcttatgatgagaatgacgtgcaaggttattttgggcattttatgtttgtggataactatgaatctttccattttcgttaggtatattccggcgagtaagtcaaaattttcggctatgcaacaaactctcataaaaagttacaaaaaaacttactataaagttaccaaaggtttatttgacacaaaaaaaaaaaaagtaaataaccattcgtgtaaggttttacttttctttgaatgtaaaaaaaaagaaaggttttccttttcttttccttttgttaaaaaaacatggggataagatttttttcacgtgttttttgctgttattgctttaagtatggtagatttagtgtgtgattcgtatgaaattgtaattacttttcatagatttcgcttttttatcgattacttttacataatgtccatgaacaaaactttagttttttttcccatgaacaaactttgtaacatatcggttgccaaaaaaaaaaaaaactttgtaacacatgaactcccgatttattaaccaaacaacaacttttttaagagtggtaaaacgataaaacaaattgtgaaggaagagatagagaagactaaaaaaaccataagtggaagtgttttaagttttaacgaagatggttttaaaagtgtgtgccgtttttcattcagattcgggttaccttttgcactatagtcaggctagtgtcccacttgacttgaatatatcaccatcatgttttatataatttattgttacaaaatttgatgtggggaatccattatatgatactataacaatttgtatattttattatcgaatttcagctggatcgagacaatagcgaaaggccacttttatattttgtatagtactatttttaatttcctatttgcaaacttaagacgaagatcttctaattaaggcaaaggtgatgatgatgttggtgcaagttgtgccagcttggttaaatgttgcaagttgccaacttggttattaaacgccgacacaaaggtagattgaaaaattagtagtattatatttgcgcaaaaagtggaaaatgaaggaatactactaattgcatgtacttgaagtcttgaagttgatgatggatggttgagccaattagaagatcgatattttgagcatcctcacctactttaatcattatcatcgttaacgtcaaatctttctttcatttttttagttacgacaacgagatctaaatctgaataatatttatatatcaaattatacgttgaaattatcatgttatggaaagtctaatggtttattaaattatcagataattaattagcaaagtaggtatatcgaattagacttttccctagagacaatgtgccaaatacctaatatatatttaggtggtagaaatgtataatatcaaatattgggataatcaaaaaatttagtcgaaatgacgattgttgtaaataacaatagcatgatacaattatataactaagtatttttactcatctagttatgaatgaaagattcaataaatgttgttgtatgtacggaagactcaatagcggtcacagctctcttggcaaagacaacaaaccactcctcgctcgagtcttcaaagtcatcttcatcgcaaaacgatgatagcaatgactaaagagaagaattagagagcagtctagtagatggacagtgattccttacgaaatgtagtgcatacatttgaaactgctaaggagtagattatagcctataataatttagaaatttctaaaaccttttgacgctcaattagggttggacacgttagatgttgcgtaatgtcctaattacgttttgtgttaaaaagtgttttttttttctgtgtgatatccttttgtagattttgataaatgatgtctcgacttatatttataagaaagatctcaccaaggtttagataccgagtatttaacttatggtgtttggcgtattcacatgttggctattcgcatgaataatgcgtactgcgtagtatgttttttttttataaagtactactgcgtagtatgtatgttatgtatgacaaggcaacaatcctctaaggagcaacaatcctctaagaagcaacaaaagacttctcctgttccatctcagtcctattgacgtatctgcgagaataagttcgtgcaatgaaatattttgtactctctcatcaggaaatgttttgttgtgaatttgctaactattcattaagtttgttgattgacgctattccgctaactctcgtgctaaaactgaatttgtccattcaagaatcaagcctttgtatatatatatatatatctgatttctcttaaacgatagatgtaatgaatcatatcgttttaaataatgactagccttgttataagctaatttcttttcggcagcccatgtcacatgacacatgctacttcattacacatgaatatattacatatagctactaggctcgaatggtttcaaacttccagcttttgttgggctttttgggttttaggttttaagaaaatccaaaatttaatttttcctttttcgtaacaaacttaagaaaaaaacggacttctttaataaagaaatctcaaaacaaacagagacgatggattttatcctttaaaaagtaaaatctgtaacaaattgttgatattatattcttttaaaatatatatatacaaaatgaagggtgatggatcagtttaaaaaattccaaatccgcacacactttggagcatcaaataaagtactcttgacacagacaaccatgcaacaacattatactattggtaagaaaatttagcaaaccaaaggggtggatattcgatcgtcttgaaatctttataatactccattagaatgtatgcgtactattacggcatgataactatgtcaataatctgccactaaacagtgttttaatctagtccaattgtaatctctattgtaatcaaattgccattatttaatgtacatttggtaactaattgtaatctgaattagtctatttagtacatcttttacgtacaattaatctaaagttatccagaatgagaaaacgatcatcaaacaaagtatagttaatattacatgtacagatgataaatgtctcctttcgttctttgtttttatttggcgataatgtgccctataattttaaaagcgcatgctttcttcttatcactcacacgttctcttcgcactgtcactcacattttcgaggagattattgctaaaatgtttggaaacaaacacaataatatatgttgcagaaaaatctctttaataatcgaccacacatgtctccacgatttttttgtatgattttaactttttcttcaaagattcataacctcgctttccctcccccacaacccttttaagacatcttatgtttatatccccatgtttcattttgatttcaccattttggacctttatgacatatattgatttttttttatttttttaaagggtattattctagtggtttcacttcttctgtcaatatcaagaaatccatttagcatttgcatgttgtgcatcatgatttatgcgacaaacttaattactctgaagtaatctatggttcaaaatactatttagaacgataatgatcatgtaacatccacataaattttgaggtcctacattggaatctctaaatagctgtgattgatttaaattatccctattgaaaacaaaaaaaagtaggtatattcgttcctaacaaattagatgcctcttttgatgccaacttcccaatgactagtcccaaatgatgaacacaaaaaactcacttgaaagtgaaatactcaaactttaactcaaaagacaacaaaaaactccaacttcagtcccatttgtcttatttctaacaaaagccttatttacatacatacaccaacaaaccaaagacttaaccattgatcaaacacatttatttatctcatgaaacaacaaaccccaacctaatcatatactacactaagaatcctctctaacaagcattcaatagcaacaagtgggtactacaaaattacccttacacaatagagtttacaactacattcactagagaaacttgtgtgaaaggtttaacactttttaccgcggcttatactatgatcgttgttttcgacttttcgcagtattctccggtgtattagccctaaagatgctgacttcaattcatggacattctccaactttctccgttagagcaaccttgagttgatcttgcgtgaaaaactgattccccattttcacagtcgcttgttggatcataagatcattcactaccgataaactcgcatgattcacttccaaatccaactccttaagtgcttccatgaacttagcaccaggatgattcctcttactacattgaatccttatcattgcatcccaaccaataatcttcacatcaacctccatctctatcaacacactcgattcttgattcaaacattttcgatcttttaccgaacttttcgcatttcccgcttctttattcatcacatcaatctgcttctgcaactcttctttatcagattcagccttttgcaacttagacttaagctcactgatatacgaaatagcatctcctaatagagaagctttatccatcttagacacattaggaaccacagctcttaaagaatagaatctctgattcaacttctctcttctctgtctctctgcctctacatgattcaaaggctcttctcttccattcgccggttttctccctcgtttcctcggtttcttctccggttcaaccacaactctgttactctcagcttctttagccactgaagcttcaagatcagagtgattcgagtcacatggaagaacagaggtaaaagaaagcatcccttcttcattattcgaaaccggtgatctcttcttattactactatcttcttcttgaccattctcaatcccattcttgaaattcaccatttcacaagatttcagaactttagggttagggttttcaacagagcttccattacaaagcttagaaattggttgagaatcagaattagaagttgagtcatttccaccattattcatcaccggagcagctacaagaccagagtcaacaccattaggttcactaatccacaaacctggatcattctctccttgatctggattcaaattaaacgcccaagaaccaaattcaccaccaccattgttaaaattgaaaaaggtgtcaactttatcaacaagatctgaactttgatgaataatctccgacgaaccaagctcaacgacaccattctctgtcgctacacacaccattgtttgtaacccataaatctgaccttgacgagctctctcacaacttgatccagctaaagcattagaaccagataaccaaatcgtgtctgaatttgagaaagcttgaccaggtaaaccagtacccttgacaaagctctgtgtcattgaaactaagaagaaccattcagtatctgtaacttcttcatctccagcttcatctcctcctcctacaccaccggagattaaagagttgagctctctaatcactctcttacgatgctcttgttcagctgcactagctggatttgatttcttctttctagacttctcttcttctcctttgtaataaccatctccccaacctaacaacactgtgttgttgttgttgttgtcttctccggcgaaaccgtgagatgattgccagaacacggcgtaagtccagttctcgtttgctccttcgattaaagcttggagacgttgctggagattatcttcgttgacttgaggaagaggaggaggaggaagtggaggaaaaagagaagaatgatcggagccgccgccgatgaaagcttccattaccgatgcatcgtcgtcggttgaccagagatttgttgtatccgtttttgattggttgagatggtaatcggttacttgaacattcgtcggagacataacagttctctgacgtagttataaaagagaagactttttgtttttccggtgagagacagaggagagaagtaagttctttaagcaaaatatttgtgtttggtttgattgtttcgggaaaaggaatctgtttatattcattttttttttttaactctaaagaaaaagaaatagtacttttattttcaccaaatatgaattattgattgagttatttctgaagttgggttatatacataacttgattgaaaacaatttttttctgaatagtaattgttttacaagaaaattactaatctatgtaagagaatcggatcaaatttgtcaaggagccttttacatcaaagttgataattaagaacaattaaagaatgaaaatgatatttcacttacaataatgatcttgtctccctcacttttggtattggtgtcaatatctgcttttcttgtgattaatcccatcatttaattcttgtaagcaagtagcatcaattaatttaaacaatgagtttgtagaattgcagttgttctttgaggcaggaaaatatgatttaaagggattaagggagtgttaacaccaaagatttggatacaacatttatatacaaaacctataaagcaaatattgtagacttgtagtttaacattttcttataaacatatttttgttggcttcgttattggacacaactttttgcaatgataaagaacaaaaaaaagacatgggtgattttgatatcaaaggtgaaagagacgcaagagcataaaggaaaataaaaggtatagtattaaaacagaattagatttaattacgaaaattatacgaccacacaaaaataatcacattatgtcgtgtgggtctcgtgtttttagtggccagatttcataatatgctttctttttcagtgagagcaaatgcccaaaaatgttggtctctctatgttcatatccgacgaaactatagtgtctactgtacagtgacatttcggaatcgcataaaagcaaacaaaacaaattaagctgggctttactttatattgggcctcacacattttgggtagttaataaaactagcccgcaaatatttcacatttgacattttttagtgtatggtcaacaacaagtatagcgaaacttttagcatataatatgtgtgagacatattatggaaagaaggcaaaaatgaaaaccgttagttagtttgaaaacctggagttataaaaagtcgtattttaatttactaatacatgttaacttcagatattaaaaacaaatcctgtacgtattaaaccatatgataaacataatattaatacgaaaaatgtataacacacgattagacaaattaggaagtaatctttgaattgaggtttaagaaaaggtgaaaatgataagctttcgtccgttttatatcatccatgttgcttcagaaacggaatttacacactacgtgtcgtttctacgtaatgccattttcgtaatttctagagtttattcagggtgttttcgtcagtctagtcagatcaaatgtttccatcaaacgttagtactgtttcctttagatttacagattttgaagaagaaagatttcaaattaaaaaatctttcaaatttcttcaaggaggtgatcaaattgaacaatttgatctacaatggcttcttcttctgctgacaatcttaccgacaaaaacattgttttcagaaaactcaaatcaaaatctgagaacaaggtaatcaaatttttttctgaattcttctctttctttgagtatcgtcaatttgatattgtgtatgtttagatctgagagttgtttgactagatctttgattcatttatgctaattttggttttgatttgccaatttaggtctgcttcgattgtagtgcgaagaatccaacttgggcatcggttacatatgggattttcctctgcatcgattgttcagctactcaccggaatcttggtgttcatatcagcttcgtcaggtaaacaattcatcatctgatccaattcttcggcattactctagctcagattttggctaaggtttaagcttttgaggcctttataagggaattagcttaaaccgtgctcaggtgttcagaattgttggctaatgtgtagcattacgttgactttagtgtggttgaatcatcagattatgttttaaggtttcagaattgttgacttcaaaatttcaccagtgtcttgaaattagactcattcaaattatcgattcattgactagataatattgaataatgccacattacgttctcaagatgctaccttttccgtttttgtatagatcaacgaatttagactcttggagcccggagcagctcaggacaatgatgtttggtggtaacaaccgtgctcaggttttcttcaagcaacatggatggactgatggtggcaaaattgaagctaagtatacttcaagagctgctgatttgtatcggcagattcttgctaaagaagttgcgaaagcgattgcggaagaaactaattctggtcttctgtcatctcccgttgctacttctcagttaccggaagtatctaatggggtttcttcttattctgtcaaggaagagttacctctttcgaaacatgaagctaccagtgctacttcttcgcctaaagcttctaatacagttgtgcctagtacgtttaagaaacctattggtgctaaaaggacaggaaaaactggtggtcttggtgcaaggaagcttactactaaggtaagtcttaggggtatttttttggagcatttacgtttttgttctcttgttcagattaaaagattggattttgtttttggtgaaatgtagccaaaagacaatctctatgagcagaaaccggaagaagttgcaccggttattcccgctgtatcatcaacaaataacggggaaagcaaatcatcagctggttcatcatttgcctctcggtttgagtacaatgacgacctgcaatctggaggacaaagcgttggtggtacacaagtgcttaaccatgttgctccaccaaagtcgtcaagcttcttttcggattttggaatggacagttcttttcccaagaaatcaagctccaactcttcaaaatctcaagtaaacacataatttctcagtaacaaaattaataaatcgaaattccaaacctcttctaaaccatttctttttctcttactaggttgaagaatcagatgaagcaagaaagaagttcacaaacgcaaagtccatatcttcagctcagtactttggggatcagaacaaaaacgctgatctggaatcaaaagctactcttcagaagtttgcagtaagtaacaacattcaccacaatctcaaaggaacatataacaacatcttccgattctaatgccattgttggaaattacagggctcagcatctatctcaagcgctgatttttacggtcacgaccaagatgattccaatattgatataacagctagtgatctcattaaccgactttctttccaggtaaaagatccatacacctgaatctctggttcttcttcacatttttaaccttttgacgaatttttgatcaggcgcaacaagatctatcgtcgctggtgaacatagcaggagaaacaaagaagaagcttggaactttggcttctggtatcttcagtgatattcaagacagaatgctgtaagaagaccacgagtctctcacatgtttttgatattgacagagaaaaaaaagtaagaaagaagctttgtcggaaaacttccaatgaggttcacgtttctctgtttttattttatagaacttttttttgaaaactattgagacgtggctattgttgttatcatcaaaatctatattgatactattatactcgatatgttatagactttattaaaaaaaactttgtttgtttgcagaaagtggatttttaatcaaatttaattgtgatgattacaatgtcaattggttatgcaagatattaattaatatgtttaagatttttcacttttaataagtaaaataaaatacgtcaaaaaaatttcctaaagataatgccaaaaaggttaaattatagaaattaaactaaaatatattaaaagttgacttaaaaatgcaatgttgaccaccgacctaggggaaaacaaatttaccgtatctgggatagaatctcttctgtatcatctcagataaagattactacataaacacactttacagttttacgacgcccaaaattcaattcccggagattaaaaaccctaaaacaaacactggcgattcgattttccctcccaattcaaatcatctcttaatcttcttcttctcactatcctctcaaattcgccgccgatcttccatcaattttgatttctcgcaccgaaatttcgacttttcatctcctatcgacgaaaccctaatttttcacactccagaaatcgaactttgacgacgatgttaatggctaaacccgacgtaccttcatcgattttacctcgttcgtcgtcgatacttcccaactcgatcgaaaccctagatgagaacgagtcgattgaagcacaagttaataatgttcagtcattggctctttcgtccccaaatcgagatcgcagcgatgatgatgataataataataatcatgattcggtttcaattccgcctccgatctatgatgggtatagctcttcttcctctgacgaatcccagtccgttccttctcctccgatcaatttggatcacgatgatgatgagtgtcagattccaatcaggaatacttcgcaagctctagacgatatcgacgatgatatctggggcgatgatgatctcccagagactcgcagaccttggactcctaatgtttcgcctggttttggaagcgatgatgatgatgacaatgatgatgacaactctaaaaatgaacctcgcaaatccttgttctatggtttccggcaagaacctgagcctgttactggtgtggtatgttctgatttcgtttccaagttttggttttttaattttgggttttgatctctgattacgaatttgataatttttgtagggagctgggctttggaatttaggcaacagttgtttccttaattcggtgtttcaatgcttcactcatactgtgccacttatcgagagccttctttctttcagatatgaagttccatgtcactgtaagacttttaatgtagtgtagctttttgttcttatgttacgttgtaatgatcttatcttatatattatgtttggctttgtaggtgggaatgagttcttctgtgttataagggctattcgctatcacattgaggctgcattgaggcctgagagatgtccaattgctccgtattttttttttgacaatcttaactgtatccttcatcgatttttatttcataaattttctgaatatatttgattttgggattctctgattttttttatgagatgcattttgatttatccttaagctgtcacagatttttcacctgacttccagcgttatcaacaagaagacgctcatgagtttctgcaagcatttttggagaagttggagatatgtggttcggatcgaacaagttttcgtggcgatatcacttctcaagatgtcttttctggtcgtctcatcagtggggtaagtagtttaaacttttatacacttggtcaagtgtcaaagctatttcggtatgagtttcagttgttttttttgtaaacatgtacgcatttctgttttcagctacgttgctgcaactgtgactacgtctccgagacatatgaaaagtcagttgggttgagtttggaaattgaggatgtggatacccttggaagtgcactagaatcctttacccgtgtggagaaacttgatgagcaattgacatgcgacaactgtaatgaaaaagtttcaaaggagaagcaactgttgcttgataagctccctttggttgccactttccatttgaagagattcaagaataatgggttatatatggagaagatctataagcatgtcaagatcccattagagatagacttgcagccatatatgaggaatatccaggaaaacgaagtatgtgaaacttgcagtaaactatcttatatctttcttttactcaaaattttgtatttacactttgagacccacttcatttctttatttgtcaggtttctacaaaataccatctttatgctctggtggaacattttgggtattcagtagcttatggacattactcctcctatgtgagatcagctcctaagatatggcatcactttgatgattcgaaggtgatgtttttagtaattctactcgatccgggtggtttaatatatgatttccataaataaagttttcctttttgtgcttttgacaaccgcaggtcactagaatagatgaagatatggtgctatcacaggattcgtatattcttttttatgcacgagaaggaactcgctggttttctagtgtctatgaagagatgcagccattggttgaagcgagtttactaaattcgtccccaaagtctgtgcttgattcctctactaacggggagtgtttatcagagatcagttatgagaatggcgataaagcaagcaaaccctgcgattctgctggagtgtgtaaccaacatgtcaagacgaaagaagattttgtttccctctctaatgatgatgtgtttctatcagcagagtcttctagtggcgaggagtctcctatgggagagcttttggacccgcttgatcctgatgattcttacagtccatgcactgagaaagaatcagattcttgtttagccattgaaagagctaccattcgtgatgatttttttcctctgctcctggatcaaaatcaagagtcgtcgacgtcgtctccaaaactgcaaggtacttctattctctgattacaggacagattgttgaaacttttgaaccgagttttatgttttattcgcatcaatgttgacttatggagttcggttccttacttggcggtgtatgtgtgtgtggtgattctgcagaaagaacttttgaaatgcagctcttgcaaatggaagaaaccacaaagagccaagaaccttggaagcagccattatcatcaataagcaatatcgcagattccatggaagcagaatttgtgtatggagacctcatgaagaaaccttcacctcgtgctagagagttgttggatcaagccatttctacaaatggttctcctcccaaaaagttaaaaacaacatgaaaatgtgatctgcttctggacacagagaggtatcatgtcgactttcttgatcgctagctacaaacttcttctaggtgttataattgactttgatttagactaaatcaggctttaatcgtttttgtttcgtgcatactagtagttctggtgcttttgacttggttaagcaaggattaagaatctaataaagctttagattctgttattggtttttgcttctttttctccgaccattgattcacctctttttgttcgaacctgaaaaccccaagtcctgagaccattaagactagagagctttgtggtttaaatgtgttgacacattttcaaagatcactggaactcgacggaacatcaagtgaaatgtgaataaccgataattcaattgaaatgaaaaccgaccggtttggttccgctcatattgacttcttgatttagtactttactaataaaccaagtgagcgatttactactaatcatgttaagtacagttgtcagtaaatatctgaagattagtggactataagtctattatgagtcttaagataatatacaatttatatagagtaaaaaacttgaagattagtggactatgataacatatacattacatacatgtctatatctcgatttttgtttgttttcaactgaagagagaaataaataaagtgtttctatcgaatgtcctcgaagatgcgaagtaaatactaattctatgatgtttatcgtcgactgagtctagtcttgtttcgtttttatggttgattaatttaatacaaatttcggaaaaaattaataaagagagaacaaagaaaaaagatgataagaagcgggtccatacaccgggtcagatttggcgtgccgtgtccaaagtgcttcaattttgactaaaccattcgatttttctttttattttttagtatttttttttttttagttttatcgtcaatgaaaataactcgtgtttatatgttcttacttcttaaactttttcctcacaattttatcatgagttaaacttaacggaacatgaattactatatcgtatatgtgagcatgcgtaatgtgaattacatttgtatttatcccaaaattaggatgaattgctataatgtagtagggattaacaaaattaacaaaggaaacacaagttatcaaagtgaaaaacaaatgtggatttggtaatatcaaggtcaagtggcgtcctttttcaaagtcaatggacaataaatcgcatgtaagacttgtgtgttcctattcaaatgactgcatacgtttttcaaaattgtcacaaaacttatcaccaatacaagatttatagtatcaatagtatgtttcatcttttctatttaagaaaaaaacaaacaaattggtatcttcatccatctaccatcatgcatgacaaatgaataaaagctgttgttatcatatgacgtctatagaatgcatattatatgtctcccttttattttatttccttgtcgtcattcttttattttattatactacattatatgcatttaaacatatattaaagacacacattatatgattcataaggtagaaacaattatttatcattcatcgggccaacaaattctatatccgcatgaaacacggaagtctaaatttaacaacgcaatgagtagactcttgtataaatgaatttcaacaaataattccatgtttcacctatcagagatttagaacaaaacacaaactgttgtaagaacagaaaaaaagtgttagttaaaatttgaattcaaatgtgacattacgtttaggctttatgaaactaattgtactttcatttcagatgagacatgacagcgatattcataaaagttttgctgaattaaattatgtgtatagtatgattttatataatcaaaggacatgagtttaaaatggaatttccttttcaagtgatgcatattggaatagttagtactgactttgcaatgttaatttacctaattaattagaacaacaaccaaacgcaagcactaataaacaaaagggtgtgttatctatataataacccatcttttgacctaaatttctgcattaattttctctttaataatttaacaagtgataaacaagtacacatggattaggttattatgtccaattcatgagcttgtctccgcttattgctcgctttaaaagctataacaatggaatctaattattgatatcatccatcttcttattatatacaaatacacaccaataataatgagaacaaagtataaagtgcgattcacacttgttccaactcattcttatgcacatataatagaaataacatataaacaaacacgcacatatacactaattttccataaaacgaaatttacaagtaaaaatgaaattttctttttcaacagtcaagttatttgaaaacattacgtcattcatattatatataattttttttggtgagatatctatcattgatgttatattacaacagtttaaaactatttaaccataaaagttacatgaatacatatacacgtcttagctattctagtaattttaatattttgaacaagcaaaataagtttttttaaaaatagaggaaaaatagagagaccacctgataaaacacttataatgggattctaaaggatagagatgagatgtcaaaagactcaatactacaataatggagcaatagttttctccacttggctaatataatatctaacacaaaaaaaacttcccacaatttttttttgtttttgctaaaggtaaacacatttccatattattactaaactttattttatacataaatgcaatgtgtatttaaaccaagaataatgttgtgctctaagattatgtaacgaaaaaaaaaatctagttatatatatatatatataatgatttatttctatataatatcttataacattgcaaaatattaatttataaacatataaaatattaaatcttgataaaccggaaataaatattattttgcaagtgagattacataatttgaagatttttttgtagagtgaatatgggaaaaatatatagagattctctctattggtaattggtatattatgagaaagatattgattttttttaattttaagtttgattaaagatattgtaaacatttatataattaaaaaaaaaagagaaggaaagaggaaggaggttgggttggtcgactttgctaagataagagaagagagactgactctctctctctctaactcttcattcttctctcttttaccttctctccaagaaatcttcactttctctctagaaaaaagttggaagctgactcgataaagactctctttttcttcttcttcctgcaaatggcgatcgaggatcaagagaacacaatccgtgaaatcaaacctaagaacagaagaatcatggtacttttttaaaacaatactctgtttctatgttacttcttctctgctctgttcttcaaatgtgcaatggtttctatgtgttttagcttctgggtttggggtttttgattgaatttgaaagttaaaaccttgaaaatggtgaaaagttgttgttttttttcttttcaatttaaaatgggttcttcattgaagtgctctgttttctttttttgtatacctaacaaaaagatttgatttttttttttgattttgaagaatcagaacaatgctcgattccgttagttaaattttactttatttggtgtcacgaattggtacaatatgcttttttcattagataccaaattatatacttttaaactcttagaaatccagtgaaatagtgagcacgaatctgaaaaagataaatggaacagaatcaaatttcaaacttctatcacaagattaattcaatgaattgaaatgaaggtttaagagttatgtctcaatgttctcttgaggtatatgttgataatataccaaatggtaatgttgattaatgatatagatgatgaatattgattaatcttttgttttgtgtgtagggagctggtggtccggaggaagaggagaaccggtggccgccatggttgaaacctttgcttaaagagcaattctttgttcattgcaagtttcatggagactctcataagagtgaatgcaatatgtattgcttagactgcaccaatggcccactttgctctctttgtcttgctcatcacaaggatcatcgcaccattcaggtaatgtcttgatcttgattgttattttatacttgtgtctcttgcttcttgttgaggttttgagattgtcttgattggtttttggcagataaggagatcttcttatcatgatgttataagggtgaatgagatacaaaagtatcttgatataggtgggatccaaacctatgtgatcaatagtgctaaagtcgtcttcctgaatgagaggcctcagcctaggcctgggaaaggagtgaccaatacctgcaaggtttgctatcgtagcctcgttgatgatagcttccgcttctgctctcttggctgcaaggtacatttccaatactaccaaatagaataaactttggtatttggttgacacttttgattccctctttacacgtttcatatagcaaatcaggtctcacacagcttcacctaacatttgcttgcatttttggtaaattcaattcctttttaaccgcatgaagaaaagatcaaaacttttgaaatgggtcatcctgaaatctgatatatgttttacagtttcacctaacttctccttgcatttcagtaaactcttttctgatacttactttctctatgtttttgggaaatgaaatcaagattgctggaacatcaagaggctttgaaaagggaagggagaacctgctaatggaaacagaggattcaagtagcagcattgcaattgggaagaacattacaaatctccagagtttcagcccatcaacacctccacttactacatctagtaactgcagaatcgtcaagcgaagaaagggaattcctcaccgatctccaatgggataagaaccgagattacacacaggttttagctaatacagaggcttcttctgtctcttatctttcctcgtataccaaaagaaatggtcttttgcttgtgttagcaaaaaaagaaaggccttaagttaggttttgttgtcctactacttgggcaaatatgtgaatatgtaatgtgctttgtatatgatgcaaaaagggtagaaatggaaatataggggttttagtgggctaaaagtaagaataaaaacaaaattagtttttggttttcatttatgtatgcatggtgtaaatttggtttggttaggtgcatacatggatcttgaataatgaataataacaataaattaataatgagaatacctacctttgtgtattttttgcgattttaagaaaatattatgattcatttcaaagggttttggttggacttgcaaagttggaataaagatttttggctctaaccaataataacatatggttcttagttgaaaaaaatataattggtgttgtgatgataaatttatttaaatttttattcgttatagatgatatattaattctcatgggccattgtgttggaaagcaatttggtggggaaggtctaatttgctttctcttctaactttcttgagaagggaaccattatttggaaattgaaataagcattgacagagagaagaatatatgtttttcctcaaagagttttgattttttttagttatttctcaattagtataattatatggaacgaaccttttaaaaaagaagatagataaattgattgtttttaacgtctaatgttgtagagtgtagacaaacgttctaaacccaatgggcggatgaaaagaaaatgatctaacatagaaaactttggtaattaacgataaaaaagaccctgtacatgtttatttaattagtagtaaatatataaaaatagaagaaaaataaatccagttgtatgtgaatgtgatgattttaactctatataatatcaaaatgtatactaattaagatgatgaaaaaaatatataaagacaacgaaaattaaaacctctaaactaagatgatgtttgatgtatatatgtatgtatgtataaatttctcaaagtgtaaatacaataatatatgtttccgaagaaaagataatgtaaagaaaactaattaaggacatatgtttagggatcttctagtccttccttgagtcccaagaaccaagccaccacttgagaatgatcttttcaagtctacaagtttctctctgtttccattttcaagatcataatttccctcttcctcttctccgtccctgcttatccgcagaacaatatccgcggccgagaaccaacttggatgatgagaactaatcgaaacactaacctcttcacgatgatcatcaacgactacatttccttctgctgatccaacattgctcgtaaaccgatcaagattcatcaccacaacatgatgttcaggttgttgagtggtagggacgatgatcttagcccgacaaagcggacagtttgagtgagatttgagccaccgatcgatacaaacgacatgaaaggtgtggttgcatttaggtaataaccttaagctctcgtcttcgttaaactctccaagacatattgaacaatccgtaccgttgatcttgaaaccgttttgatgcttttttaacttgaagaaaccgatcttttttatgagagtatcatctaagccggcggttgaagactcaagagcaaaaggatcgtcttggtctcctctttccggcgagttaacgtcgagaattatatccgatcttccggattctgaggcagcttcattggtggtgtcgttggcgcaatactttgagacaagagtgtagtaagctgccaagagaaaggcagttgcaaatattccaaaaatagcaatgacaagaggggagagattggggtttgatgcaacgccatcgtttaggaattgttcataagaaattggtggtggagagaagttgatgtaagtacaccattgaggacaaaatgtggaacataagccttgagtacaatctcttgggtttatgtattgattccaagcactaggatttggatcagactccatgaaagaggaaagacaaaagaaaaataaaatccttgagggattaatcaaagattgtgttacattgataagtgtattcattcatatatgataatccatttcgtagcatcaaagagataagaatttgtttatatatgtgatgaatgtagtttatagatgtggaatgtaccaaaacttgatattttataatagataatagagattcttgctggtacatgagaagctaatttgctctgattattatttatctccttacttttttgttctttttatgtgactttaactttgttctttagcttcttctttttttcttttctttttcttttgatgatagaattggcttgttgactaagatattgaatggggtacgtaaatatgttagcttttaattattttgatgtcatattctgtttgaaggatctgtaataatagtgttgatttagacatctcataacataatcctaagtttaacctgtctgagtttgaccgaaagcgtcttgggtttgggcagttgcaagcatggtccgcatggtgtagtttatatctcgagttatgttggaaagttgtgatatgcggcaagagtggaacataccttgagtaatgttcaatctctcttgcactatgagtctatgactctaggctagggtcatggttgtacaacactcctttagttcaaaaaaaaaaacactcctttaattatgaataacctttaacaaaggaaaagaaaagaagaagataacaaacaaaattcgaagaaactaattgcgtatagaggaggatttagatagaactatggggaatttactttctcaactctctagatgcgacacttttgtttttattggtatatatcgacgaatttagactcatggagccctgagcagtttaggacaatgatatttggtggcaacaacattgctcaggtgttcttcaagcaacatggatggatcgatggtagcaaaatcgatgctgatttgtatagggagattcttgctacagaagccattgcagaagatactacttgtcaaccagaagcatctaatgtggtttcttctgctgtcaaggaagagttatactgatgccacttcttagccatgttgctccaccaaagtcatcatcaagtaaatcaagcttcagctcgtcgatagttcaagtaagcccgtgtgttttagtgacagcttcggtctaactagtgacagtcatctttgaactaattagattattaggtcgaagaatccgatgaagcaagaaagaagttctcaaacacggtctatttcttctgcagttttttggggataagtacaattttctgatcttgaatcaaaaactacccttgaggagttcttggtaagtcttattgcgataaaataaaagtcgacactttttatgtgaaaaaaatactcatcacggcaaaactttcatacacagaagaaagattcatacttcacaaaactgtctttaacttctctgctcatatgccacacaatcatatcagaatccaaagctagtgtcagtttagatgttgtgagctatttttttttaccagaactttaaccggaaaccggagaaatgaatggttccgataatagcagataaagcaaaggcgtaagcggttaatatcagaagagaagagaatggagaagcaaagatggtatctacggtgaggttcaccattcctgtaacaaggtttgcctgtaaaaaaggggaaatatgatatcagatcaaagagggatccattgtggagaaatcagttgataagagacttacaagcagaaaggttgctaacagattttggtcaattgcttcttcaagtgatgaaagcttgttcagaggtatgtaactagacagcataaatatccccaacgcctggaaataaaagcagagacgaatcaaatctcaaatcacaaagacaaagtcttcaccattatgatcaattcttaactataaagagacctgaagatcttgcgcaacgcccaagtaacgtaaggcatgttacactgtagaatataaaaacagcttcaaacgttattgtccctttaaatggttttgagctataagtgagtatcattaccgttcgacgggagatcctctcaacgtagttgtcaaaaagtatagttacaatcctgagacaaacatacataatatatgcgcatgagtatcttatcataatgagatcgtatgttctataaccgcttgtttttaccataagagaagagaaacgagaaagactctagcgattgagcttgtggtgcttcgaatatttgtatgttttccgtaaaagagacgataacctaagtgaacgccaagaaggtacatgccccaataacctggatcaaaacaaagttagatgaggaagaaccaaaagagagtagtaaataaaccaagtcaaaatcttaccaagaatgctatatactccttccttgtttttgctgataatgtcagttcctctttcgtccgaaagcaaatatgtgttcagtccactaagcaaccaagtttggtaccctgagaaccatggaagttgaagatagttaggtttcactatcttgtaattaagaaagaagagaaagtgaaactgaaatatacctgcaagaacagcgaaacctaggagtccacagtacttggctggtatgttaacaaacgatgtgagaattgatatggctgcaagtgtgaaaaagaaattccagtgtactccatattccgtaacgtggacctgcatatagttgataaccaacgatattaagattttgtaaaacgagaagtatttaaggcagaaacgcaaaagcttctttacctgataatccacacctgaagtggtaacaagacgaataaacccgagtaatagcaatggagcggttgctttaattccagttatccagtttctgaagaaatgcaagtaaaaattggactgagtttacataatgctgaactagtaacaaagcttcacaaaatggataatggagtttcaaaggggaatccacaaaccctgatgagacgtctctagcttgccgagaaacaacagcattagccaacacaaaagagccaaccccaagatccatctgttttcatttcaagttgtaatatacatacaaacacaaagttactaactgctttaagaaggaacaacattaatatagacaaaaaaaatgagattagacattgtaaacataccaagctagtaccataagtctctgtcttggcataccttctgggaaagatagtaaagtcaacagccaagatacacaagcatgtaataagcatctacaaggaaaagatcattcagagtagatggaagataaaagcagagttggcttaaactaaaactaagcagtgtcatataccagagcaactctataagaagatacacttgctctaaacgagagagactgtcctctctgcaaccctgaaaaagatctagttataaaaccttaagttagctaaagttaaacccttaactaacaaatgacttacaagttataccttttggcagtcacagaaagaatcagtaccaacaacgacaacaagcctgtcccatgataaacccattctgatagaacctgtaatatataagttttggtgatcatcagagaacattaaaagtaggcactggtgagtcaaaaagtttgaagagagcgtacagtgaaaaagaggagcatggggaagacaatgaagatgaaatccaatgatatggcagccttccaatttctggaaataacaattttctcatcgtcgtttttcttcgatgtaacggatttaacaccattgttatctataacaaacaagtgaacatctttagcactaatcgaacaaaagttacatcactcacttcaaaaagcactcaccaattttacagtggaagccaatggagtatcgtaatagaaccaagagctgaaacaagagaaacgtcattattatcaggaattgagctaaactgagtcaaaagaaacttacagggacaatggtcaatagtgctgcgatttccagaattgaagatccatcgagattgctcacaaatctgtcaaaagtcaatttgaacaaaaaaaccttgaggaatcacaaattctaaaagtctgacgaatgagaggtcattgagagagtaaacaaaaagagagaagctttttactgttctttgagatgtttgtttggatttagagtctgctttggtacagaatccatcaaaactcggagatcaaaaaaagttgtaaacttcgaacagtcgttctcgttgatcaactatatagatttagtttggtttggatcacgaaccggccggtttaatcaaaataatctcagattgcttttgttattgttacgaatctatgctcgatttcacattaaaccaaacatggactcactaatctgcatcaaacgaaccacgttctattctaccatcattttggaaaatctattctgagtaccatccatttattctgagtaccactcggccatgtgtaattacatctctctccttaatgaataactgagggagaattcaaaataaagagtaaatcatttagtaaaaaaaaaaaaaaaaaaaacggtcgttgctcccgcgattctctccgacgacttcggacgtgattttttccgacttcgccgccggcgacttgagctccgatttcgccggcgatttgagctctaattttaccggcgagttagcttccaatatcgccgtagcttccaagccgataatctgctcccaaagtgagcttcctcttcaacggcaaaagtaaatccgatctcgttttgatttgtagattaatgtgaatttcttgttggagttagttgttcataacataaaattgttgtattgttcattctgggctgttttatcgttttgaatcagagagtttagtgagtgttcaatcgaaatttatgatttgtgaaacccagaattgacgaactgggacaaatggtaaaacttagatatcatagtataagcggtacaaatgttttattgagatacaataggacaggtggtacaaatggtattagtgagttataatataggtataattatatctaaatctaaacgattacgtaattgtgtttttataatttatttgtaattacaggagacgatgaagaacaagcacacattcatacaatttgacaatgggtattattcagaagagcatgagtggatttcaaacaattctttaagcggtgtattgttgaggacgtcaaaggtaacatactctatgttagtagaaaagatatgcaagaagattggaatagatgaaacctcaaggaaggtaaaattgagttatattctatgcacatctcagagagagacatctattgtagatgatgatgactttttaggttatctaatggtagtgaatgctaagggaattagaccagctttgaacgtggaggtagtaaataaagaatctgagagggtgaaacaaatttcaagggtaaagggaagaagttcagttggtgttaattatgaggagttgaatgtttgtaccgtgtacttgtgctgtatgtactattgctttatgtattatgtcttcatttttaagtactttggaattttcttaagtattgtgttgttatgtctgtaccgtgtacttgtgccgtctgaactattgcttcatttttaagtattttggaattttgttaagtgttattatgtatgtaccttgtacttgtaccgtatgtactagttttttcatgtttatctcttacaataaaacccctcctatatatataagaaagaattatacttttaatattatttctttttacttaaatttgctttaatttaatttaatttaaatatttttattacatcaaaaatatgggtttttgtatgaaaaactatccagtttatgggtttttgtatgaaaaatacacctctctttacttttaattaaaactataatttctaatatattaaataacaatttttaagaaactgtatttttaatatatttttactatttatgagacaaatacagtttatttattttatctactaaaatatgatattattaaaaaggaggtaattttttaatttttctcataattataaagaaaaacttatcatacttggaaaatctttctatacattgttctggaacatttattaatcacttatactaattatcatacaatctaaaaaacaattgaacatattatactcatcaattcagaaaacacttcttacattatatggtatgcattgtatcatgttggatcatcttgacataaacatggcaaaacacatatatttgtacaaattatataactataacattatatcttattattaaacatattatatcatttgtccaactataagttaattcccttaatgaagtccaactctaaatactaaaacttccacaaagtacaaataaattgagtaccggacaactgaataacttatggcacaactacggctaatgcgcagtattttgtctgggcccgcattccacttttattaccataataactattgtgtgttcacactatgcgttcacactatgtgttcacactatgtatttcaatttcaattcaaagaatttttctcattaaattacaaaattttctctctctttctttatttccttcttctcctttcttctctcgaaaacttttcttctctccttctctcttttctgacgacgaacttccgccgacgaacaacacgacgaacctccgccgacgccgaatctttctcatatcccgccagatccaagttctctggtaagttttgggttggattgaaaagaaattagggttttgatttccctatacactactttcaatattcaaacacaatttacagaaataaccatttacctcagattcttcttcttcttccccttctttttcctcttcttcagggttttcttccatcccctgagactgcattggttccacattatcaccttcctgaaaattcatacacaaccataaaattaatatttcgcgttatctcagaccaatattataaacttttctcagaatccaattttctaatgcaaatcaatgtatgattgatcacgtataaatccatgcatgcaccaatcaaacaaaccaatacattaagttgtactcattgttttctagttgtccttatacactactttcatattcaaacacaatttacagaaataaccatttacctcagattattcttcttcttccccttctttttcctcttctttagggtttttttccatcccctgagactgcattggttcctcatcatcaacttcctgaaaattcatacacaaccataaaattaatatttcgctgtactacttgtactagttatctcagaacaacattatcaacttttctcagaattcaattttctaatgcaacccaatgtatgattaatcacgtatatccatgcaccaattacatagacctatactattaacttgtactcattgttttctagttgtccctaaacactatatcaatattcacacaaaattttcataaatttgtatatacctcagaaatattttcttcttccggttcgttaaggttttccggagactcttgttcacagttttcgtcttcaaatttgttttcctctgccacttcttcacggttcatatccgcttcacggatgatcgtgaccctctcgtcttcactttcactcgaactaggagtgactaaccttacacgacccatgattaccttgcaaaaccactcaacaatcaaggaaaccgttcaaatcaacacaacgaaaacactcaaaaatcaaaaaccgttccaatctacacttacaatttggaacgccggcggtttggaacgacgacggtttggaacagcaccggtcacggcggaattgcaacggcggttaaacggaattgcaaagtggatgtcgacaattttgattttgtaaaatgttacttaggttaaaaaaattcaagaaatcgtttggtgaagaagcagagatgaaaccggtgacggtgaactggtcggaaaaagaaagcgacgaaaattttcgagaatcgccggaacaaatcgccgtttaggttaatcggagaagaaagcgacaattttgatttttgaaaaaaattacttagattaaaaactgacgatttgggggaaaacccagttacagtggagctatccgtctacatgtggttgggtcatgtagttttcctaaagtaacaaggttatttggtaaaatccctctatttctctacttaaaaataaatcaaaaaaaaattgatttatttggatggcagaatagaatttttttttccgaatcatggcagaatagaaattcttccgcatcaaacaataagcataaagaaagaacacacacaacctttttgttttgtatgtttattcgtataagatcaacgagtttagactcatggagccctgagcagcttagggcaatgatgtttggtggcaactaccgtgctcaggtgttcttcaagcaacatggatggaccgatggtggcaaaatcgaagctaagtatacttcgagagctgctgatttgtataggcagattcttgctaaggaagttgctgaagccaatgcactagatactactactgatggggtttctgcttatgctgtcaaaggaagatgtacctcctaaatatgaagataccagtgacacttcgtcgcctatagcctctgatacagttgtgcctagtacgtttgagaaacctgttggtattaaaagggcaggacaaactggtggtcttggtgctaggaagcttattactaaggtaagtcttgggttgttatttggagcatttacgtttccgttctcttgttcagattctaagattggactttgtttctggtaatatatagccaaaggagaatctatatgagcagaaaccggaagaagtctcaccggtcagtcctgctgcatcttcaactgataacggcggaagcaaatcatcagctggttcatcatctgcttctcggtttgagtacaatgaccacttttcaagataactcaagcattcctaaacctcttactctggtttaggaattgttcagaattcagaggtaaagagatctaaactttcttcagtccttgtcgtttgatcaaactacagagatttcatttggtttgatcacaaccggatagttcaattggtaggttctgttcatcagattttatccggttcagagagacctcttgaatgttaaagaatcaagacttttattctatttcatgatacataagtacattacagttttacttcaaaacttttgaatgtaaggatatcgttaggaattcccaaccagggtcagtttcatttcggccttcgccttcctcgcttcaccgtaacatccagacatccgtaaacccgacaaaaccgctcgtctcgccgatgtcggaatcttaattcctttattgtaacacgacaatagcagctttgaagcacaaacaaacctcatgtctttacaaagattatgcacaacagaggtgtaagtatactcatctttcacttccatcgactcaaaatatctcatcgcccggtccacatgacccgctttacacaatccatcaaccaaacagttacaagtcacgagattcaatccaatccccatctctcccatacttacaaaatgctcctcagctcttctcgtctgtcctgtccttaacaaaccattaactataatcgtgtgtgtatactcatccgctttcattcctctccgctctatctctcctaacaaatcatcgaccgcatccaaattcccgtctttaaaatacagattcaacaatgtgttatacgaaacaatgtcatgtctcctacctttcctaactaactcttgcatatactcataagcctctttcgttctacccgtcttaatcaaagcactaacaaccgcgaagtacgcatacccatcataagtgtacccttctcttttcatctctaagaacaactgaagccctcttctaatcctcctggtcttaaaatatagcttcaggattgtagtatatgtaacagcattcggagtgtaacctgatttcttcagctccgttagcatccatttcgcagtaccgactctcctggatttacaaagcccgttgataagaatgttataagtcataagctccggtttaaacctactctgcatctctttaaaaagctctagagcattgtctatataaccacacttgcataaagcatcaagaagaacattgtaagtatcaggacctggatttagcccagcgagctgaagatccttataaagaacccgaaacgcttcttcgtgtttccctagcttaaaataacaacacatcaaagtattgtaactccacaaatcaggataaattccccactcaagcatttcgtcgaacaggtagaggacatgatctaacataagccgtctagctgctccggcgattaaagaattatacgtagctacgtctggtctaattccggcgtctctcatacgacgagtcacagcgtaagcttcttctataccaacgaatcgacaatagccactgatcagtgtgttgtaagtgacgacatcaggatcaacacctaatctgattccgtcaatgattaaagactcagctttctctaatttccggaatttgcagagtgaatcaacgcaaatgtttaataacctcgttgataatccggtgaaattcaccaacccacgaaccattctattggattaatccgaattatcatagaagaatggtggaaggagtaagatttggagattaattcgtgacataggatttgataaacagagaaaatggtagaaattttgataattcagatgcagatctcggcgaagaatgtgatcggcatcggaaaaatgtgaacttttcgaaacaaaattgttttctctttgaagcagcaatctgagaggggttttacaagaagaacagtcttcaacttccaagttcattatatttcataataaacccctaagtttttgttttaatcaaagtaagccctaagttataaatgttaacatatacaccaacaaataaaattctttcgagtcttttaagtgttataacaaaggatgaaaaaaaaaaaatagaccaagagaatgaaaacttgaaagaatgtagcaaaatttcaaaccatgcatgcttgcttgttattttgcaaatcaaagcgacaagaattattgaaaaggcttaaaacatgcaaatgcagatttctttattagaaccaaaactaaataaatgaataaaaacagaaacattatgttattcaatttttatttttttttataattcaaacttggcttattcaaattagattagaatactctataatctaaacaataactgatattaacaaaacaaaaaatcgagataggttaggtaaattcatccgagtaaaacacacaaaatataaagggatattttgaaaactatcttgtttttgagttttcatttgaaaaatacatctttctctattattaataaaaaaatataattcttaatatgttagatgaccgttttatccggatttaaaataaaagctattttcttaataaattaaaacgaaattcgaaatttagaagaaacaaattaaaataaaataaatttgaattcttaattatgtttttaactattttttgagataaagatttatttattttagatatttaaaattttaaccaaaataatgtcgaaaaatattgtaaagtacttaataaaacttatttgcttttttcttggacaaaattttgtttaaaaatattcaagataagaattaattttgactttttcaatattttttcaactatttctgagataaagactttgtttattttatttgttaaattttaataaaataatattttaaaatattttaaaaagtctatcacttagtaaagtttattttttactttttcgacaaaattttgtttaaaaatatttaagataataattgtttaaattttaatgagactatcttagtaattttgtatattaaaaattaattgtttaaaaagaaaaaaggagagggtattttccaaatgaaaactcaaaaataggacatttttccaaatttactcaaatataaatgcaaaacaattcgttcaaacataacacatgtgaaacaagattaattatcgtaaagaaaaaggtaaaacaagagtgataaagatatttaatttaatttttaacatgttggactaaaagtttaaatgttgcggcggaggttgcggtggcagagataaatgaattattgtagatattacggtggccgcagagcaatattgccacgaagatggaagcgacgaccagaacaaaaaaaaatattcaattaaggtaacttaacagtagaccaatcgagaccaaaccacatattagcgaggttacgtcaagtttccttactacatttgtatggcctcgatacctgtagaaaggataaagaagcttgcccaaagtaccagagagagcataatcgccatgttgaaaccattttcgctcatagttttattgggatgtgcgaaacggcgggaaaatcattttacttttagagaacggcaggagaaaatgcataacacgaaaacgccaaagattgctcttcatttatttttattctaacaaatctagtttttatttttattaacatatctatagaattgaaacctaacattttttataataattatatatctttttggaaattgaaaattttgaaagaactatatttacaagataacaagcaaaaccaaagcaaaacatagtaatatattttttaaatatgtaacaataagtaggttatagattataatttcttaaaatataatctataacctacttattgttacatttttgaataaaaatataaatatttttcatcttcgtatttctcttcaaccagatggacgatcttgttcatttcatgtttatctattatctatcacattaagcttttcatgtcatctattataaaataactcatgcataaatctttaatctattctaaattttttatattattatgtaaaattagattagtttatattaagtatgtaatcaattttcattcatttttttttaactttttagcaatttaaatttatcatatgttggaatatttagtgttttattcaggatgaatcatgtgttggaataacagtaaatatttcttctttttttgaagaacaaggataacagtaaatagttcagaattactttttaccatagaattggttcatctctttcaaatctagtttttgttctgcaaataaatttgatttgaacgcaaggaaagactcacaactcacaaggcttccttttgtagggttaatcactcacaaatctggtttagcattacaaaataaattgtccgttcttattattaaactccggaaataaaagaaataaattcactaatatttctaattagcatcttcacaaaattcactacctacaacatctataaccaatacaacaacaagaaaaaaaaaatctaattgccaaaaaaaagtgtataattatttcttcttcaatttttagattgcgtttgaccagagacttcaccaaaccggcgatgatcatatcctctgtttctaataagttcagcgaacgtaacacaactctctgtctggctatgtcctctcgtgaccttaatctttacatgttctggtaatctcaatgtatacttatcttcttcctccggtttatttctcactatcgagtgtcccgtagaatgcgatctagagaatttctccggcaagttttgttcctttttgatgctactggtctgtcctgaagatggccaagtatcaatctgtgttgttgtctgctgacgatgatgatcgtcttcttcgtcgtcgcttgtttcttgaatcacatctatgatcatctcatcgacagtaggcttggtgttttccggtggcggaggaggatcaagatcccgacgacaaacagggcaagttctgtgagattcgaaccagagatcgatgcattcttggtggaacacgtggtagcatgttgtcaagagacgtagcacgtgatctccgtcgaattcgagaagacaaatggcgcattcgaggccgtatttctcttcccggagatctttaacggaggagtaaggaaaagtgggaaatgagttaatgattcgaagttcaaggccgggatttaccggtggagcttccggttgctggaggggattgtcggatacggtgtctccgccgtggtggagacgccaagcttgcaccattgtgtcgaggaaacacttgcaaaaatagagagtgaagaaaccgatgaagaagaaaacgaggaggattacggtgaggatcaccgtgagaggcggtgtaacgtaatgttgttgcggaggttgcggtgccagaggtgaaggaattattgtcgacattacggtggccggagactgaatatctccgccgtgagacttctcatataccaaaaaaaaacaagaaagcgagagacaagagaaattcacttatttcaaaggttattttaattattagagttcagttttatttggtatagtgtgtggaaaatgtgtgtttggtgtgagagaaagagtgttaggaagttttggttactaaaaataaaaagtgtgttttgggtttggttatgtttgtttggtttgtttgcttaatgctatagcattgaacgagtcgtctgtgacatttgtttaacgttaagccacttcgtccttaaaaatagttaagttttttttctttttctttggttttaatagtatataagtctcgtttctaacaagcaataattaggatttaggttcatgacacatttcggctaatggcttttctttccttatatatacacaattcatcaaggtataaggatgttttgaatatacttgtttggtatgatcggtatacttcataaatcaactgatcatcaaaaactctcgatgaacgaccatattcttcgaaatcaatggtcattgagctatctttgtatttggtatacttttgaatcaacgaacatcggatcaactagttttgcacaagctcattccacaaaggtgtccacacggacctcaattgatgttttgcacgaagagacatgcatatatcggggatgtgaatttgcaaaacaaggacatcagtcctttagagctttggttgcttaatcatttccattttttctatttgaaaattttaatattatgaagaggagacaaaaatatagacccgtcggtaatcacttatctttgttttgacaataatattataagtcaagtactagtttccatcttccacagttagtaaacaaaactgttactgtattttataagatcatctttaccattaatagtgtgaaacaaattaaaagacaaagtcacaactagataacaaccatattatatgcatttgggaaaaccttatcttatcttatcaaaaacagcaaaatatccccaattgaatcagtatagtgaatccagatcttcccaatttcatagttaaagacaagaaaatgaaatgtcattttgtgtgattgtgatattaatcattcacatattaacatcattctcatcccatcgttaatccattacattttattgtatagatttgacacacaaaacaaaacaaaatgcatgcaaagacaattagtaaaacaacttctttttttgatctaacatcatgaataacatttggcatgacaacagaaattttatagtttcgataataatacagtaatactcatagttttatgattctgactgaatcgccaattgtttttcattaaagagaaaaatactatggtaaggaactaaggatccatgtggtaatcgaagagtcgtcgatcacgtgcaatcctccacacgtgttaagtcagctcgtagttgattcttcccccttgacggtcatctcatcggacggttgagatcagccaactttaagtgtatcacacggaaaagggaaatgtagcgcgagaaagtcaaaagatccaacggtcgatatgaaacaaaagtcagataatcgtacggtagaaacgaagctatatatagcaacaattggattattcttatcatcatcactctctgagatcgaagagaaagcaaaatcaaagttgtgatgaaatctctattgatgagaaccggttcgatgccggttcttcaaaaccggttaatttcaggtggttcatcgcggaagatgacgcctatctccaggaccaactccgtcgaatcattatccagctacggcgagagattcgccggcgggaagatttcgatcgaggttaaggctaatgtagggatgcggagggtgttatcggaaagtgatgtgattagatctgagagaatgttgaaaagagttggatctaagccttcgccggcgagaatcccggaggatgatgaagcgggggaggaagaaattaggtttgcagatggttgggggtctatgatctccggtggtttacctgtggaggagaaatgtttcacgggtggcggtgttggtggtggatctggttatagcggcggttatggaaacggaggaggaggcggttatgaagataagagcaagatcggtgattattatcgagagatgttgagatctaatcctaataattcgcttcttctgatgaattacggcaagtttttgtatgaggttagtgatttttagaagctgaatttgagttttgggaattggagattaggttttgatttgggattgaatcttcaggtggagaaagatgcagagggagctgaagagtactatggaagagcaatactggagaatccaggagatggagaagctttatccatgtatggaagattgatatgggaaacgaagagagatgagaagagagctcaaggttactttgatcaagctgttaatgcttctcctaatgattggtataatttgtatactttgattacttttactaatcccaaattaattttctttactttgaatctaaaatgtttgtgttgttgtaactttgtagtatggttttgggatcatatgcacgtttcatgtgggaggcagaggatgatgatgatgatgatgaagaagaagaagaagaagaatggatggctgcatcaccactcatggtttctgcagtttagagactaacacgacgaagatgaagaagaagtaatggagactaagattatgtatcaagtatcaaccttttttttgtctatttcactgtctttttactaacttttgttgtaataacctgaagagtaatgaaaacatgtatgtgaaagaaaacgaatgtaaccttattataagagaataaaagtgcttttgtatagtttagaatttcgttgtttagaatcagaattaaagtggataattcgttgaatataggagaaaaagaacaagtctttatgatcatcacaatcaaaagaaactactaagaaacaaactaaacaagattgaatttgaaacctacttaacatgtctctctctctctatttatctaaaaccaaagctaaatttaagagaaatagtaaaggagaagaagatgagagagtaagagagctcaatctactttatagagataaatctgatggagagatgtgtcaaaaggaacagagaagcaaacccggtcaaatcttgacccatgaaccatctgtttattgaggactgttgccaggccagagattctggtacatctgcataggaatttggtgaagcggttgaggtgtagagtttccaaatatcccatgattgttgctgttgttgttgttgcttctacggtgcaacggagaattactttcgttttcctctgatgactcgctcgagtgttgttgtccttgagatcgagggcttcccggtccaccaacaccaccaaagctcaacatattggctggtgctgaagctggctccggagtattctgagcacgccccgcactttgtttctgcttccttccatctggtacaaagcttcccacaatgacctatataaaaaccccaatcaaagtcagtatcttgaatactttctgatcttaactcaagtgtaaaggttaagaatttgacaaacctggacttgtgatccagctactagcattccatcaacacatccacccacaatccggccttcgtgtccagccagcgacacactcaagttaccagttttggtcacagtaccattactctcagaattcaagaaagaacctgacagagaaatgatttcaaatcggccctgaaacaacaacacatccaatacagctcaatacaagatttaaattccagctccattcgataacaacagagctcaaaatgaggccaagaagcaagcaatgcacaaagcacatgagtaattttatacctcatacttaacagttccagtaggattgctattgttagcttgacgaagcatcacattagttacagctcctgtagctgagagaatacagattgcgcgtggcccttggttcgtaaacgccaatatcttcgtagctatgtcctgaatacaatgaaagatcataactttaaccaaagaaacaaattgaagattaaagatttgctacatcaacacattacctctcctgttttaacctcaatgacatgaggcgtgaacccaactcctcctgttcctcctgctcacacacacacacagaggacaaaacccattaagtaaaattgtaaaacagtgaatttgatttgataagagaaagagagagagagatagagatagatcctgtacctaaagcatcgagctgcttcttaccggagccaggaggacgtcctctgttccgtttagcaggtggatcggaagagttagcattagctccggcgctatcaccaccaccacctccttcatttccaccaccgtaagaattagaagcagaaggaagaggcgaagtaggagccaaaccaagagcaatgttactaccaccaccaccaccaccaccaccatcagcagcatacttcctaggtctacctcgtttcttcttaacctgttgatggtcgatcccaaatctcatcgaatgttgttgagtggcggcaacagaagaaggcgatccatcaaatccaagagattcaagagtcttctgatctatctgttgctgaggctgaggatgatgatactgatgttgttgaggctgatgcggtgacatagaaccaccaaaaggtaatctttgatgcatagcttgagatgtggaggtgttgtgacccattaaaacagcggcggcggcgttagggtttcgattgtaggaattgtggtgactcattaacatccctggcggtggttgttgctgttgttgtagatgttgctgttgttgctgctgctgctgttgttgttgttgttgttgctgttgttggtggtggatctctctggaatccattggaggtggagaaaagtatgaatctttgtgaatttagggtaattttcttggagacccacttttctgttttacgaatgccgagaaaatagacgagaaagtgcaggtttttgagttttaagcgaaagcgtgtgagctagctaacaactctctctctctctctctctctctctctctctctctctctctctctctctctctctctctctctctctctctctctttcttgagttctttcatcagacgagggacgatctagttagtgtctaatttttttattttttttttgtgtttttgaagatttttaattatataaataaaagaagaaattgaggaaacaaatctttggtttatggttttcagttttcaggagattaagttttgtttttgttttctttaatattgatgaatttaacttttaaaatataatataattagggttttgttaaaatgtgaatgaaataaagagtttgtgtctttaataatgatgatgttcagtccagttatagtttctagttgtaatctaatgtaaatggtttggtgttctctcctttaacactagttctgttttaataaatggttttcaatttttttggggtttttcacataatttccattgttgcattgaatgaaccaagtttggttattggaagagaaatcaaaccggaatgagacattgaagtttaataaaatattaggaggttattttagttcagtgtctttttagaaaatctctaaaatgcaaacaaatgcacaagaattaataagagaataatatatcaaataaattattatgtaaactaaagattttggtttgactgtgtttgggaaatgcaaaaataataaagatggggtttgtactttgatgtgtcagattttttttcttaagtatatccttcagatcttaaaaacaatcactagtttgaaaatgacagcagcttattttgactattttgtccttctattgcctatctttttaagaaaaatctatcattcagaattcagaatactgttgtatatactctctatagattccaaattaattgacaaactcaagttactaatttttaatgctactatatcacatagataaagacccactggagttggaatagaatgtagcaaccaaatatttaatatatgcaactttagaatccaaaacaaaaatctgtgtaaaggaacaaaagtgtatattttaattggttatgtactcttctcccatacttgttcacgagaaaatggaatttaccgattagatttttttttgtatcccggtttaatccaaaggataaaatatgtgatgtgtatccggttttgttggagatgataatcaatgtaaaagactaaaagtactaaactttttatgtctaggtagcgactaaagtgattgactttagtagaccaacaagcaataaaaagcaaatgttatcaacagtttacgccatgcgcgtaccttaagaaactggacacgtaaaaccagatgctgtgaaaaattagtacctgaacatagaaatatttcgagacagataacgaatgtttttcttttaaagtactttagagtttatcatatgattcaagtcacctgaaagatccataatctctattatcacttggtgctgcaaggctgcaacacataagagtgttgcattgaaaaatgaaaacacttacggaaactaatgaacttggaagcaattgaccaaaagtataattattggtcaggtgggcttttattaatgggcttaactctcactaatgtagcccactagtgaaatgtaattgtggtaaataagaatttaccgctcgttaatggagaagaagaagggttagatttggaaagtagagaaatgagcaaaagcaagaagaagaagattctctctttgatccactttcctccattgtcgtcgcagagagagtggagatattcggattcagtttatgaagtagaacttgggtctaaaggattcagtttcataaaccctaataagtatctgttgtctgattaacttataggaaagatcatttttttttttgtttctcttagtgacggattggtctagaaactagtatgcaaattgtagcttctgggagagaaagtttgtatttttagtaacggatttattttgggagagtttgatttgtaaggattaggatgggttttttcaagaaattagctggtgtgtttggatttggccaggaagtattgaaaaatgaggaagatgatattgatgtttacggtgacggaggtaatcagcagagatttcgtgaaactggattaccaaggaaaggatttggagttccggttcaagttgctgtcgaaaggtctcaacttggtcctcttcttcagccttgcgccaatggagatggtggtattcaggtttgggattcctgtgctggaacggttgctatagtggttgattgctttatacggaagtgtggattctagttagttagattagcttaggaacatcatacattgggtttgagattgattagtaagttccattaaagattcctcattctttagttctactttagctgttagtaatcatggttcatgtgctacatagtcctcagcttgactctcttagcatagtgtacaaaattgatttcgatactctctgttcttgctttagcattattgaggttttgagttagatgttctcatgagtagtaacagttagatgcaataaagaaaatgagtagaagtaagttcaccaatatggcttaccttaactttctatgtagtagaagcgtaactataatcattgcctctaaactggtttcacattgtcttttctttgacattagacaacgactctgtatcacttctgtttatatttttactcctgtggttcctccagttagctgttactttatttctaatgttagactagtgaatttttcttagttaagagcttgcatatcttcttggatattggttctgtcacaagctgtattatagctctctcttgtgttgaaccagggactgagatggtacacaaaacggctaagggttgatgaagatggagatgttgcagatgagtttttggaagaaggagagaaatcgactaacgcagaagatgatcataactgtattaagactatgccaagattccaaattaaacgcaaaacgaagcctgtaaaagtaagaggactagttgtgtcttctgatgggaaactccagcaatgcattgaacatcaaggaaggttatttatagtatgaattgtttttgaacacagagaagattaggacaggtttttgttttatcagaaactccggattgaatgtgtaaagagggaagcaaaaagcaaatagagttgcagtcttgcagacatattagcgagaaatggcaatgatcagtttagctttgtttgtgtctgtgaactctatattttggcttatcgaatctgtacaaactgatttgattcatcaaatttgtttttgggttattagtgtttgatgtttggtgtagattatagtttttttgaaaaaacttgaataataatttggtgtagattttgcaaaaaagaaactccataggatttggtttttgttcaataattggtaaagatttgtaaaatctagatatcaacggcaataaagggtttatgtacttgaacagttggtaagtagacactagagcaaagaacagggagaaaatattggcgtgctttgcccaacgatggcctctatatcgagcgagatcacaaaggagccagcccaaaccaaacaaagagagcaaggtgagcaggtcgaatgtatcctccatatccatcttttgcggatgagcgaccaatggaacggtgatgtgattttgtcgaaaggtaggctttggagaatgggagaacaagcctagtacaaacgcgccaaaaatttcatggaccgtgcaaaaagaatctcgttccaagtagcatttgtttccattggaaccatttgaatgccgttgtgatgtacttttgagatgatccgtttcttcttcctttttaaaaaaaatgcattgagcatttgagcatcaaagacgattacttatagtataaatgatttggaacacaagagaggctatgaaaggtttttgtttcatcagcatttcaaaatattggtatcaaaccatataagaatacatgttgttgtgatacattatcgaagtactagactatgcaatgagacttggtttttcgtccttgagccaaaaataataatgactagctttataatttgacaatcacaattagttttgagatactctactggactttgtaatttgtattactacgatgatctttgtgtgtgtatacataataataatatgatcaacctttttggtttaaacatgaatccaagtttcttttttgatatctgtattggtaatattttcctgccacgtgtggaggtctcacaagagccacatggacaagacacgagaaatctgaaatctcaaaaactcaacaacacgagaacagctgttctgttgcttaggaagatctattacctctaaccacaacactacaaagagagtactagttaattagtttaatttactggatttttctaataatttctattgatattcgaatgtaaaactcgatgtaggactacaattgtccatatatgaagttgaaatacataatgtaaaatctgattatagaaaaacaaaaaattgtaggttaactatcagccacatagaagaaaaacaggatctttctttgaagttaaatttataaactaatctccccatttcaatgagctgtatatcaactcacaagtcgtaacccgtgccatcattaatattgttcacgtacattttccttttggcagaagattacggtttgagttatactatttcgtggaattacatattttaaaaaatctttctccaaaactatttattttctcttttgtttatttcgtactaaactatttcatatgatgcagaaacttaaactgatcttaccacgtaaacgtggcaagaattaatttacacaattaataacaaatatataatctatattatatttgacagtaattcgagatctttagcatttaatttagtgtttttagtttggtgttcgaagccatcaattgatttttatttacatggcggttacatatttagggggttaacgtggcttttaattcatagaatgtgattagaacacacaatttataaaaattagttgtccccgtgcaaaaaaaagaaggtatacatgtgttatgtgtcaacgttggtacgactttgaaggatctaaaaggtcaaactttagttgagagttgagacagtgataacttggttttgactttcttacatgcatcgccacaacaatacaatatttctacgaatgcataaaaaacaaattctatgctttaatttttttttttttttcttgaatgattgttaacgataaactgtaagaggataagttaaatctctttttattgttagtaaaaatagaaattcgtgtaaggacttcacatatttgatctctttttaattagcgtgacacaataactaattctcagttctcgatgtacctactaaattccttaatctaggaggacaacgtatatcggtatatgactaagatctagttcttggaactacatgtttaacaatattggtactaattgggggacacatgcatataattatacaaatttgtatatctaaggataaaaattggatctctaattttcaaactaaaagaattatggaacgtatgttagtttaatatccttttcaacagcttttgacttatttaattttttcatcttgtgaacaagagagaaaaaagtactctttaatttattattaacttcaataattgcaagtcatgtgaaacccatcaatctaatcttttctcacttgccaaaagagaatattatttctgtagctattaaaagtaattatgtaaatttatacctatcctattatagaggtaaaaaaatgtaacaccacgagaatttttatttaccagaaatgtagaatggaacctaaaataatgaacaattattaatgctataggatcgattaatcgtaagaaaaaaaaattagaaagaataacattaggcaaattttttaaaacgatcatcaaacgaaaccgtaaaatggtgaaaaaatattttacattttgtcataaaaatgacaaaacatcaaagtacacccttaaaaatccctattttgtaaagtcataggacacgtaattttttaaattactcgaacctacaagagattctcgtagttcaaccaacacaatcacacgtattaacttttttcctctagccagctacatacatagtctacgcatcgcctacgcaaaccatagatccatcactctatatatacagaaatatatacacacacacaaagagctatatatagagaatacacaacacattattctattcttgtatactctaattacacacaaaaaaaaaaggagagagagagagagagagagtaccaatttctctccctcaaaatgtccaataaggttcacgtagggagccttgagatggaggaaggtttgagcaagacgaagtggatggttctcgaaccttctgaaaagattaagaagattccgaaaaggctttggaatgtcggaaaagaagatccgaggagagtgatacatgcccttaaagtaggtctttccttgacactcgtttctttgctatatctcatggagcctctcttcaaaggcattggaagcaatgctatttgggcagtcatgactgtcgtcgtcgtcctcgagttctctgccggtaagttataaacattaaacaatttatctccttatatatacatacatattacaatcaactatagtaatgtaatatgtgttttaactttttgtttaacttcttgattctttaggtgcaacgttgtgcaaagggcttaatagaggattagggacactaattgcgggatctttggcatttttcattgagtttgtagctaatgattccggcaaagtccttcgagctatcttcattggcactgctgtttttatcattggtatgcaatattttttccaaaaaatacattttacccgtttagtgcgtttctttttattcacattggagtctctaaccgtaaaatctctaacttttagagacaaactctatataacaataagactactaatctatgttctcattcttatggttacaggagcggctgctacttatataagatttataccatacataaagaagaattacgattacggtgttgtgatatttctcttgacgttcaatcttataacggtgtcaagctatcgagtagatagtgtgataaacatagcacacgatagattctacactatagccgttggttgcggaatctgtcttttcatgagccttcttgtttttcctatttggtctggtgaagatctacacaagaccaccgttggtaaactccaaggcctctctcgctctatagaaggtatgtaattctcgaaaatatcatttttgttttgttaatacttaacaccaaacttataattccaaaaatattacttaatttatcttgttttaatattctataattgtgtttgtgtttatacgtatagcatgtgtggatgagtactttgaggagaaagagaaagaaaaaacagattcaaaagacagaatctacgaagggtatcaagctgttttggattctaaatctactgacgaaacacttgtaagtctttattatatatttctctaatatttcaggcattatacggaatatatatataattataagaaattcttcaggcattatatgcaaattgggaaccaagacacactctacgttgtcatagatttccatgtcaacaatatgttaaagttggagctgttcttcgtcaatttggttacactgttgttgctcttcacggttgcttacaaactgagattcaagtaaggttattgattacactataatgtcatgttttataatcaacttaaaatcattttctatatttgtttatcttttgtttttcaagactccaagatccgttcgcgcgctttttaaagatccttgtgtaagattagccggagaagtatgcaaagctttgacggaactcgcagatagcatctcaaaccaccgtcattgttcaccggagattctatccgatcatctccacgtggcacttcaagatcttaattccgctatcaagtctcagcctaaactcttccttggctctaacctccatcgtcacaataataaacaccaaaacggtagcatttccaataacaaacaccatcagcgcaacagtagtaacagtggaaaagatctaaacggcgacgtttctcttcaaaataccgaaaccggtacacgtaaaattacagaaaccggttcacgtcaaggccaaaacggagccgtttcactttcaagctttaggactgacacgtcagctttaatggagtaccggagatcgttcaagaacagtaactcagagatgtcggcggcgggagagaggaggatgttacggccacagctgagcaaaatcgcggtgatgacgagtctcgaattctcggaggcattaccgttcgcggcgtttgcgtcgttgctagtggaaatggtggcgaggctcgataatgtaatcgaagaagttgaggaattgggaaggatcgcaagttttaaggagtatgataacaagcgagatcagacggctgacgatgtccgatgcgaaaacccggcgaatgttacgatcagtgtcggtgccgcggaatgaagcaacgaacgacgacgataaattgagttttttagattagactaaaccgatcggtataaggggtcgatgatgcgattcgattcggtttggtatgattcggtttgtcctttttacgatgatgggaattaggaatcggatgctttttccttttcgtgtcttcgttttcagaatttactaataagaaaattatcgtttcttgaatagaaaaaactattatgtgtttcgttgtgtaatgaattgagatgtctggttaagacaaacaatacaaggagaaagatacagtcgtaatgtttaaggccggttatttctggtccggcaatttgaatttccggaatttaattgtaaagtgaaaaacagaaaaaaaagaaaaaacaaaaaaaggaagggcccaaccgggttcgaaccggtgacctattgatctgcagtcaattgctctatcactgagctatggacccaatttgatattgttcacattttgtaaatcatatagactatatatcaaaagtatttcgtagatcattttcaagaggaagaaatattcttataaattttaaaagaatgaaatgtagaaagctcatggaaaaaagaattttgtttgaaaggtctctaacaattgagaaatgcaagcttttgggattttcatacatctgtaaacaaattgctgcgtcacatagtttttgattttaatctctgcatatttatggaattttgtttacataaacttttgaaatgtcaaaatggtcccgaaactattgcttttatagacaaaatattggatttttaatgcaaatgattgttatgacttctacataagttgctttatataatataagtttggtccaattaatgattgagaagaacatgattgattctctttgcatatatcatatcaaaggtatcggaacattaaaataagactctataataacgtaaatcttcatacgaaaaaactttaaataaggaatttattatactcattccttatattagcaaacaatatatataaaactaaaataaaaaccaagagtaagataattaaattctcaaaagaaaatgatagacgttcacaactagttcttcttcttcttccaagttccaagacaccaacgttaaaaggcgtttttgtcctaagaacgaaccaacatttcttgtagctaaaaaaggtttgagtagtcaaatgaaccggtttggtcattttcataatttgtccaataaccggtttgcatcgactgatcaatgtcctggtccacattgaaataacaagagctcaccggaaattccacgtggtggtttgccgtggtgaccggaaaatggtagttgggaaagcactcagaagcaacctccttaatctgaggataatcctatatttaaaatcacaaaaccaaaaacacatatcagaccactactgtctatacaaaaactattttggtttagataatagatgtaggtacctttgacgaatcaaggatgaaatcaggagaaatccaaatgcttgaagagtcgtttgtagtagaagaaggcttgaacgattgaatctgcgacgcttcatcgcgacaaggagaggtcgcgaggctagagtaacaagaaccaatgtcttgttcgtttttatttttcaaacttttcgaatttttcttcagttcattcttcttaactacgcgacataacgcaaaagctccctaaaattcaaacatatatatggtttttaggcttcgttccattagttcataaaaatgaatattatgaagttggatcaaatgaaacgaactctaattttcttaccttgaaatttggtgatttttgtgaatgatcatcaatatcgcatagacgatattcatgcataaaccaattagttctgtcgcctaatggggcacgaccttcatagaaaactaaggtttttcggtatccagctataacatgcgatgatttacaagtgattttccggtctttaccagttgctttccaataacccgcttttgtagccctattggttcgagaaccgtttgcatattttttgtctcttggacagaaaaagaaccattccaaatctctatttggaaggaaagatttacctaaaattcaaagataaaatcaaacaaatttagttttatttaaatataaatttatggataaaaatctaattgttttccttttcaaattacctggcaactcccaaggatcaaatttgtataagtcgataacaggaatgacttcaagctcaatctcgagaccttctatttttctactcaagtagtagcctatgagctcttcatcagttggatgaaatctaaatcctggaggcaaacatgaactccccatttgcaaaattcacacttgtagcttgcgacacaagagagttgtcgaaagctaatatttaactaaatatctattgactatttggaaaatctaaaaatataaacttttttcgacattcaatttgtttttgaaaataagttgcaactcactttgattgcatcctttttgtgacaatatcattgtctgaaagagattgtatgtttacaaaaaaaaaaacgaattatccaaaattctctttttaaaaatatatctaacacctaagaaaaaaaatagaaacaaacttaaggtacaattcagaaataacgaagagcagttggtggaagagctaattgctgcgggtcaaagagtctgactgaggaaaagggttctctgacttattagctatacaagaccaaaaaaaaaaaaaagttattagtgagtattgattaggagagtgattaagatcggagagaagaagagaaggttggtagagtgttgaatggttgtggggtgaatgatatttatagcacaaaggttgcgaaactttgtgaggcaaatttaatcatagcttaaaatatgttgatgaatttttctgtagaataaacaaacagtattataatagtcagtgccgttaatattcagaagaaaaaataactcgacacaccgaaagcggataaagacattgcttgtcttaagagttcccaaaattcaaaaagaaagtggacctacctggtctctaaagttagacttgttcacacttcacacatcaatgattcaataatactatcacctataattaatcaaaacttatttttctattttttaatttcataagacgtcgtttcgttttgtaaaacgatatgtttataggtgtgttggcaaattagtcacttttgaaaacataattatggagttgggcaagttactatttacacttgacaaaacatgtaactcactttgggcgtgtaatagacgagcgtgaaatagaagtttggggtggggtaagtgatgtgttttgaaattaccgaactatccttttgacagagaagaaagataaaagtgaaatattctttttttttttatttctttttaataacccctccaatttaataattgaaatacttatcaatataaatttattttctaaactaattcatatacataaaaatctatgtatttttctttataatttgatatgcattttgttaatatttttaatatattacagacattttatcagtagtcggtacacttaattatgtgtacagactttattttgtacgttgcattagctgtacagagtatataattgtatggagtatacaattatcagtagtcacttttcactgttgattcgtacacttagacctgtacaatatttttagtgtatatatatatatataaatatacacaacgtacacttacatctgtacactaaaaaatgttgtacagatctaagtgtacgaatcaaacagttaaaagtgactactttgcaaattgtgaatagtaaaatgactatttttccaattatggctggacgatttcaatttgtacttattaaataagttgtataaataaaaatctgtacacataattaactgtactgactactaataaaaatgtttatataatatatttaaaattattaacaaaatgcatatcaaattatagagaaaaaatatagatttttatgtatctgaattaatttagaaaataaatttacattgataagcatttcaattattagattgaagaggttattaaaaaataaataaatatatatatatatatatatatatatatatatatatatatatatatatataaagaaatacaaagaatgtgagtatgaggagagagaaatgttgaatctaaaagcacaaatcccaattgctttcaacgacattggagaagaagaagattagtggcatatttgtaaataatagagttggtatggggtatatttgattttgtctgtaatagggtcaaaggttagtgactaaaaatccaattataaatagtaatttgcccaattccataattaagtttaaatatctgactactttacaacttaaccctatgtttatttgcatgtcattcttgtatatcggattagtaaaccttggttaaccaaaaagagagagatatattttacatttctctaatgttttttctagctcgtttctttgatataagtatgtaacgggagttttagttctaggtcatagaaactcggtcctagctaattcttttatttttcctttcgttcaatattctaaactttttcttgactattttgaagggggtgtaacaatgttcctccacgtcagtatgagtaagacaaaactgctttttattagagtaaccactttcaacttttaagacattagaagagataacaaaactttgaagaaaattttgtttattgtcttctttttaccggaaatatgttattgtttaagatgtaaagttgtagtttaaagtttagttcccatttgtgtaagacccgatagctgaaatattcaagaggaaaagaaaataaaaaaatattgggaaaacgaatgacttcacgagatggaaatgtataaggttaataagttctatataccaaaaagtgcaccttataattatacgatactttaggaacggtcaccatgacccctaacactgattaaagagagacaaaagaacaaaaatgaagaaaaaggcctaaagcgtgaataactacgtcatatggtaggaaaagaagaagttagcctatgaaatacgaataacggatcttctatgttgactatactgagccctaattttatatatcaaaaagtaccatatacgtttgaatattatgtcgttactaattaatgtccgggggtaaattcatatcagtagtcatatcggaactatttttgcaaattctaaatagattcaaccgatatcatggaccaaccaaatataccaaattaccaacccaccacactggtcatcgtgttctcgtttttgccgacatgtgatttttcctagtccgcgattccgacaaaaagtaaatattgctaaacttatcgatagacaatatatatacatattgaatggttttgtagattgtcatcaacttagttaaccgtatcaatagaaagacaatataaatcttcattttcttttggtgtgaaagagggagctagaatataattcttcattataatacagttacacataggttttatagttactttacaatcggaaaattctattcaaagttaatgtactactttgtgccagctatatcttctaaagaaagtgaaaaacaaaagtgaaaaggaatggtaagactcttatttatccgcatctcaaccagtgtaatagtttcttatatcactcacaaaaaaaagttcaaaattactagtttaatcatttttaatatttggtctgaggaaattatgggtttaggtccaaaattttcttagtcgcaaataaaacaaaattcagaattactaaaaaaagtttagaaaatgagaagatcccacaatttatcacttaatttgttaatcacactatatataactcaactttctccttcttgatttcttccccttttcgttttatttattgtctgattttgggtctaataatcaccaacgattagtctttagtaacatggatgctcagagttgatctaaatttataaatattcttgtctaggtttagattcaaacctcaaaactattagaacaaaaatgtgggttaaaggaagtgagtagcaaaatcataccaaacaatagtcaatttcatataagtcaatattgtcaaatactctattatatgattgatgtgtgcataaatcagttatcagattccccgaatcgagcccaaaacttcacccgctctttgatgtaatcttccattaacaaacgtcagggaaagttctcaactttgcacttttaaaggtttttagtcgattaaatttcgacaaggctatacgtcccttaaatacacatcatcattctatttatggacctgtattgggcctcaacagcccatatctttttataaagatctaaacaggttcataattagagtacatctcattcttcaactcaaaaacaattcttttttgtcccatgtaaaaaagaataaccacgctacattttctttttcacttgctagaggtttttcttttttacgttagacaaagaaattgttttgtaaatcaaaagaaaaagactcgcaacttccaactgttctgcgtgattttctatctccgatattccacatacactaaattaacccacaactttgaagtaaacacagacaccaaaccaagaactcttagtaaacatatttggaagagaggagatcaataaccataaagtacaacatgttacatagtcttataaattgtttccataaagtacaacatgaatgcatagtcttatgaattgttacaagcttcataattagagtagattattacaagcgtcataagtagagtagggtactaccttacagaagagtttttgcataccgagtatcgaactcgagtgtgagaagcccctgaatgtccatagttctttttatgatagcgatgcgatcacggggaggcttgtgaccattacccttaggagcccgtcccttattagggtagtacctgtaccgtatgtagaaaactgcatttctggccttgagtctctcatttggctgcttcacattttcctcagtttctacagctaccttcaaaataaccaattttgatagattgggctgcaacaagagttaaaaacagaacagtgttattattaccaagagagagccactacactaatggaggaaaaggaaagaaagaaagttcctacatttggaagacactgatttgcatggatgaatgcaagttccaagtatagacgaacccagtcctgttttcgcacctccgatttcttcatctgtaaaagcaaacaaatcacaattgaatttgagaaaaactgaaacaattgaacagtcatgaggaaaagcaaaagtgccaatcttaccacgtaatatattacgagaaactaaagggtctaaatggtgcaataatgagatggaccagtagaagcaatgcaccctaaactgttacactttacctggtggtggttgcgacttaagtcttgcaagatagaccgtgagggtattgattttagaatagtcttcgtgaacaaccttggtctgaaaagttacaagggaaccgccagcagatggatccttagcaaccaaagttatatagtaaccgatacatactgtggtaattcgtgaattgcatttctctatgcaactgagctgcaaattcgtcccctgaagataaatgtatcaacaaggatcatttgattgcaagaagaaaacaaattcatatatatatatatatatatatatttacaagatctggatgggagagtagtttttcacctgtaacatattgtatttatggatccccaacttggcgttaaggaagacttcagtgtcgaaatcagaattttgatagtcgagcaaacacgattttggtttgtcatccatcaaatgctcaacatcgaaccccttaaattaattacacaaaccgagtttataaatctactacaattccaccttttttttatttcatcaaccctaaaaaagataagaagatgaaagaattacctgagattccgccactcgagaccaaaactctctgcacttctcatcgtcttccatcgtcacgaattttctcaacttttctcggctgattaggttttcctctacgctataatatgtaacagggatttataatacttaagtttatgcaatttgatttcatttaatattctcccggtttactgccttgttaaccggttgagtaatttaggtttttttcaatttatagctacggccaaggaataaattatcaatttctaaaaaccctaaaatctcggtgtcaggattatagattcccaagcctcaacagcccatatctttgacgggtagaagttgagtgaagttttaaaattggaactgaaaatctggttaaggacatcacgattcaaacactgattcacattatcaaaatatgctgttttattcaagttggaagactcagaatgatgaataaacagacacgatttttcgccacttggcatgacgaggaattattattattctcttctcttagatcattccaactcaactttaaagtttcaaagctccgtgagcgtttaaagtttcttgtgtgtgaagcaaacttactttttttttttttttttttttttggtaaaagaagcaaacttacttggaatagaacctccatcttctgctccgaagacagtttaacggaaccactgatcttaaaaaattctacatcaacaaaaagactaaaagatttcatcaaaacagaggagtaatacttaaaaaactggaaaaatactctgtttttgaggacaaaatatagagagaaaaaaatagatttgttctcaaaagtgaatatttacgaaagaaaaaagattgtgtgaaacgactttttaacttaatatctgaaggttatcagtagaaagccaatcgtctctctaggtcttcgaacagcggtctagatgcatgcagtacataacgaataggaagaagaatcgaatgaacagtaatccttgtccttgaccgttcatcactcatttcagatgctgagaagaattgacaaaaactaggcaaacagagtgaaaatgaaactacaaaagttgcaaggacattacatgactctgtggattgtgtttgccactccaaagatctaaaggaatagttccataactgtgtatatcacactttcagaaatgactctacctgcaaaaggagagagaactctttagatttattaaaatcggaaataagcggaaagttattattagagatgttctgtatgcacttaaatcatgataaatcttttggttttcgacaatgcagtaatcaagtgcttgtacgataaaatctgcaactcgaacacgcatttccaaagactgttattaaaccatctggtaggtggtttaataaaatgtaataaaactatagtaagaaaattcatttaccttttaaagtttaagtttacaatcgactacagtgcaacgtaaattgagattgttcttctaaagtatcacaaaaccaattcgtttacgttattattttttgggcttcttaagaaagtagatactttttaaaaaataattttaaaaataagtagtttttttagaaatttgtgaaatacacacatttttagtttttgtaagatagagtttatgtgtaataaggtaaaaaacaaaaaaagatgtcaaataccactttattctttgttttatatgagaaagttttagtgtgagtctcaattttttaaagtatttaaatatttagactaacttctactatattatagttaactaattttttcatcattatctttttgattttttaaattaatattttttaaagaaaatattttattcttccaaaaacaagatgatttctatatattcaattatcaatctcgtacaccagcattaaacatagttttgtacacgatgaacactaaacaatcctattccagcataggtccaacaattatctaaccaaaaaggggaaaaaaactagttataaacacatttattagtcggtttactaattagaaaagatcaaactaaccatgagaactctgatctcgaacagagcctcatatctttgtcatgttctttgcaaacacctccttacttggtgtcttctgagtaacgacccgaagcatgtatttcaagttatgtttaagatcaatatgagagcaaatcctgccacacggttctgtgcctttgatctcctttttctcatattgcaattccgagtttcctcaatctcacgactgcttaatttccgagttctagcaagtttctgtcatgttaagaaaataagaaattctcctctagtagggaatcaaatccaagaatcgcctttcttcttaaataaacaatatatctcatcttattgactaaaacctttcctttctacaagattcactaaaatttgcaaactaaacatagattctttcaaatctatcacagagaacatcacaagactacaaggagattgaaagatttcgaaagcaaacctgagagagacttgaaatatcgggcaaaacagaagccttcttcaagaaatcggaactgatcaagagcttcctatgctctcccattggaatcgttgccttcttctcttccattctgataaatcccaacgaaaacgagtctcctttttcaatcgctaggttttttttgctctggcgctggaaaatgcttcatttttttatttaattttgagcataaaatcaaattaaaacaccatttttttattttattttttattcaattgatatttgtatattttctttctggactttaatgaccaaaatgctagtgttaaaaaaaaaatatagcaactaggattgagaaaagaatataaaaaactaactcgaaattaagatgatagattgacgaacaagaggtaaattcacgaacaagaggtaaattcaggttttctttttctcttgaataattcaggttttcttgggtcatttacaatattattttattttgtcatatgattttaaaaattagattaaagttttgtcaaaattgtttcaaaagttttctaaattacggagccacacaaaaatacaattggctacaatcacaaaataattttaaaatgtaattaatgtttgaaaatggaatttgtacttgcacttttttttgtaatttttataaaagcaaagaaagttatcttaaataccacatttttaagttttcttccaaaaatacaatctcttgtttttttcccaataacattataaattgaatattaaaatgaatctaattcttttttaaatggtgaaaatatatgcgctaaatttgaaatagaaaattcaaaaataacattttttttttgtaaatgtattgtatgcggaaactacagaatttgtaaacctatgcgatgcagattgttagtaagtgagctaagcctaatccgttagactcatttgcaaatcttatacattgttaattatattagaagctaaccataaggttaattgattaaaaatatggagcatatgtggacaaggaaccaatcaataatgcatacatgtatatttcatagattactcgcgaataaactgtacaaaaaaaataaaaaattactcggtacatttaaccaaaaggtaatatatgcgaggtcgatccacaagactcaataagacattaaagattttttagactcgtttttagttaaagcggaaaagttgtttgttaattttcatatttgtaaataataatataaataaatgattaaatttatgaaataaatatattgcgccacaactgttggttcaacaacatcctatacaagtcttttaagttgtttgatttactaatttccacttatttctaaatcttgaatagggttggagagttccgttggggggtcataacatagtcaaattcttttttaacatctctagtatcctcctttgcaacttcattattttcatctctagtatcctcatgtacagatatagaactcatggtagtggtgtgtagtggtgttcatcttttctttcacccttaaatatttccatggtattcaatataatatgtgagatatcttttaataaaaattcagaaatttttctcctctttaatgatcaaacgccttgcactgtaactatatgtcgctacgtccagcagttacctaaaagcaaaaacaaaaacaaaagtagttaacatacatttctgttattcaattaaacaaaaaggtaaaattatactatgtgatttttgatctcgaacaaggcctccttcgtcaacacctctgttgtggttcaagaggattgacttcccaaagcatgaatggcattcacttcttaattgttctacatattatcatgcaacatggttttgaacattgtatcatgcttttcacttttctacttacttcatactcatcatcaaactcaataatccacttcttatagctattaatctcatttggagtcatcggagaccgagaaaacactttcttattttcactaaacacaaaagtctgcatgattcattaaccacatgattttccgaataataagaaggaaaatgtcaaacaaacatcaacttaccaaaagtggtgaaacaaaacaccaactttgcttgtggtgaataaatttatcaatttcagttgatttttctaactaatcatcaacttttgttgactttgccaaataaaacatatcgtaaagtcaactaatatacacatttccaacatattgtagtaaatccgagttttggtttacgtctcatacctttatagaattttatgttgtattgatgttctaattgaagtaattgtatttctagatttaattgatttaagatgcaagtaatggattagatattttatatttacaattatagtaaacatatctctataggaattttgaactattgtagagaaaaaataacttattaccaatgcataaacaaatactctttttggcatcttttcgggtatcgaaacaaataattagtttttaaaaaataagtctgcaaatggttacatgcaaatgaatgattgaaaaatatgaattaaacaaaaataaagttggacattattcaactcattacaaatttcttttatagttaatttatttttctaactttttttttgaatgggttaaatgaatttttcaacttattcatctcagatggtacgaaatgagatgaatgattattcaactctttcaacttcttattttgagacaaaacatttgcaccatagtttgttcttcaatttaaaagattcacagcagaccaactcctttaatttagagtttgtttggtccattatttgcatgtcaaatggttttcagagttggatcaactaaatttatgtatagcacaaaaattttaatgataaatagtagatcataaagtgaattcaaataaattaaaaggctcgtattgacaagtaaaaaaaataaatttggttagattatagattaaccggaacaaaacaataacaaaatcaaaacccaaacgaatcccatgtataaaaaaaattacagaaattagcgtataaattattattcttttttataagacacttattagactcaaaaagaaggttcaggatgaacagcagaagcagctgcgttattaacgtgaagagctctttgaagtttccggtgatcgaacacttcaactccaacgttaaaaatcgaagtcaccggccggtgatcggacattcttatctccgatctcttataacattcttgtcttattccttttcctaaccataatatcctatcacacctattaataacaccaacaagataaacaatttaagaatcacccaaatgtttcgtaaatttaaaaataaccacataattttcaaatgttcaatttagtcacttaccaagcaggagctctcttcttctccggttctctcaagttttctccggcgtaacgatcagaatcgaattcgtatttataggttggagggaatttaatcggtccttctctccatccatcaaaaacatgccctcttcttaattctctaatcaactgtgtaattaaattgaaatcttgttttaataacttaacataatagtctaaatgtctaatagatgaaaataaacttaacaaagtactatcaaaactaaacataatcaagaaccgaacctgatcactgttcttgagctcatcccatcgtttttgtgagacaagctttcttacttcaccgtctgacatattaagtcggtagttcaaatctccgaaccaaaatacttgactgttgaaaatttccgacataaaaattcaattagtaaaagcaaaaaacgtttaatgctttacgttttgtaatcttgattattgcttactcgtgacatggaatcgtccttggttgatcagtgtcaagaaccgatgcaaaacgagtcctacgtatgatttcgtacacgtcagcattccggcgttgctcagcaccgtctttgtggccggaagttaagtgtgagcacacaaaacacatccgtgattgatacaacgtcatgctaatcgacactgatccctgcaagcatatcaaatatattaagaaagtgctaaaaaagttaaggttggggttacttggagaggaagatagggttaggtttttgttttaccttgtttcccatgtagcccatcaagccaactccgaccggtgagactttcaggttgttgacatgtcttcttaaccgtcgtcggatccaaaccgatacatagatcccaaccatttgcttacttactatccttacatacttttgactatctttcactttccgacactcctccaccaaatcttccggcaatccataactatttctgatcttgtcaccatcctcttcgtcctgggaagacgaatctccgtctgatgaatcatcatgcatgatttttgcagcttcttccgcttcggacgaggaggaggacctattatcaatctcttcttttatatcattccaactcaagtttaaagtttcaaagctccgtgagcgtttcaattgtcttgcttccgaagcaaatctactagctcctgatggattctccggtagcttaaatcctagcgtcgcgttgctgctaaataccctccttagcttcccctctgatccaactatctgagggttgctatctaaagctagttccggccagtccatgttcggattccgctgtggttcaaggctcggtaaagcggttgcagcatcgatgaactcgtttgtagctaaatccagcgagtggtccgcaactagattctctaccatgacatgagagataatggagtttgcttcttgtgccaagataggagacgacggcgcgctgtgagatctatgaagagcgttgttgttgcagcttggcgattgatcataaactgattctttattggatttgtttagtgttctacgaattatcgattcccatttcggaatcggacctctatcttctgctccgaaaacgtttccagcgtttaatggaaccacttcttgaaacctataacaagttttacatcaataaagatatataggttcatcaaaacagaggaaaatactctgtttttgagaagaagaaaaaaaagagtaaattttctttgaaaatagtaaaatttgaagtgactttttaacttacccgataatgtaaatatctgaaggattatcagtagagagccaatcttcaatctcgagatcatcggagggacgttttccggcgacgttccatgtagccaccgtcactctataaagtaattccaccataaataataaagtcagaagatatttcaccggtaaaaaaagagagatgaaacttccagaaacacccttacttgatatcctttgtgttaatgtattgagctctcaaagtctccgatttgcctcgccggtgtttcctttggtaaccacccctcacactcacaccaccatctaaaggattaaaaaaaaaaaaaaaatcagaaaatatattattattcttctgttattttatttgtgaaaaaccatattttttattcaaatgattaatgaatgtagagatttttttaaaaaattcaatataaaaattttccaaaaaaagaaataagaatcgttgcctgaaatattattgccgtgatcagcttcgctacctcgacgaccattatggctgtcttcatcagttacacagtgaacatttgggacgtctttgaccgaacatactgtaaaagggacccaacaaaacaattaagattaaaaaacacggaattatagaccaaatttgacctaaatttcaatacttaccatcgtcttcgctctcaggttctgtatcaatttcgtcttcgctaaaatcgtaaactttaggttttctgtttaaccatttattcatcacaattgatggccaaaacctctgttttacatcaaagacgagaaaacatcagaatctttgtaatcagagaattaaagaaacaagaataaaaaagagagagaatcttaatcttgtgtacctcaggacgtttcccacgtcttgttttcatcttcttagatctcagaaaaagattttgtttctttgggggagtttcgaggagaatttgaacagaagaaaatgtcagagtttgatatttataatagtgacagagagttaaagaagagacacgaactagagcaagaacaagaagaaaggacacaaagaaaaaaaaagtggagagtacaaacaagaagacgtgtgaaggcaaaggcaaaggcaaaagaaaaaaaaaggtgtaatgatgaaaattctctgatattattttttgggttcgtttcgaagaaaagctatggctgttatttaacagccttcgttgcccgtaaagaaccaaactgcaacttgcgatccactttttttattcataatttgattttttggggaagacatattaaagaaaactataaagactgtcagatttaattccctgatttcttctttctcacacgtgttttcggtttttggatatattcgaaccgacctggttttctcaattcggttttactagactgattgtaccgaccataccgaattattataaatgtttacttcatcttttaagatagtggcatttagttaaagtaaaccgaatcaaacagacagactgaaacttttttataaaagttaaccgaaattttaatttatctaaacattttttttttttgcgtatactagttaaactgaattagcaaaaaatggctcgttggaagtcaaaactatattttgacaagcagttttgcggagtaaaagtgattatttgagaattagttttgctgaaatactttgacctgacttaagttagtggtttgctttaaccaaaaatctaaaacacataaaccaaaaccaaccaaaatccgattcaacgctgctatctggataatatattaaataaacggcctttttggtatgttattaaaaaggtcaaaatgtcactctcctaggcaacaaatatatggattaattttttcaatacgagtctagctccagctaatattttcagccatacagtcggcgaatagatagattatttatttgactaatgtttcgttaaataatattatacgataactatgaattggaaccattagaaaacaacgaaaaagtgagaatccctcacatttaaaagtcttaaaattgtctatatcttttctttgttaactgttatgttttaacttaaaacatttctaaaactaaattatatttccaatttccaaaacaggtgaatttgaaggatactcaactgagaagatataaagtatggagtccaatatggtatggaaatacataactttgaatttctgacagcatatttgtaaaaaatatttaccaagaaatatctaattaataactgaagattatttcaactaaacataatcatcatcataaaataaattgacgcgttattaagaaaaaaggaaaaaaaaactgacgcccatgcaatgcaatttgcggatagaggacgtaacgaaggtcattaggaaagtttcggttgaccaaagctacttaaataaattagtttgattcacaaaatggcgacacgacgacgctggttgaccataaaatagttaatgggataaaaaaaaatacaaatactaaaagctcagtgggaagatttaaatatatttacttatcatcaactagagcgacgggataactaataagtatttggataaattaattcataatttaaccactgtttaaggtttacgttaaatttacttcttatcatattgctatttttgttactctaaagatcgtttgttcattgttgttaattaattatcatcaattgctaatttactatctataaggttatacatcaaatgatttttggaaagaacataaactttttttagttcgagtccatttgatattacaatgacaatctcaaaaaaaaagatgaaaggttgatttcagagttgcaaatattagactgtcactttaaaacttcattattattatatatataaaaaaaacaaataaaattatacaacaaagattaccactttccaaaatatcatgtcccttagatatttttagaaagagggtaacattatataaagttaaccttttaacaaaagaaacaaaattttattaaaacattcaaattaaaaactaacaaaatatatatcggtaggaaattgataatttatttatatttgatcaggtcggtcggtcgaaaatattcaaaatgtgggttttctatcgtgatctgtaacacattaataatatgaagtaattaatacatttaaatttaccaaatccaacacaaatattagatacgattggtaggccggtataaaggtacatatggaccacatacctgtacgcgcacccataaataaggagacaattattccctaattagcagtattatagaactaacttagaaatttattgagttagttctataatactgctaattagggaataattgtctccttaatacattattatagaactaacttagaaatttttgaaaaaaaaaaaaaaaattttttttattgaatactggttatttaaatttttgtaatagaatcatgccgtaagaaagttttatagtaacgttgtagacaaaataaaaagtttttgtaatagaatcataacgatgtcaatgtcatttgctttcttcaacctgccaatagcatatcaacacgcaatttgtgcgaataatcccactttgtaattttattgatttttaatatcatttttaaacagagcttttaatggactgaagtcataactactcacacaaatcattatccccaactaccaagctacaaatcagacaagtagtatacaaattatcacatagttcattgagaattttctacattataatatttctctaaagtattgattgaacaaactagtgtttataactaatcgattagtatgggagagtttaaagatctacgttcgattcatatgccaagagatttaatatcttttcatatgtttagaatttttttagtgatttgatatcttttcatatgtttagactttgtcacgcatattctgatatagactttgtttgatgtgaaattaggatactaatcaaaatttgattttatgtttgcaagattaaaattttcagttgctatcgatgaaattcctgaaaaaatattttcctgaactgaaatgagaataagagtatatattatctttcaaattcaatgttatgtcaaatggttgaaacaacaatgggttttgatgtgtggcaacatgtttgtgactcggtactaaaaattattccaaatcttcatataatttaattagagtgatgctcgagaggttgatccattactatccattgacacagcttgtcttcacaatacatatgagatatggattttgcttcgtggaaagcaaaaatcggtaatggaaaggtagaacaagaaatgtagacaaagaagaagaatagagtaaactttatgatgaaaaggaaacaaatacaactcttgggattggtaaaaaagatgtagaaatataggattagctctgaaatttaaagatggatgcggcaaatttataaaatataactaatttttctaaatatccaaatattgagggtacaaacagcacattatattgtcctcgaaattagatagtttaaacgaataggcctaaaagatttgatagacaataacggaagtatcgtggaagtcatcccacaacacttttgaaaaggagaactcatatgaatccacacaaggcatggggttggaattttggtcccctccgtagacaaaattgcaaataaaattcttctcttcttgatgtttatgataaatcaaagttaattttgtctacatatatatttttccactattcgtataagagagaaactctccgaatgagatagaatctctctccatccaagtacaatacaaatgctagtggattatttaaatttgtattgattcgcattaagacttgagaaaatagattgattataattgtgtaacttatcactaatatcatatgtaatcatttactacttttgataataataataataaaaataaaaataaaactagataataattttcttaccatttataaaaaacgttctagtaattttattttattttgctaaagaaaacgttctagttatttctaccggattaaatactaactaaactaaactatgttctcacttttcgggtatgtttggcaaattcagccagagcatacgattcttacccaaatttcagaggcatttatttacattaatgaataatgacattgttgaatctcgtgagagagagagagagacaaaaaaaataagaaaacaaaatgttcattagtgccgcaaaataacactcctacagtctacaccatcttatttcgtcccttttcttgattagaattaataaatattacatggtttaattttctatgatatctctgatttgctttttacattgtttatgttttctgaatttggtccatcgaaaagctagtagattcgtatgcataattcactagtaatatcacgagataagcacgtacatcataacgaccatacaacagtatggaactctcacgatgtgtgattttatgtggggggaaattgacatctaataatattgtagctcatattgtaattaactactatttcttgaaatattaagaaactaactttctcatagtggggcgaacctacaaaatctagtgacatacaaataatgactactccgtttgtcttcacacatatacttgaaattttatattctaagaaatggcttatatcaatgtaacacgtacctatactattatctagacaatggaaaccttatcctatatatattacacattaaaatatatggagctcttaacaagaatcgttcatagtttgatatgtaattacagttatgaagtagggtgatccatcgtcttaatatgcatgtttatgtttaactagcttatattttaattttcacaatataggatgtccaacatgatttgtttaaactttagactaaattttcatttgggattaactactactacacttgtttaatgatactatatatctaaatattcatattttttgttagaatttcacatatgaaataaaatatgatttaacatatgaacgcacctctacatttagcatttacaataactatcatatctctacaatatcttttgttttattttcttctgaaacaatcacaaacactttttttattatggatctactaccatcaatggaatgtgtaatcttcacatctaatatgtatttctgaataatctcattttttcaattattcaaccatttcattttaccaagttcaatgttaaccagattagtcaatatttatatatttcgatacaacaacaaaatgttatttgtaacatatataagagatatgaattgatcaccactaattatcaattgattttaatttgcaaactcattatattaattatcgggtcttgatcgggtagtcttgtcactggggtagctgtatttcctcagcctcagtctctaatccagcaataacactctggtttggtctcttccatgatcccactccaaactagtcttctgtgtctctttgcctacgtatgggttgtactaattagctctgtgctcttattcctatctgcttttattctcctccaagtataaactgctagctccaaattatgtatttgtaagagaacacaaaagataagaggaatactatatagtttcaccacccaaaaaaaaaatctcatatatagtatcataagtttataacctaattgatccaatgtatatatattttcggatataggttttgcggatgaataacgtaatttctaaattaatcaaaactcaataactttgatactttcattgaaaattaatacaatgaattgttgaaccaaaaaaaaattgatactatgaactatatatattaacgtaacacataagtaatatagccctaacacttaagtactggcggatctcaggtctactagagaaagatattacaagaaaaccacccaaatattacattacacatattattatactatatgtgcatgtgtaatgcaatatgtgtggtgtaacatatatgtatatgtgtgtgtaacatattaaaagtgagaattgcgtgtgtacggtgttgtaccaacgagtttgtaaatatatttggcccctcgtgagcccaagggagaacacttaacgatggatatgtttgagttaaaccttcaagttgaccccataatttttagaaaatcaaacttgaagagatctcaactttcattttcttttacagctcagtcctaatcattcaaattgtaaaagtatgtgaactaattacgtacgacccacacaatagcatataactatttagctctgggacgtagcaaaaacaaaaacgaaatatacatccttgtgaagtgattactcggccctacgtccatcttacaagttcacaattatgctttgttcttttgtttgaggaataaaatgtcaaaacattttaaacagcagaggattgctattcttggatttgttgtgtcttttatagattcaacttgttggttgcatggcttgcgtatttggacttatggttttaggcacagtggatctagggctgagttagctattatttaggaatagtaatttttatctcttttttcctgtggactttggtcgacgtatctaacacagtaacactccgatggtaaaacaaattatttagagtatgtttttttttccaattctgaattttcttctatcggtcataagtagggatcataacacaaaacgttttttttggaatatatggcgacattgaaaaagttattgattattgaatataacactctatttaaacaaaattgtaagaaaccagataaagtttattctatataagtattaacgtgtttatctctttttcataagaaaaaagcttaatgcgttacaataaaaatgatagagggttacatacttacgtatatagagaggtacggttgagaaagagtacatacacgttagtacgttacagaaagataaagaaacttatgtggaatatttgttatataaaacctctttttaagtcttgaatcgtaatcagccttaaagataaagaaaaagcgtcatttggggttcaaaatgtgactgatacaaagaataggtcggggttgaaaattgataaaaaccaaaatttggttgatgtcggttataattatagagtaccgttacagtacctacaaacacagctgtgagccactgatctgactcgtcactactcacatagcaaccggcgacgtttttgtccctaatcgcttatcttcttactaacaattttatacaaaagttgcaaaaaaagaaacaaaacaaaattgatttgtaataaaagtcattggtctttatctgttacagcaatgcaaacaatgtgatatcccaaatatgaaaaataaagtcgaatattcgctttttattacaagagttgaagtaaaatagtattacaaaaatattataaaaaggaataaaatgagggtgatgttgttgtttgcatacaaaattacaaattggaatgtgagaatgaatgtgagatctctctacatcagaaatcactatcttttgctccacactttggtgatttcagaaccatacgggtttgagagaattggagatcccaccatgcaagagagtggcattatcatcacatattcgtagtatggaccaaaaacttagtctagaaggaaattaaacaagggtttctagtattgcgtttttagctgtctaatagtattacatttgttttaaaaaaaatatgcttagagcatttgaagtgagtaaagcgttgtaaaatacaaatcaaacgttgattgctgagtatttgtaatgtttgaagcaattaatatgattcaaaatatatatagcatatacgccatgaacttgttatattcattgctaagtaagagtgttcatgttattttaaaacgcactttcttctattgtattcgtggctttcacaatgtctttgagtgaatgatgccgacgctcaaaaattttcttatcgaccgtttaaatgctttgaacgctcacgtgagaatattttttatacattgtaataaaaggcaaattacatataaaataagttaaaagtgacgccaaaaaaaggggaaaagaagtaaaagagaagcacaatagcacttagaaattgtggacaactgaaatatgtgtgtcacaatgttacacggctactttaacaaaaaaaaaacaatgttacacggctaaggagttgcagtctccaccattgagcttctttttcttggtccacaatgcacttcttttatcaattatgtgaaaatgtttagtgcatttgtagctaaccagacatatacagagaagtgtcgacaaaagaaaaaatacgattacgaattcgtgcattacacaccaaaaattatgtatgcattggtaaaaaaatgtcctagaaaaataatatgacttgtatgttttgaggggaatcttctgttccgaaaacttgtttaaatttattttggttgacaatttggttagagtaaaaacagcctattcagataaactgaatcatgtgatttggtataataagcatgttataagttcgtaaactctacaaaaatagttagtctctagttgagttccaccgaataaaataacgtgtctaataagactccaagttcacatgatcatatatatatatatatatatatatatatatatatatatatatatatatataaaattgcaagcgattttacaattatacatccacttggtttcagatattatatttgcaatatttgtttgttttctagctcgtaggatcttctgatttttctttttggtatacattttaccgaattttaataaatttccacttatattgtcatactcattactcttttctcttgatatcttctgaaaatgttatcccctggacattatgctgcgataaagtcatcaacgaggcccaattctgaacatcttctttttaggcccaatataaaacgtagtctctctatttgtctacttcgataattttgttagcactttcttgtgctttgtataacgcaatcagtatgtatcacataagttaaaaatagaaatccaaacacatctaagtaatgtaaaacattttatgtccgatgtgaataagtgtatatttgttcttggcaaaaaaagaaaagaaaagatgtatatttgttgttgttgttgttgtgtgtatcttggaatttatagaaaaaaagaacaaaatgtcatcacggaatctttgagttgtacctttttattattatcatcatcatatctcatatccacctaaaacagtgtcaactattaaattctcgacaacccacaaaagcgagtacgcacacacgtcagattccgacttgtcaaaatcccgtgtccgagatctacttacagccgcagagtccacttgtggtcctcagactaacatcgttgcctctatctccaccgtccgatcttctttaataataccaatagagacaaatgtttttatgacaacaaaaaattaaaaacaacaattaaaaaacaactctcaggatccgaatcagttcccgcttcggatcgtcagacacggacaagtacgccacgcatgacgtcatcatatctgcgggttctgtttcatcatggacacgtcagcggagacgatgagagccgttgattagacaagaagaagaagggacggctgagatgccttgacgcgttagctcagccaaaacgctctccgcggacggcggttttagcccgagcggtagcggcagccacggtttgcttatcgcttctttaaccacttgatctaacatttcctcgtcctgacccgacccatttacatcgcaacccgacccggcaaattttattttttattaattaattaggaatttttatgtcttaaaaagaaaatagagaattgttgacactaaccggctgactcgccggcattattttgaagccggtttcagctccgttgggatattgaaatccgccggcggtagtattctgcaacaaaaaaacaaaaatctctttaaaaattaaaaaataagatttttgtaatgattaaatttccataaatataaagtttaatattatagattgtgaaaatattcaccgaaggagtaatatatgatccggtcacaggcggtccaaccggacaaccccatgcattaccgctcacctgaaacatcatatatggacgatttagctatggatgttctatcataatgtcacaaaatatgtctatatagagaatgcattagctaaaatgtataggtatgagttcattttatcgtttaatttgtagatatgtaatgacattttcttgtacagataaatgtgatttattttattttagctagaatctttgacttataaaaagatgttaccgttggataaggtggtttccaatgccacggaggtggttgaccaatggactgcagcggcggtggccacaaaggtggaatcgctcctggcggataaacaccgggaagaccccaaacgggataagccatcacgggacggtgttgctgttgaaaaacgttataattacgttgatttggtctatggttctctctagattgtatccatctatggttatgatcatcctttggaagaatattcttcctatgctgccgaaatttctggtcaaaattttcaaaagttgtgtaacattttacaagaattcagaaatcttgcgaaacattcgacccttgggatctaattacctgaaggtgactagctacattgtgtcttgttaaggtgcctactttcatcaactcaagaatccgcgagggtatcgcttgatcaacgccgagttgctcaactgcttgcacaaacttcttgtgcagctctggtgtccaatccacctgtagaaaagaaagtagtaacaatgataacgagagcttgaatcttttagcactgaggagcgtcaagagaaacacaacgttaccttctttcgactagttttgttaccagacacgttcttgatcccggatgatttattaatcggtttagtctcatcttctttcttatgaatatcaactgaatctgtcttctcgcttatgagatctccggtttcaccttcttcttctttttcactgtctcctctctcttctttgacaaccactttgtcgtcatctaatttgcggtttgtagtgtcgactgatttagattcaccgatgtcttgatgatcttccatgttatctttctcggtcgaggaatttacattttccatcgagaaatttatgttctcttggcaatcaccgtctagtaaccgtgaatcttgtttcaattgcggtgttgatggcgctggatctttctcctcgattgtcatgtcggtctcaagatgaagcatcgagacaacggattctttcactggcttaagtgatatcgaaacattacttccaccatcattgaatgcctagcaacataaaaatgtaacaacaactttcttagattatgattatattaccgaggaattaaagacgcgaaaaaactaactaaaccttatgaacaacatgctgccaaatgttctttaatttctccggtgagagcggtttttgtaggaactcaactgcaccaagctgaaaaacacttatcaattctcatcatcacataaccaacattcttatacatctacgcaaatgcaagtcgcaatcacttaccgctatgcatttcattgtagtagtgatgcaatgatcggttgaaatcactgtaaagacataaaagaatccacattttaacaatcttttcgtattgtaaagatttgtgaaaaaataaaaagggtacttgtaaaaggttcacaaacttatagtaggaagaacgtctttggcagcctcaagaaacttgaaactctcactctcagcgctcatattcacctcgacgatggcaatgtggaagctctccgggttcttgacaaccgcagagagtgcttcagtttcatcggtgaatgtagtaactgcaagaaagttccaaaaaagcaaaaattgaatctataatcttaacattatgtgtttgatagtcaaaacacacagaaatccataaacagtttcgagataatttggatcctggttcataaatataaactaacaaaagtccaaaacataactgcacaagcttttactacttatgtacgtatcaactaaaagcgttgcattttacatattaatattatttttccccctatatatatacacaataatggtataattctattcataggctattgaccaatctatacctgtgtatgtctgtgtgtatttatgcaaatataatagaaggcgatacaatttagaattgtcacgggacatgtaagagctaaagcaactctaatattaaactagtatagtctcactcacataacttatgattaaatatttatgcataaccactgattaaataacctttaaagtaagaaacagaggaaaattagtggcttaccgatatagtccattgattcgagctctgatcgagtctcggcggctgaggagccatctccgtcgctgtcacagccgttgaggagaagaagaaccttaagtcctttaggaaaattttcccattttgataaatcgttagcggtaatgaccatagctggttttgcatcgtttttgcggccaacaccgccgcttttcgccgccgtcactgtcgccgccggtttgattctacggaaaaaaagtaaacactggctagattttattaataaaaaaaggggaaatgaatagaataaacaaaaaaattagacagaataaagatacaagaaaagtaaatattcaaaaggtgtgtgtattattgatgagataagaataattcatgaggaacttgattttgttatttataaagagtggaccaccatgccatgaaatctaacaaagcttttgaatcatttaagagtgaatatattattagtttagtgttgtttaactcgtgcatgcagtgattagttaacttaacaacacagactaatgacctttaacaaatactaaaacataggcttatgacaactaatgaaggagaaaggcaaatccctagaatttagggaaattgagagagagatatatacccagagagaaaaagaattgtgatcaaatcataagttgcactttcgataaaactgatgtttttttctttccataagcagaagaaggagaagatcttatatccagataagagatcatgctcacatcacatgcaatgaacatgtaattgatcaaaagaaaagctttggaaatttaaaaccaaacaaacaaactttcacaattcagaagtcaaatgagtaaattcatattttagagttctcaccttacctgagagagtgtttcttgcagatctgcttaaatccttcctcaagctctctttatctgtctcgccctctctctatcctgagtcacattcaaagttaaaaaaaaaaataaaaaaatttggggggtgactttgagagagagaaaatggatgaagagttataataagttggtgactagtgttgttcttgtcattgggttatgcacagagataaagagaataaaaagtcttactaagataaaggttaactgaggttagaggaaaaaagagataaggattaattattatttttgtctttattaatcaatatataggattaatttcctataacaatacaagaaaaaatctaaaccttaccaaaaaaaaaaatctaaatcccttaatatgtcattatatcaaaattagcctagttttattaaatgtagaccaataattttacaaaaatataacaaaatttattgtccggtatagaactatacccatttgtaccaatcaaaacggtgcgaagtaaaccgaactaacatgataagaaaactcttttaaaagcttttttattaactaatgaatatattctactaaatgaatggtaaatgaaaacataacaaactaaaacaagcaatattgtgaaaaaaaaaacaaaaaaaaaacaagcaatattcagctttcatttggttctaagtttcaacaatgtttctgcattttaaagaacaaataatctaataaccaaaaaattaatctgcactaaaaatctttaccataatcattatcacaagaaaataatggaaaactttatgccaaaatatagatcatatatgtatttttattgatggtacactatgtttgtggaaaataattatatatgcataaggtagggaaagaaaaactttattttgcagaggttccatctttcaaactcgttgcccaacttttatgatgacatgtgtgtgtggtttcaaagcaacagttgaatttaaccaaacttcttaatttaattaaaacctatttccttttactactatatatctagtattacttaggctaaactatattcagtgtgcacccaaaaaaaaaaaaccttacactaaactttaaaattcaaattgcgcaaaaatctagattagtgaatacagaattagtgtaaacacattattcttttctattgtcattaattgattgttagatataattaattacagatgaaacaaatagcattgattgtcctaaattcataatgaggtatattcaacaaccaaacgaaacttatatagcatttcttgtaacggcaaatggaaaactttagtttgaccatatccaattgtgattattattttaaaacagagtaaagttatgaattggtagtcattaatgtcattattcttactcaattttaatagtataaattttcttacaaaaagttcaccaatgtgattattttgaaaaaaggcaaaaacataatataatggaaaactttcgttagtagatggtcattttttactcattggaatgatcattgctttcgcttgttcgttcctccgtgaccatccttttattttattttccttttaacataattattcaaacttcatcgtattcttttgaggtcaaaattggagatgatcagatgtttgttctttgggggtgaaaataaaaagcttcattacttataaaaaccgtatgagcaaattatatgttatgtatgcaaggataaacatttttcttttacgatactaaagagatattcggtaaaaaattctccaataatacataatacacgtttttttttctcaagaaattgaacatcaaaattggagtaaaataatgacattaaagactcaagattggagtagaagtaaatctcaaaactagagatttcacatcaacaaataatgtttatgctttgtaaattacaagtttcctttttttgttttttttggtcatctaatagattatattggatacttggatgtgttgacgaaaggcaggttacaaatacttgaaaactaaatgaactgaataaacgaaacctacatgacccgactaaattagcccggaccttcaagaaacaaaagccaaacaaatcgaagaccaaaaccggacaaatcagataattaatagacacactaaaccgtcactcgcaaaatgagaataagttgacaaaaaaacattttcagacatcaaaagccaaacaaaacccgagagctaaaacacggagagaattaaaacttattatcaaataagtatttagtctatgactatgcgtatcttaactatgttgcatataccggcttttcaggaatagtttggagcaattatcatggtttggagttctatcagttctcatactcaatgagataggagcaatgcgaaaggttttacttgttcctctccacaagatgaataaggtaaatgtctgtcttcgttccttagctttaagttcagctttcttccgtttctcatttaccttagttgagctggtcactgtgaagaacttattcaacgttgtatttatgaagcttgtacgtaacggaccaatcgaggtaagttgtaacagcttatttaattgagccaaaataagaaagaaaacaaaaacatttatatatgagcctatgaaagtaacgtaagaaatactgaatagcccacagttttgcctcggatttcaaatggtggtctttgtaactcaaatctcaaatatgaacaaaatcttacaatcaagaaataaattatgttgttttgctttatgtttgttaggagttgttcgatacaacagtttaatatatttttatcaaaaaaaatgtttagtttagtttcagttcaaatctttttggtttttggttttagaataataatcaaaaataaaatcgaatatataccggtgttttcatacattttaaacacaatttggaaaagaaaacgatgagatatatatttatgtagtcttcatgttccacatgaaatagacaactaacatttgtcatatttatgtgttgtatatgtaatgtaattgaatgaagttctgactttttaggtgtcccaatgctattctcttttagttttagccacacaattttcaactcgtctttttatttctacttataaaaagataagtttttttatatatatctcagtggggaagaaactaatttgaaatctcttgcgttatattatgattaaaagagattaaaataattgcttttaatttctaaggttactatgatgaaattttttaaaagtagttactagtacttgttgaatcattcaaatcttattagtccgacacaagataaacttaagatcgtggtcgtgaaagagcttttttcatttcacgtgtcttgtaatctaaaagcgttcattgagataatttacgtgtttcagtgttactctatatttgtgatttggccgaataaaaaattaatcacggctcctctcttccgttgtgtaccattttcttttccctttgtataccatattgatttcaattttcaactatcaaaagtaattaggtatctactattttttatgtttgaatattattctcatttttgtgacctcctttttcaaggaatgggtgcttcagcattttataagcaagttaggattatcaaaactcgacggaatcttgttattcttgtaaggcaatgtatctcaaggtggttgacgatatgtcatcagttaactttccgccagttctagtggtttatcttcgccatggaactcattatctttaaaatgatttttttttgtttttttaatatctggaagttcaactccaaaagttctacattccgaggcggaattcacaccaagttaaattcatcttttttggagaagagatttcttctaacgtgccttgaacctactaccttcacccgagaaatttaccactaggtcaatagttcgttggttaggatgtttagacttctttatctattttctagtaataactttttctcttatggtttcgttatctggatgttgtagttcctaaaaatacatcaacctgtgtatcttttattatccatgtaagtttaatagtttccaatttgctttccttacggaagagtatgatcttgcctataatttaatgaaattgagctttggcgaaatatctcattttattgtgatcgagtgatttgatgactcatcttggagatgaggaattatgattcgagttattcaactatgattttgtttaaagttggtccttaatccttaactccttatagatgtttaaaacatcaatattcggcactccaaaaatgcgaaagattagtattttgcgaaattcctgttatcaaagaaaataaaaattcttaagcgagtgtattgatacgagtcggattatttaggttaaaaacaataagccacttttttttgtctgggaaggataagccaaacaaaatgtgtatatgcatccatctttgtacgaaaatgttataattcaaacgaaagtagtattgatgtaataattgaatgaaaaaaacagtttcctttatagagtcatcacttatacgaaagtagtcttagttgtattttttactatttttattggtccttttattccatctttgcccaaaaagaaaagaagaataatttttctctttttgtttgtagataaaggagccgatgtcacaacaacccatagttttttattcgaccggaacttaaaactgttggggataaattcattatgtttaatacttatgtgctataaagttagattgtgttttttttttattagagatagttatatcaatatgtgtaaaatgttatgataatgtaaatatgtaatctataaatgtatgatgagagtcatgagacaaaaggtgacccatgacaactatagctttcttccaaaacagtagtatccatttacgtacaatagcgacccacatatgaatcaatttccctacaataatgtcatcgaactgttattgatattttctactaattttatgttatttaaaactatctagaagtttccgtttatatcataaatttatttaaaataactgttattaaaaaatgtcaagatcgcatcatacataacaagcgtccaaggtttcaactatcttgcaaaaacacatggaactaattttttcttccttcaaaaaaataaaattaaaaactagggaacaaaaataaaacataaatgcacatattcgtcttgatcactactatatagttttacaacttttttttgacacctttctttaatggaaattctgattccttccttttttgataagaattttccagatgttgtaaaatagatctacacttcaagcttagtaacctgaaagaaagaaagaaaaaacaaactcaatcataagagtaacaaaggaaaaagaaggaatttgggtttaattgatcttaacaaaagttcgtagtcaaatctggtaaaaaatgtaaagtacagggactgtaactacaatacctgaggagttttttgtttttgttttattcttcttcactattagaagacgacggagaattgtttccatcgtcgccggctacccaatactgcttcgtggcgacaagaatcttctccggcacgagaggaccgtcttcatgatccattaacttagtatcccatctcattccatcaacgatcttcctcacatcattcaaaacatcaacctcatcccggaaaatcacaatcccttccggtcgtaaaatccgatcagtttcaagaagaatatcctcaagtttgcagctgccaacatgaaattgacccattacttaaacaaccctagtacagaattgaaaaattcatcactagttctcaaaaagtttgtagctttagggtttagatcaatggttggtaattctcagaaagttcatagctttaaggttaaaacaagtgtttactaattctcagaaagttcatagctttgggtttcacttcaacgttgctaagtctcagaaagtttgtagctttagggctaaataaagggttgctttgattctcagaaagtgtggagctttaaggttaagttagggtttataatcattacctgtgctgatacaagctgaagacaccactagcgtgaatgaaatcgtatgttcttggataagttgaaaagccttcacacctacagagatttgaacagtagagattgtatgattgttgccattgatggaaggaagataaagatttgtgtgtggatagatgttttaccagtcatgatagataccaatgagacctctctcataaacaacactcaatgtgttcttgttaatggttggaatcacattcataacccacgatttaggcgattcaagcgcagcagcgaatccaccaagaccggcgttcatatccatcacattacggtatctggtggaacctatcagtctgttaattctcttgtatccggtcactcgcttcttccatagattgatgtcttcttggtatgattcctcgtcgacgccattaatcaaacctttagagatacttggaggcactgcgaatagcctctcggggaacttctttagctttcctccagcaacttcttcttcgtttgatactttagggaatggtgttacacacgtttctatctccttgtaccagacatcgtcagtgtcctttcttttgcaggtgtcaaccggtgttgatctatcgcatgatctatcgtttattttctttctgaaaattgcaatgtctcccttctcatacttcttctcccagcataaggactctgcgattccctctattctcttttgctcggcatttagctctgctttagttcggttccacgtcttgtgccatgtcttccagttgattggaggacccgataagacccagtaacctccaggtctcaagactctatctacttccattaagtatgttccctctgtacaagcaatcaagaagcaaagacaccaatatgagtacaagcaagaaatggattttcgcctaatttgatagttaatatttaccgtttgcggtccatggtatcaagcatcgagagcattgagccatgtcaaaggctcttgcagggtaaggaagaaggattgatccaagaacagcgataatcgctggaacacctctctcaagcgcaaactggacttgtgcttcgtggttatcccttggcgcaaacgacatagtcaaaacattcctcttaagcatataagcaccccaactagcaacctagagatggtaaattagcatcaataagaatctaagaaatgaataagatatgttactagatcaaacagaaatcgacttaccccacatccagtgtccaatgcggttctaacagagccatctttgatagggataacagaagctagctcttcaatatacgcatcagcaccttgaggaaacatagttcctccaccagggaatttaaacacattcccttgaaactgaacccaattctgtccagctttttcgacagtcaagctcttgaaaggagcattagcatagtgaacataatctctgcttttaggccaagggaaaggagtcatataccctttaggagctggaacaagacaacgcagcttctcattatcaggaggacaatgtctctctctgtaaatcatgttctctctcgggaacttcatagctcggtcttgctcttgacaaggcgtgtaatccttgagcttcacatcacacggtttgaaagaaacaggtttgggatcagctttatgtgggatcttcactgtgttgtgatgaggttcaaaatcaagatcagtgacaatgtcagtacactgcgcttgctttgtaatctccatagctatgctatctcctttaccaaacccactcttttgccatgctccaagaagatagaagaaacaacataaaccaaccacaacgagtagagatagtgtacttctcgatctgttattccctggtgggttatgcttagaacccatgattctttctaatctcctgaaaccattcccaacaaatcacaaacttgattctcagtataacgacacaactttgagcttaaacatcaagatctgttaaaaaaggatctagctaattcaaactaatcaaaacctagcctttaacaattgaaatctagagtttatggattcaaaagactaatcctaacatagaaagattcaaagaccgtaactttagcactgaaatcgaaaacacagaatcggatctcgttgaaacagagctagaacacgaactaacagtagagaaaaatattgaacctggtcgatgtagatcttgttgaagcagagagactctaaaatttctcttatcagatctctctggtttaagctcttttcagtgatgagcttgcagtagccagaaagtataaagctt

SEQ ID NO: 591 - DNA, 58427 bp, Arabidopsis thaliana
tacttaaacaaccctagtacagaattgaaaaattcatcactagttctcaaaaagtttgtagctttagggtttagatcaatggttggtaattctcagaaagttcatagctttaaggttaaaacaagtgtttactaattctcagaaagttcatagctttgggtttcacttcaacgttgctaagtctcagaaagtttgtagctttagggctaaataaagggttgctttgattctcagaaagtgtggagctttaaggttaagttagggtttataatcattacctgtgctgatacaagctgaagacaccactagcgtgaatgaaatcgtatgttcttggataagttgaaaagccttcacacctacagagatttgaacagtagagattgtatgattgttgccattgatggaaggaagataaagatttgtgtgtggatagatgttttaccagtcatgatagataccaatgagacctctctcataaacaacactcaatgtgttcttgttaatggttggaatcacattcataacccacgatttaggcgattcaagcgcagcagcgaatccaccaagaccggcgttcatatccatcacattacggtatctggtggaacctatcagtctgttaattctcttgtatccggtcactcgcttcttccatagattgatgtcttcttggtatgattcctcgtcgacgccattaatcaaacctttagagatacttggaggcactgcgaatagcctctcggggaacttctttagctttcctccagcaacttcttcttcgtttgatactttagggaatggtgttacacacgtttctatctccttgtaccagacatcgtcagtgtcctttcttttgcaggtgtcaaccggtgttgatctatcgcatgatctatcgtttattttctttctgaaaattgcaatgtctcccttctcatacttcttctcccagcataaggactctgcgattccctctattctcttttgctcggcatttagctctgctttagttcggttccacgtcttgtgccatgtcttccagttgattggaggacccgataagacccagtaacctccaggtctcaagactctatctacttccattaagtatgttccctctgtacaagcaatcaagaagcaaagacaccaatatgagtacaagcaagaaatggattttcgcctaatttgatagttaatatttaccgtttgcggtccatggtatcaagcatcgagagcattgagccatgtcaaaggctcttgcagggtaaggaagaaggattgatccaagaacagcgataatcgctggaacacctctctcaagcgcaaactggacttgtgcttcgtggttatcccttggcgcaaacgacatagtcaaaacattcctcttaagcatataagcaccccaactagcaacctagagatggtaaattagcatcaataagaatctaagaaatgaataagatatgttactagatcaaacagaaatcgacttaccccacatccagtgtccaatgcggttctaacagagccatctttgatagggataacagaagctagctcttcaatatacgcatcagcaccttgaggaaacatagttcctccaccagggaatttaaacacattcccttgaaactgaacccaattctgtccagctttttcgacagtcaagctcttgaaaggagcattagcatagtgaacataatctctgcttttaggccaagggaaaggagtcatataccctttaggagctggaacaagacaacgcagcttctcattatcaggaggacaatgtctctctctgtaaatcatgttctctctcgggaacttcatagctcggtcttgctcttgacaaggcgtgtaatccttgagcttcacatcacacggtttgaaagaaacaggtttgggatcagctttatgtgggatcttcactgtgttgtgatgaggttcaaaatcaagatcagtgacaatgtcagtacactgcgcttgctttgtaatctccatagctatgctatctcctttaccaaacccactcttttgccatgctccaagaagatagaagaaacaacataaaccaaccacaacgagtagagatagtgtacttctcgatctgttattccctggtgggttatgcttagaacccatgattctttctaatctcctgaaaccattcccaacaaatcacaaacttgattctcagtataacgacacaactttgagcttaaacatcaagatctgttaaaaaaggatctagctaattcaaactaatcaaaacctagcctttaacaattgaaatctagagtttatggattcaaaagactaatcctaacatagaaagattcaaagaccgtaactttagcactgaaatcgaaaacacagaatcggatctcgttgaaacagagctagaacacgaactaacagtagagaaaaatattgaacctggtcgatgtagatcttgttgaagcagagagactctaaaatttctcttatcagatctctctggtttaagctcttttcagtgatgagcttgcagtagccagaaagtataaagctttgtgagtgtgacagagagagaactcacttaaaataatgtcttcttcttctttgtcttcactaattaagatttgatttttaacttgaagatgaaggcgcgtttgattttattcaatttctataaacaaaacatgttggaattaaatgtgtgtagtttcgcagcaagatcttcataacaatattattacaatactcaatagatttagatctaatctggactgcacatgcatccttatgtttatttttattcaacctcttttgtgtgcgtttatatatataaacctatactttattattttgcatatttgaagcttttgggtagttgattgtagctatttaaaatcaatttcagattatggtttagcataattggaaaaccttttgtttatatattaaaaaagatcaaatccatatgctataagattgcataataatagaaaggaaaattttatttgttgaaacgagtgatgtattattattagccgaagaatcttgtcgtcccaagtggtccttttcagacagttggacaatttacatactcgctacttagatctcctaccgacactcccatttcctctaaaccggtcaccgtcaaaaaccgagttaatcggttcacactgctaaataatcattccattaaaataaatgctgaggtggatctttaaaacctaaattaaaaggttaattataaaggatgtaaatgtgacaatgtaaaagtacttttctctaaaaccggttaaagtcaatcgctcatgagtgtacatgggctcttgtcaagtaaacatatacactattcaggcttttaaggcccgccttgggtagacagaagcactgtttgtctgtaaagcttgcgctcactccggtggttttatacaagggcaccaacgtaaatattatgaagaaccatactaatatattactaaatgaaatgttagagcttcgtgaacaatcaacactagcaaagacagactgtcaagtcatgtttagataaatagagatctctcacatacaaaactgtaattgaaacaatgcaaagatttgagaggtttcaagcggtgtaagcgttctttgcattcctgtcgagcttcttcgcatcctcctgaaaaaaaaagaaaccaaaccaaacaatgagagatctgaagaaaatgaagacttttgaattagaattatgagaagctttcttcttacatggatgatgaaacctatgctgttgttgtaatcgagaaactccttccattgttttccaatgctcacctgcaacatttgatgcagacgagaattaaagtcttatttttacacagagagactgtttgatgagttttgatgagaaaggtcttttctatttacctgagcagcttcgtttgaagcatttttagtccaaatagatatcctttcttgctttcctctaatgttgacaactgctccacatatttcatctccatgatcaaactgctctccaatcaatgcaagcaactaaaccaagcatgtaaaaagaaaaaccggtgagattcaattggatgatgacgcaggagttacgagtcaaaataaaagaagaatagaaaccgtacagtgtagagccagctcttatcagacttctccttagggaaagtcatagtccattttcctccattagcacaaataggatcctcccacttaggttcaatgatgtgtttgaaacagtagaagtcagctccgtgagctaacttgctcggatgcttcatgttgttgtacaaactgcaaaccaaaatgtcttttaaaataagaagtcgaaagaacaatacacaaacctatgaatctcattgggaagagcaagaactatacaacatcaaccctcagtcatcacgaaagtgtttgctcaaattctgatacctagaaaaccactaagaaagatttcaaagttggtctctttctctcacaaactttgctcttctactttacttcacaaacaagtgaacagaatatcaaagctaaaccctaacataagctttagctacgaattcaaacaccaaacatagcaattcatcaaaaacatataatgacttcaatgggatcttctaatcccccaataaagaacataactttcctcaacaaatcgaaacctataacaaaacccagatgcagaataattgaacaaaccagatattgagtcggaaataaaataaaatcaaaaacctaacctccaaaattcctcaacagttgaaaacgtaaacacgggtcgcaaggaacttccccaagaggtttgtttcgatttcacagcaggattatcgaaccagaaagtccatgaatgttccagaggatgcgattcaggaacaccggatttgctcgattcgtcaacgtttccgtctccttctcctccggcgatctctccttcttcggcatcatcaccttcctcatggtatcgatcaatcggattctctattgaattaggcttagcttcttccgttacaacagatttgggagtgtcttctaccgccattgtttctccgaactgcttctctttctctctatctctctgtctattactcttctccaaactaatgtacttcctctcgtagggttaactatgatacgacgtcgttttaattacatacttcttgtcttttttctttttgggccgaagagataacttaacaactattatgggctttaacttgtctccggctctttttgctcttaaaggtttttctaatggtcgtgttagtttgaagtacatgtactaaattatgtttgttttgtagtcttcaaaaaaatcaaataattttagtgattaacgttaattcaaaatatgaaacgtgaaaatgtttatagactgaatttttagtcattagttgatgaaatcagtcaccaaaactggttgccaaattcgattattgaattactaaccacataaacaaacaacaaactttagaattggttgttttcgttagtttggtcgttgatcgctagcagctacaaaaaagttaagaaaacatgttgttattgtcagaactgtaaaaccaacatgatcaggtttttatatgctttcacaaaagcatataatatgattattaagaaaatgtgaagtattttgtagactgtccaaagtttgagagatttatatcttatggaagtgttaatagcttttgactatataagtgagtttgtcttacctctctaattctaaaggttgtgatcagcccgccgccccataatagtatttcttttaagatattaaattgtttatgtacctagtttgggttaattaatatatataatatgttagaccaacaagacaactggattatattctaaatctaaacaatatacaattgtgtttaagttccgtgcatgtaaatttaaaagtttaaatcagtggatataccacgtacagaaacaaaacgaaatttcttatattcattccattggttttatcggtcaaacgaaagaaaggagaaaataaaaagatttcataatgtttcgcagtcgaatgtattctattacttcatagttgatagagacgtataactaagtgaagctggttctattccattaactgtcagaatttgtttattgtgcatcactactcactagtaacttagtaagtagtaactaattgtgcagaatatactcaaaaaagttattctcgacaccaggagagactataaatatagagtttggtttttgtttacatttctatgctatatattctttagattttataagaaataagattatttgattcgctgcaaaaacataattgcatggcttgtctatatgccgtcaaaccaagaatctcgaatgttagttatacacgtttcaaatatatatttgatatgagttattcgagaatatatttataatgatagtacatacgtaattcgaaaagaataagtttaagtttgctttagttgtcaaccattctttataccaaaaataaataaattgtcaaccattctttataccaaaaataaataaattgtcaaccattcttaatctaacttctcagtgcgtgtgatttttttttaagcagatgtaagaaagaaaaaggttgtcgacgttaatcatggctcatgcaatgaatcaaataaacttattttatatttatcaacatattttatatacgggagatttttcaaatctatcgacttttttgtttagcaacgagcgcttaatgatggtcgatagatcaaagtttgtcgctagttgacgttttcttttgtagtaaagaactgatcaacagtttttttttttctttttttttttgtaaagtttagaagtgactgcctgactggtattgacgacacaagtgataattgataaatgatgagtttggatcgtatgaattgacttgtatggtaatattgcataacgcgtcatcgtttctcccattattctataaagattagaatcaaaatctctttttaatttcttttcaacttttaaaaaattaacattaatatttacttttgaaaagaaagtaaacttacaaaacatgtccaaagaacagagaaaatttgaatccataattgatgtacattctttttatgaaaagatatgtaagacttacatagagtatatataatttaaattgtaaaaagaaatttaaaggaaatggaaaacaaggttaatgcatactttgcttcatctttttttattaatcacttttatcaaaaatatataaattaatcactatattctttgggttttcttttccttgacactgtcatgaacatttatgcgctatacatgtaatcatttcacatcaaattgtcactgattaagttcactcgaatataattgtcactgattacgtaatcattggtgaatgatgatgcccaaggaagcaaacttgtctcttatctggtgtttatatttgtttgaagttatctcataacaacaactcgatgccagaaaattttatgccacaacaacaactaaaattatagcttgaatctatcaatgggcggtgaactatccgtatggcccgtgctggggagatatatacctaagtaagtgttgtttgattataagaattatttctctttgatatatatcgtacaccacatgatttatattactcatttcctttcattatgcacatcttatacaattttcacacattaaaaactataaattcatcttataattaacatttatgatatgcaatttcattttatttcattaactaagaaagcaaaaattaaacagaaaagtttggaacttaatttttaaaatatacattgaaaaatattttttgttaaagtatataacaacatttattatgaaaaatggagtaatacttagagaacacttataagttatcaactatacacatatataccatcttttccaaaagcaagttttcacacaaatttgcggatataaagatgtttgattctccactaaggattatccttaatccatatgactaaattatttttaatatgattcttgttaactctaaaccaatcaattaatatgccgacaaaaaaaaagaccaatcaatattatattatacgtgtactttttaggcttttagcttcccatcttaataacaaaagtagaacatttacaccaaaaacaaaacaaaactagaacataataagtgaatacaaaattaagcaaataaagagtgtaacagttatattattatttagtttgctatctgaacaaaacatttaattagtcacatatctttggtggagccgaacggaataaactatggtcaaagtttggggggaattcggaatttccgaatcgataaatattattggaatatatattggaaaggtcgcttgaagactacattatgttcttatattattacatgcttttctacattaaaatgtatctagtattttgttccggctaatctcctaaagtaaaatatactttttgttttggtcaatttacttaatgcctaattgatcagaatttattattccggcggtttgtatttcattgatgtgttacgtgtactagttaatactgattttctcttattttatccattcaaatatgagatgatatatattgttaaaaaaacaataactaacgtttaatttcttaaaagctctaacaacatcataagtcataacgcaaacgtcaaagagaataattaaaaatagttatcaactatctaactctatattaaggaagagagacgatcacgaaaagtaagtaagtgacttgtatatatataagtgagatctaaaaaatccataacggtatttggaatttcaccagttttgttctcctctctcttcgttgcctcacttctgtatctccctcttttggtccttctagaaactctcttaagattctcataattttacagtctggattttattttgttaccaatttgttttttttcaagaacgcgtatcaaattttgatatctcttgctacgcaataaccttcccttatatataaagccttctctatttttatttccatctccttccttatagatcccgtgaaagtttttatattacctaacttttttttccctaggataactatgaaaaaagaggaggaaagaaaagaaagaatggaggagaaatcttcgaagaagaatgatggtggaaatcagaaagtgtcgtttttcaaactcttttcgttcgccgacaaaaccgacgtagttttgatgaccgtcgggactattgccgccgcgggtaacggccttactcagccgttcatgactctaatctttggccagctcattaacgcctttggcaccaccgatccagatcatatggttagagaagtgtggaaggttagggtttttttcttttaattttgattatttattaattaatttgggtttgattagattatcgagccgggtcaagattttctcgatcaagaaataaaacatccttgattttaggattagggtgaataataatcttgatttgagttattacttattccatttgagttatttcggcttattaatctacaattttgattataaaaaaaaattatgatgtaacttaaatagtaaacacccttaaatttctgctttaaaaaatcacattgattgatctaattacactttatttctttagatgagttacatgaaattttcatgataaatacattaatggagtttactgttttctttgtcttgaagatatagacaaagatactgtttattttagcctttactttaaagttaaagattgaaagcaactttagttttcattttttggaatttggcgtggaaaataatcgaatgatttagtaactaattcatcaaacttatgacttttacaggttgctgtaaagtttatataccttgcagtatactcttgtgtcgtcgcattcctccgtaagcttactactctctgtttattttgccctaacttgtattccaatttaacaatttcttttgcaaattctttaacagaggtatcatgctggatggtaacgggagaacgtcaatccgccacaattcgtggtctataccttaaaacgatattaagacaagatattggctatttcgatactgagacaaacaccggagaggttatcggaagaatgtctggagacacaattttgattcaagacgccatgggagaaaaggttttttgaactaaatttaatcacaaacaaattatttcttgcggcgcaagatactgaagaaaaactgttgattttgatgcacaggttggcaaattcacacaactactatgtactttccttggaggattcgcgattgcgttttataaaggcccgcttttagctggtgttctttgcagttgtatccctctgattgtgatcgcaggtgcagccatgtctctgatcatgtctaaaatggctggtcgtggtcaagtcgcttacgcagaggctggaaacgtagttgaacaaaccgttggagccattagaacagtgagttttctcttcttttctttttctcctttccaaaaattaatcgcgatttttttggctctcttaggtagtagcgtttacgggagagaaacaagcaacggaaaaatacgaaagcaagctcgagatcgcttacaagacagtggttcaacagggtttgatctctggtttcggccttggtacaatgttagccgtgatcttttgcagctacggtttagcggtttggtatggtgcaaagctgataatggagaaaggttacaatggcggacaagtcatcaatgtgatttttgcagtcttgaccggaggaatgtgagttaaaaatcctaatccctcaaattgactcatcgcttacgatcataagtgttgatcaagatacattgtcttgtcaggtcgttagggcaaacatcgccaagtttgaatgctttcgctgctggaagagctgccgctttcaaaatgttcgaaacgatcaagaggagtccaaagattgatgcttacgatatgagcggttctgttcttgaggatattagaggagacattgagcttaaagatgtttactttaggtatccggctaggcctgatgttcaaatctttgctggattctcactctttgtaccaaatggcaagacggtggctttggtgggacagagcggaagcggaaaatcgacggttatcagtctaatcgaaaggttctatgatccggagtcaggacaagtattgatagacaacattgatttgaagaaacttcagctcaaatggataagaagcaaaatcggtttggttagccaagaacctgtcttgtttgcgaccacgataaaggagaacattgcttatgggaaagaagacgcgactgatcaagagattcgaactgcgattgagctcgctaatgcggctaaattcattgataaactcccacaggtaccttcaaatttcaatacagaaactactattagaagaatttgtattcgttgcattttcttttaaaatgaaattatctgtttgtagggtttggatacaatggtaggagagcacgggacacaaatgtctggcgggcagaaacagagactagcaatcgctagggcgattttgaaaaaccctaaaatattgcttttagatgaagcaacaagcgccttagacgcagaatccgaacggattgttcaagatgcgctcgtgaacttaatgtcaaaccggactaccgttgtggtcgctcaccggttgaccacaataagaactgcagacgtaatcgctgttgtccaccaaggaaaaattgtcgagaaaggtataaagttaccgtgtgctcaaagttacatatttcgagaacgatattatgaactataagtctataactgtataagcaatcaattgtaaatattctacaggaactcacgatgagatgattcaagatcccgagggagcttattcacagcttgttcgtcttcaagaaggatcaaaagaagaagctaccgaatcagagagacctgaaacaagcttagacgtcgagaggtcaggaagtcttaggctatcatctgcgatgagaagatccgttagccggaattcatcgagcagccgccattctttctctctcgcttccaatatgttctttccgggagttaacgtcaaccaaaccgacgagatggaagacgaggaaaacaacgtgaggcacaagaaagtgtcattaaaacgacttgctcaccttaacaaaccggaaattccggttttggtactcggttcaattgctgcaatggttcatggaacggtgtttcccatcttcggtttattgctttccagctcaatcaatatgttctatgaaccagcaaagatactgaagaaagattcacatttttgggcgctgatttatatcgctctcggtttaaccaatttcgtcatgatcccggtcccaaactatttctttggaatcgctggagggaaattgattaaacgcatccgatcaatgtgttttgataaagtggttcatcaagaaatcagttggttcgatgacacagccaattccaggtactataactttatatatataattaaccgccgtattttgtatgttttgattctaatatttatttgcgttttgttacccccggtgcgattggagcgagaatgttccacggatgcttcaacagtgaggagtttggtaggagatgcattggcgttaatagtacaaaacatagctactgtaaccactgggttgataatagcgtttacagcgaattggatcctagctctcatagttcttgctctctcaccatttattgtcatccaaggatatgctcaaaccaagttcttgactggtttcagcgctgatgctaaggttttaatatagtggttacaacatttttttgaatatatcccggtttagtcgcgatttcgggtttactgatcgattttttttctggtttaggcgatgtatgaagaagcgagtcaagtggcgaatgatgcagtgagcagcataagaacggttgcatctttctgtgcagaggagaaagtgatggatttataccaacaaaaatgcgatggaccgaagaagaacggtgtccggttaggtcttttgagcggtgctggtttcggtttctcattctttttcctctattgcatcaattgtgtatgtttcgtcagtggtgccgggttgattcaaattggtaaagccacatttggtgaagtcttcaaggtaagatgagaaacatttctcggtttaattaagatctggttcggtttagtgatcttgagagtgtattttttacaggttttctttgcattgacgattatggcgattggagtttctcaaacgagtgctatggcacctgattcaaacaaagctaaagactctgcagcttcgattttcgatattctcgatagtacaccgaagattgattctagctctgatgaaggtacaacgttacaaaacgttaatggtgatatcgaattccgacatgttagtttccgatacccaatgcgaccggacgttcagattttcagagatttgtgcttgactatcccttctggaaaggtaaaaaacagagctttttaattaccggttaaatctggttcaccggttaatattggttattggttgttttttcagaccgttgcacttgttggagagagcgggagcgggaaatcaacggtgataagcatgattgagaggttttataatccagattcaggcaagattttgatcgatcaggtggagattcagacatttaaattgagttggttaaggcaacagatgggtttggttagtcaagaaccgattttgttcaacgagacgatcagatcaaacatagcttatggtaaaaccggtggagccacagaggaagagattatagcagcagcaaaagccgcaaacgcacataacttcatcagctcattgcctcagggttacgatacgtcggttggagaacgcggtgttcagctatcgggcggtcagaaacagaggattgcgattgcgcgcgcgattttgaaagatcctaagattttgttgcttgatgaagcgacgagtgcattggacgcagaatctgagcgtgttgttcaggatgcacttgatcgagtthatggttaatcgaaccactgtagttgtggctcatcggcttacgacgattaagaacgcagacgtgatcgcggttgtgaaaaacggagttattgctgagaaaggaaggcatgagacactggatgaagatttcaggtggtgcttatgcttctcttgtcactctgcacatgagtgcaaattaagagactttttgtttttggttggaatgaaagagagaatttttggaattgattcgttaatttgtccattggaactcataaatttgagacaaacagatccttttacttcgagctttaaaagcctcgtaccacactaattgaattctttgggtttgctttctaacaaagtgcgttccaaatgttagaaacgtttcatttgttccttttcttgttatcttcattaagaacactcttcaataagaagaatcaataaaacattttttggaggtaaactctattttggatcaacaaatatgaacaagagtagtagtttgttggggacaggacataactgaaacaaagttttcagacacaaatgtaagaaaaaatgaaatctttgaagaagagactcagtaaacttcagcagcaaagttggtagtgggaagtctctgtcgcttctcaatgtaagccataggaaaccaaccagctttgcctttgcattctccttcagcccaaccggtttggctcacctgagaatacgaaagaaaaacagcacacagagagttaagtttcatgctctctcactacagaagttagttctttgatactagtaagaagatgtgaacctttcggacaacgatgtaatctcctttgtccaagtctaactctttctctgaagcagcggaaaatggatgaatcacctgcgagagaacatatatgttgcttatggagagtctttttctttctgtgagatatgcgaggataatattacggaagataaaacttacttcagcaagaaagtatgacgttttctctgagccgttctctgttggaatcgcaggaggagcagattctttgtgttgtttctcggttaccatctacgcggtaagaccaaaagtgtgagcctttgatgagaaaaagatgtgggaaagattcatccaatactaacgtcggcttcaatgtcactgaggatggctgctattcttaagtgataattcttctccccttcaacctagaataagcgataaggtaaatagtaatctgcatatgacaaaaaaatccagtgtgtgtgtatgtaaaacataccatagccacaagcctctggaaagtgagtctatgttgctgtgattcaacagcggctaatgcagcagttgcttctttaccaaggactgccatatttgcttttagctcttgcatttttgcttccgctagttgaagctttgctacgttttctggaatcggagcttctcttacacgtgcttgccgtctagagacttccgttgcctgttttgcttttaagttttaacttacattacaaaataaaatagccagcatcctcatataactaagatcttaagatgattacatgtgtctctgcttcctgtctcatgcggctgtaacgttgagcaagatgacgagcatcttcaagaggagaaccggcaaccatagctcttagaggatccaaaaccttaacggcatttaacaaaaaggttttctcttgttatctactagatttaattctacgtaaacatactaagattaaacacagataatccaagccgaacctgagaagccaaaagcttgttgaagtcttcttgttctttgtctacatgtttccgtgcatcaccgtatatagctgcagccttggccagtatattctcatcaatgttctgactattttcgttcccatacctacaacagtcttcagacaacttggttcctgaaattttaaagaatattaaaagaaaactcacaaaagtatcatagtataacttaattcaatgataggtaacacaaaacagacactcataagtagttaagtacctgcttcaatgtgtctgagcccgatcgtggtaaatgcctcagctgctttaacaatatctctctggaactcctgaaagtgacaataacatatgtttgagggtattgtgctacgatgaatcatactgataccttctcccccaacaatgaactcatataaaatgtgacaatgccattaggtcaatatcagtcaaacctttgcagaacgagtagagcggtaaagtttatcgagttgatgatgcctttgcatttcaagctcatcaatcaccattacatctgagctttcataaccagtcccactgaattgctttatcacagcctacattccccattaccacacatcaatcaacacatcatcacaaccaagattgtgtaactctataatactcaataatatacaaatcaaaacccatcaaaaagtttccattttttttaatccaaattagcaacaaagaacctaaattgagcttcgtttcgctgaatcggtaacagtgaaactagttgcggcgatgaaaaggaattaccagttgctgctttgcgacttggtctctaagcttactcgcttgtcttctaaacgcatccattgtcacttctcctcttgatttccccaaattgattcagagataccaaaaagagacaagctttaaaggattttgagtggaattgagaaatctcaattagatcagaacagtttaaaaactgacaaagcagatcagatctgattcagtagaaatgtatgttcttcttcgactcgatgtgtcactgattatccctctgagaaaatcagtcaatcacagagcacacacatcgatctaagcgggtcgggtcgattcgattgattgaaccaaaccggtccggtccggtctgattaaaaggagcgttcgcgattgaattatttggaagcagacgaggcttttctactaaaaaccttacgttacgacttacgattattattgagtaattaattaaaattagctaaatccgtttggcataaactgagattaagttaattaaaacttaaaagtataggtattaacaaaaaaactgacatggacaactcataaccacttgttatttgtccccactcctcccatatcattttgtcctaactgccattacataattataatctgaaaagacaacctatatactttttcttttattttattattaacgttgcctttctcagtatagtatagattcctactctaccgacttaaaatttcagtgagatatttcattaaattccatgttcttaaaacagggttctattgttgatgtaaacttaaatcaaattatagtcaaccaaaagacaaatgtatattggtatctaaagtactgaatgacaacatttttttgttttaatttatctataacacaatcaagttgtaaagatgattttgtttgaacaaactttacaaaaataatctctatccattatactatttcgttaatagctaaattagtaaaccaaacgcggaaaataaacgaaacaaacgcggaaacaaaattacaagaagatcaattagtgattttacagttaaaaaaaagcaataaaactcagaaaccctttcacatgtatgtataagaagaatctaaaactttcccacttccaccaatttgagttttgaaacatttacggctcgacagaaaagaagacgccattatattttaacagagagaaatcaaagagacaaaagccacgatccgccatagctgtttttgagatcgatccccaccaaaggagcctagcctaaatcatgccttcaggtgctaagaaaaggaaagctgccaagaaaaagcaagaggaagaacaacaacaacaaggatcttctactctaatcaacctcaaatccaacaaccatggtttttaattcttttaacaccccataatctcactactactttcttctttttgcctttttcttcttgttgttgtctctctgtatctctcaattattcactcacaccacacacgtttaggccacctttcttgtttgtttatatatttgcttcgctttaaatctgagtttttttttaactttgttctctgtatagtttcttcaagttttgatttttatggttttgtgctcattgatctaaacaaatgggtatcttttttactcttctttgtgttttgattggggttttaggctcacaattttgggatctcaagctgtaaaaatttgatctttcggttaattttagcatgttctgcttcgtaatccatatgggttgaatctagttttctgttttggactaaaggatagttttgtttatcagattcatgattatgattgaagttgtttatcatttgctgagttttgtttatctctgatgctttggtttcattagtagtagctgtgcctattttgtttactagtatatgtttcattctctggatggtacaatagttagatttgacttgaatagtcagtgttaagtcactctgtttgtgatattgattggatttgtaaactgatgtgctagattcgagaagccaaggtgacaaggagagcgatgatggtgttaatgaacgcatagagatcactgattcaagccatgatcatgacaagagctctagtagcagcagtagtagtagcagcagcagcagcagctccagctcggatgatgagtcacgggaagtcaagaagatagatgatgataagaagactggtgatgatgtttctgaagttattactgtgagttctgtgccaattcaacctgtgcctattgctgcagatgctccgtttatgggatttactgctaatgcgattgtagggaatactggtttgatggattcagctgtgccgaatgatcccgaatctggagaactggttgagatctcgcatgttgatacaatagtctcaaacgaggctgatgataattctttgcctaaagcaactgagattgctgctgaagttgctcttgcatttgatgagattaggcagacgtcttcaggtgctactgactctgatgtgaaagaaaatgagggaaaaacttcgcctcttccagaatccaacggtgttcctgaaggcaacatagagtctaatgttgtcatttctcatgaggaagaggtctttattgtttacctatttggttcatcttttatgttgctcatgttacctaaaagactaacatcagttttctctcaggctcccatcttgataccaacacatggaattgcgaaaagaacctcatggtttagttgctgcggcttgtttgatgtggtcacaggatccagtagataaactcaggtaacttctctgttttatgtgaaaacatcgtcggatgcataatctctctttttgtttcatgagtctattatctatatgtgattcttagttcatggacaacaaccatacatggaagcatttccttcattatttctgtagcaagagtatataaacatcaatggtactgtcaatttagctgcgagtaaaatagcctcctgcattgctgtctgaaaactcacatgtcttgagtcactgatgagttatattttctatgtaatagcagaaacagtgtgttgcctacaaattggaagctgcagaagtgttatagcggcgaagaattatcggtttcctctctcgatcacctgtgaaaattcagtaacttgatgaatgaatgtctctcaaatcacaaattttctcaaatgatagagtactcatcttctagtaatattcagaacagatatgcttacaatttctgctctttatatatgtccttaccaagttctttttagtttttcattctgtcattcgttttgatatgtaccattttcttgtctgttattgtttcgttctctcagcttatgagactttgagactgtttaatatagatatttgcttcatacatgaccggtattttaaaattaatatatctatatatgccacaaattggattcgtgttagtaacacggtgttacacacggtttccacatttcttgcagatacagttgatggatacaatatgcgaaaattcttagcattcgtatgaagcgtgtgtaagaacctacattgtttttatttctagagaacaaaaaactttacacaaaatttaccaatcaaagtctacaaaaaaatctctggtccaagaacagtagaaatccagaatcatgcttctaatcattcacagctcctgtaatgcctctgcttgaaacagagactgccatatctctagtaagtaagatccaatcactgatctcccaaatctgttatcagcaatgaccctattcatgagctttattcttagcaaactatcaaacctttctgacttcgaaaacgactcataatccgtggaaaccgatctgtaaacctgttgcttcatctctgctagcttcagctctatcttcatcaacactttttggcaatcttcaaacagagaatctaaatcagaaagcttgagtctttcacactgtctcttttccagagccaaaacaatctttcccaaggctctagttgcatctgcacaaagacgaatgaaatcatcataccgaaaaatagattcaggaaggtccacattatgttccttgttctccttcttccagatcactactccaaagacttcctcgagctttcctatgactacacttgtacccgtatcgtcttcattgacccctaatagctttgtacacagactgtactctccagtttcaccagcaagaatctcaataggtatcaaaaacataaattccgccacaagaaacgaaagctccactccaaatctaacagctttccttctcctcttcatcagatcctcaagtcgttctgtcaaattctcgatcaaatacatccgtctattataccccaaacaattacgtttagtcacacctgaatcttgttcagtcctctccatttttaccaccattggagtcatcaacttcttcttctcctttatatctcccgtttcttccttctctgcttctgcaactcaaaattcatcaacttcaggctctccattagagatccaagaagaaatctctttctcttccttctcagctttctctctcaatctatctcttatcatatcctcaagcaaccctccaaacacataactatctctaatccagtctaagtaacttccatctttctcaacctcttctaaaatcttctcaataaactcatcaacctgaccacaacgtcctggatcttcagctccaagcatagttgacaatatcccatctaaagtcccaaagttgttaccatcttctacattgcacacagattcttcagcatcagtagatatttcggattttactatctcatctcttaaaagccattctataacctcatccgcaagaaacataacttcttcacgttgttcaactttcccctcttccacataatcacatcctctaacgtgatcagaatcaaaagacacaaatcgatcacttgtatgatctttgatctcaatttcagatctcagaatctttagttcttgattaagaatttcgactaaatcagaatgggttagggtttgcgataccgtacaagagaagtcaattggggttttcttcattgatcctcttcttcgagtcttcttcaacttcttgttcttcttctccagtatcgttggattctcttcatcactaccatcgagaattgttgacaattcagcgctcaaattcctctgcttcagcaatatcgttggattctcttcaatatcagtaagaatacttgaaaagatagaagattcaggactcatcttcttctcccaatcactttcttctgcttcgtttgtatcttccctcgaatctctgatcttcatcttctcgtttcagagagagagagagactttctatatgtttgtacttaagtagtctttcatacaaagacgtttgagctgacgtgtagtgtaaacgacaagcaaaacgtaaactccaaatttacgcgtctcttctacattctcacagtatagaatctctctgaggcatttcgtcggggaaaagttaaaccttttgaaaatcccacgagctctgtccaaagatttggttctttaagtgattagtatacacaatttgtaactaaggaacctgaaccgttgaggaatgacgcgactcaccatctcctaaaaactcactctttaactatgaaaatatggtgttgctctctctcgcatatcgtttggtagacgaaaggtcaaaacttttggtgttactgttagagtttgtgtgggtcaattgtcagaaccaaaaagccattgagtttattgtaaactcatgtgtactataattacattgtatttagttatgctgtgtttgtaagtcaatcaagtttaactgtacatagatgcattgtttcagcaacgagacacgagattgctctctactagtaatttgatcgcttcttgtctaccgaatgtgagagactcgaacaattcaaatcatccaccaagttaaattgagatcctctgacaaattattaaattctagatgaaataggctcaacctttgacaagtaatgaatccgaaatagcttcaacaaaagatcttaacttgatctgtttcatactaaaaccaaaactcatgtttgttcactccaaacacaaacacagcagtaatcaaaaatcgtcttataacaaaaaggaaatgcaacaaaacagaagaaacaactaagtagtaggcaagattcttcttcactcgtcttcttggctacggagcctagcaagcctgttggtaacaacaacgtctagctgagaagctctctcaacaattgcctttctcttcttagtggagacgttgtgagcaatctcagcacagtaagtcctgttgtgcatcatcaacaactcgagctcacttgtgttgtgaacaacgaatttcttgaatccattgggaagatagtgacgagtcttcttgtcagatccgtaaccaacattgggcatcaaagtcacacctttgaactttcttctcacccttgaatcaataccctttggcctcctccagctttcctgaatatttcccaaccacaaagtacataagaaatcaaaccaaatcaccacaaacatgtcaaaaagctcaattcttccaaaaacgacataagagactaatctggaatcaaactcaacctaatctggaatcgaatgaatattgttcatgagagaactcaggcaagctaaaatcatcattttcatgtaatatcttcatagatagagactaatgtcagatgtttaattcaaccaccatattgcatcctaaagctacaaactttaagatacagctaccaataaaaacttaaaggaacaaaacccagagattgatctactaaaatcctaaaactctgtgaaatcaaatgagaaaaagggtttaccttgacggtgattctacggtcactctggggtctgatgaacttagcagacctcttcttcacaaccttcttggtaagcaatgggaccgccatatttgcttcttcgtaagatcgatatctcaaaagcgactccgtaaaacagctgaacaaacctaaaatgtcttttataagcgtacactagggtttctgatattacattactaaatgggctcacgttgtggcccaataagatttctttcacggccttttcgttttttccttcaactaaagaaattgtatgctcttaagaaaacaatctaatttattaaactaaaaggaaaatacacttttttcttcaattaagaaaatttttcgttttttttttttcactggaagattaattttcattgatgagatattaggtgaaatacaaaaagccgacgatcaatacatgatcccggaaactaagtcgaaggatgacaaagatatcctcggaaactaagccaagaaatatggagagcaaataacaacactacaagagaaacaagtcaaaacaatgacgactaaggaagcacacaacaaaggaaatcaaaactcttaactcagaatctagcaccaaacatcttgcatattatcaatccagaaacgagaaacgcttgaattgtttctttcttcctttttctttttttgtttcttaatttctttttacaaaatatcattcatggtggtcttcttctgctcgacgattgtggatgtcgtcacgacaagtaggacatgatcgcttgcagcgtagccaggggagaatacaatctttatgaaaactgtgagaacaaagcaacttcatgatcctcctctcactacctgatgatgctaactcttctagacatattatgcactcttcttctattggtattagacaaccttgagagtcataatcattgactcttaaccaatcactatacaacgtttctagaacaacttcaacttcaaccaagaaaccatctttttcttcttcttcaaggtggcgtcttatatcaatcaggtcttcgcagattttaggaacaatactttgctgaatccacttgttgatctttgacttggacaacacgttagccacaaatatactgcatatttcttctccggtgaggaaaacaggtgggatctcggatgcgattcttactgttgcattcttctttcctagcgatttttgttgagccaaagtttcacgaccgctaggactccggataagaatccgctcaattccttggatacttattgagaaggatcctgaatttttgtgatcgacgatgtgagtcttagattcatagtttagaatccatgttgatgtgccctccataattaaaagccttgttgattaaattatgtctgttttggctctaaaacaatcgatctcttctttatttatagaggttcattggagtctccaaattcacttaggtttcaaatttacatttatttagaaaaatagaaaaaatgatgccctaaataaatggaacatgtttaatcaatgattatctaaacacaaaattaaaaaattcgggccaaactgattttttttgttttgtcaaatgttttagttgactaagtattatcaactaaaaacaattaaacagatatatttttcggattccaaaagaagtttaaatatagttgaatttaatgggaaaaaatagaaaaaggagtaaaaaatgtcgagccacttggtcctttgttactcaatcattcgccgttgttccgatcattactcttctcttctccatccaattaaagattctctcttttaataatgctttcaaaagaatatctaatttcaggaataatcaaaaacttatttaatttctctcttctttatcaatgtgtatatataatacacacatatataagaaagtgtttcttctgtattcgtgggagaaacaaacaaaaaacaatttcttctaggtaagttttttttttttgttcttcctgctaaagtttcgatttttaaactaattgatacttgtgtgttcctttggctctagcggcaatgagtttgtgttagtgatcctgctaaatacaacaaaagggtgaagtagaataaagttggtttcttttttaatcaaaaacagttggatgatcacagtttagcttcttcgatattgaaaatagggttcttgttctgtttcctttagttccctctttcctctgctgtgatcgtttctgtcttgatgatgatgatttaccccaataaggttttgattagggtttataaactcagtggaatcaaagttcagggtttatagagattgaatcattaaggatttgtttgattattattgctaatggaatttgcaatcctctgttttttaaaattgtatccatcttggtttagaaaatcatatttctctgtttcaattggagtcatctttcaatcacttgcctccatcagggtttaaaagagtccccttttcgtcgttgtagcgaagaagcagaattaatcaaagttcagagctttcactatgaatatcccaagtggaaccttctcaagatctgatcatttccatgcttcaagtgatgcttctctcttttcaagctctcttcctcttattcaacaccaaaacagtatgtacattgagttgcctaattcgtctttatatcgtcatatgttggatgatgttataatctttaactcttgcagtcaaccctcgtgacagctaccatcagtctgttgatgaaatggcttctggcttagaccattttagtggaggcattggcaatatgcttgatgatggtgactcacatccaatcggaaacatgcttcctgatgatgaggaagagcttttctctggtctaatggatgatttaaacttaagttccttgccagctacgttggatgacttggaagattatgatttattcggtagcggaggaggtcttgaattggagactgatccatatgacagtctaaacaagggcttctcaagaatgggttttgctgattctaacgttgacaatgttatgcctcaaaacattttccaaaatggagtgggatcgattgctggcgaacatccttatggtgaacatccttcaaggactttgtttgttcggaatattaacagtaacgtagaggattctgaattgcaagctctttttgaggtaatttctcttttgtattctcaaaaatcggttctttatagggtgaaagattggatctttatgtttgttttcccgttcttggcagcaatatggacatatccgaactctctatacagcttgcaagcagaggggatttgtaatggtctcttataacgatatccgtgcttctagagcagctatgcgagcattacaaggccaagctgcttaaaaagaggaaacttgacatacatttctcaatccccaaggtttcatattcttgaattctcttatatatatcattccttgttattctccttttttaatagatgatcttttcattttataggataatccatcagagaaagatgttaaccaaggaactcttgtggttttcaacttggctccatcagtttccaacagagaccttgaaaatatattcggtgtttatggcgagatcaaggaggtgatgcgtttttattctgttgtttctgtttgatttttttgaggttttaggtttctctcacgacctgcataatggttaacgtttgtgtaagttattgttctgacaaagcagatacgggaaacaccaaataagaggcatcacaaatttgttgaattttttgacgttagatcagctgatgcagctctcaaagctttgaacaggacagaaattgctggaaaacgtatcaagctggaacatagtcgtcctggtggtgctcgtcgaaagtgagtttactgataccaaagaaactgactttaaagaaactgtggactaattttctgttttgctttcttctctcagcatgatgttgcaaatgaatccggaattggaacaagatgattcctacagctacctgaatcatgtcgagtcgcctttggcaagctctccaataggaaactggcgtaatagtcctattgatcatcctctacaaagtttcagtaagtctccaatatttggaaacttgagtccaacaaagaacatccgttatccagaattttcgatgaagactgcatcggtgaacaatgaccaagaaggaagaaggtttagccacttggatcacctgttttcaagtagcagctataataatgcaagccacaaagcttctacctttcagcaaccgcagtcgtttggatctgtctcttcatttggttctttgaactcacacccgagtcatgtagaaacattatctggatcagaattcctgtggggaagccctagttcttcagcctggcctgtgaatccattctcttcaaacagagaaaatcacaggtttccgtactcagctcagaacggatccctccaccagcttcatcatatcggatctgcgccatctggattcttcccgaggtcccctgaaacttcatcaatgggttcagtggctttccgaggagcaagtggtaatatgaatgctcaaaggaacttgcgtgaaactagctctccaaattttaaaatgttgtctgctccaagacgtagtcaattgtttacaggcaatggctcttacctctggcctgctgctacaatggtttccattgacgacccattggaggatggaagcaaccaacagtttgatagtaacggtaaccaagccgacatcaagatacagtttcagcttgacttgagtaagattatgaggggtgaagatccacggacaaccttgatgataaaaaacatcccaaataagtaagagtatcctttgattttgctgtggtccggttagtttaccgttttgcgacctgaaagaactgatattttttccgtgttctcaggtatacccggaatatgctcttagctgccatcgacgagaaaaacagtggaacttatgattttctttatttgcctattgatttcaaggtaaagaccatttaggtttgtttgttatatctttgatatcacttgatctgaattctataatgccctcttttggtttctttgtgtgcagaataaatgtaatgtggggtatgcatttatcaatatggtgtctcctaaattcaccattgcattgtacgaggtacaaaacctgattgagtctttagtgttgtttctcagagagtgaaaattttggggataaacttatgcttctgatctgtttcataggcctttaatggaaagaaatgggataagttcaacagcgagaaagttgcttcattggcttatgcacgaatccaaggtaaagctgcgcttattgctcactttcagaactcaagtttgatgaatgaagataggagatgccaacctattgtctttgatggatcagaatctaaatatccggtaaacaatctcttacaacaaacacatgatcttaaaatgatcatttatcttttctgtgtttatctgatgaactggttgactcatacatgtctatttgaaactagatcatccggagaattcgcagctcgagcatcaaattcaacgggttttctcatcttcttgtcggcgagaacacacatcaaagctgacagtcaagtgaatcacgttattgcctctggtttaaaacgtaaatatcagtttctaggatgagatgatgatgaacaacaacaaactactacatagtaccctttagaaacatttctggttttctcagttccttctagtttgctggtatccagaattagaaagaattattgttctagacatgtgaattgatggttgtgttttacttttgtctggttggccaaatgatctctccaaattgtatacataggatagttaagatacaatcttattggtggtaataaataatgtacctttgttctaattaatacatttggtaagagaccaaatttcattaaattttataagccttgtaactcaaaatttctactttatgcttgaactaccctctgttcctcttgactcaacacctaacattgtcttcacttgaagatccacctgaaagaaacaccgttcgtcttctcggacataactcacacggccattcatctgctccaatagtttccgcgaaagcttaagccctaaaccatcaggggtgacccatccatctcgagtctcaaacatatcacttagcatctctgaaggaagtcctttccccggatgtatcatcctatcataaaacaacatcgaacgttttaagttaaaaaccatcaaaatctgcaaaacggctgcattgtgaaaagaagttgttttcagttgtttctgttgacgtttacctgaactgtagatggatatagcgaccattgtcacgtgaaagctcctgccctggtgagatactgatacctacccaactatttggaaacggcgcatgattcacaatgttgcgtagaagatcagcaagaataagctggagcttgactctgtcaccattgagaggcagagttttgatctcctcggcgacttcaacccttagttgtgagttcctctctctcaatataatcatcacttggctaatgattgtgtccaagatgttttcaagtcgaaactcttctgtttccaattgcaacttgctgatctcataaaagaaaacatttgtttttcagattcaaaatgtaaaaacttcagtaggtgaagattcaaaacgttatgctttacccttcctcaatgcttttcaagtccgtgctttcgattattgtcgtgatttgcttctcacaagcatcactagtctccagaaactgcctttggctagctgaaatctctgaggattcaagaagcttatgtgcaaatcggataccgttgagaggattcttgatttcttgtcttacgtaagttaattcgttgaggctttgagcgctctctttcagttctgggcagctcaaccccgattctttattgataatctgcaagaagaagaaacatcttataacttttccttcgatgtttgtactcttgttcgcggttaaggatgcttctatgtacttcccttccttattaaagaactcaaccagtgaactctcgggaacattatcaccagcaattccttggtacagagagatcaagaactttgtgagcgaatcttggcatttcactttacaaaagactccaaagacttcaccgggtagcattttcccaatcacctcgtgttttgaccatcccgtaagcttttccattgctgcgttccactcagaacaacaagcattttcatctgaagcaaatatcggtggaatcaaaggatttaagctttgaacaatagtcttgtaatctccttgcaatctgatgaatctatctgttattgctttctcactagtgatgtcttgaccaacgaagcagacaccgatgatattttcagtataatcccgactcgtgcaggagttaacgagaacacacacatcagaagaataatccggatgattgttttgaccaaactttctcagtttcagcattacacttttctcctcttcacctgaacaacacaacatatcaatgttacaacacaacatatcattgttttgttagttgataaagctcataacatgaaatttgtatggagaaaatcttctttcatataaccttgtagggctttgcacaagagactttcaagagctgcgcgtgattcctcttgaacaatctcatcggcaagtgacttccccattgcttcactagctagtaatcccgtcatttcagcggttttcttgttccaaccattaatacatccggatgaatcaaccccaaaaataggtgcagttgcggtttcaatcaccctaaccatttcacacacaaaagaagtaagctcattagcatctcttgctacgccattaccagacaaaactggcctagagctggtaaatgactctctcattataagtctcagggaatggatagcatcaatttctgagatttcccacggcaagctcctgctcttcgcaacttcaagaaaggctgtaaacgatgacctcggatgcattcttccggcatcatctttatcctttggatgatgtttagctcctccccatttgattgcacttgcagtattggacctgaaccaaagtaagtaatcttttgaagaaaattctgcggcagccacaccacaaacggcatctccaagtgagatggcaccagggtatcccgcatccaccaaactatcagtggttaaacccgtcgaatcatcaccgtgattctccaccagccaattcaccaagtctttaacttgtgactcattaggagtaacaccaaccaaccaacatttccccttgtaatataacgcagctccatcacatttcacaaggtccataatacccggagattgtgtaacaatagcggaaacagtatcacggagaagcatatcgcacaacaaggtctgcgtccgcatagccttcttctcggctaactgtgatgctaactgaagttccatttgaagctgaagcccaaatgcttgcatcagaaactcacaagcataccgcaacgggaatggaacgtatctaggagaacaatgatgaccaacaactaatccccaaagcttgctcgaatctttgccttttactacaattgcgagtgcaagagaagctacagagcccatattcgccatatactgcgtatggcagccatgaggagctcttagagtagaattaactaaacaaagtggtctcttgagttcctcactctgaacaaccttaaccggagttgcattgcagtcacaaatcattcggacacggttctgtttgaacaagaaccgagcagcctgaggaatatctgttgcaggataatgtaaacccaaataaggctccaaatcagaccttctaatctcagaaacaacttcaccatgatcatcttcatgaaactgatagaccataacacggtcataaccggtaagtctctgaacatcttccacaacagtatcacacaaggcaccaatatctcctccgggaagtgactgcagcctagaaatggccctaacggctagcttctgagactgaactgcgcctgcaagggtcaaagccggatcacctgatttagcaggctccaaatccatgacaatccctgcatcaatcctgtgaagaatagcataaaaaggcttctgggtcgtcctagaatggaccaaaacaggattcaacaaggaaatctcagtaaaggaagcagctttagacaaagaagctccagaggaaggagtaaaaagcgtccttgcatcgattccaatcaaacccttgactttatcaaactcaccagaatgggaggtggaaggaagagacaacaaaccaagaaagtcagaagagttgtcactaagaccaagtatcctaaaactaggttcttcgacagcaatcaaacaaccaaagggctgaactagaccgcctctttggatgttagacaagtaagctgtgatgtgttcatcaggaacgtgattgggaggtgaaataacagatttggagtagttaaaagacttgccggtgtaaatggattgagcgaaatcagcaaagagagcagcatcaacagagtattgagcagtgttggatttttgaggttgaggtttcatgttgcttgcagctgagcttgaactctcgaatcccatagcttaggggaaagtgtggagtgagtttcgaccagaagaagaagaagaagaagctgattctgtatcatttgcagcaagagaaagaaagaagtaaaaaaagtttcctttttgatatttgggattcgtttttacctcaagattcttcttttcatgttttgttttgcttccttcaatgctttttttttgctactctgtttgcattctctcccacacgtacagcttgttcggtgaccaccaccgattcactttcattttttttcccttttcttaaattgctttatttttgtgaataaaaaagttccatggaataagtatttttttgttactctgaatctattgaagaaatggctaatgtctttctcaaatttaatagaccttcaaaatttcaacatattttggtcaaaactttcaactttgataatgtcctcatacttctgaaaaaaaaacaaagtttcttttgagccaaatttgaaactatgtttagtcgagagttaccaaaagcaatctccaaagcatctaaacgactgatgttatgtaagaaatcaatgactttcttggttcataagaaccaatgttagaaaatatgattcttctgacaggtttattaactagtaacaagaatatatgactatcaaatgttaatgaaaacaagttaacattgtaaagatgtacatattggcaagtttgtcagggagcttaagaccttagacaaaaccttaagagtcaagttaacacagagaagaacaatagtcaggtcacttccttacgcctaatcaaaagaacttcttgttgaatgatctgcacaataaggaccatgccaacagaatcatgaaacttttactgagagttatagattaaatagcttattataataccacagaaccaccagatccgggcgcccatatacgatattcctcctttatgaaagaccacagaagctagaaaattcgataaattcacgaaaaagaaggttccagattgaacctctcttcatttatattactgacaatgcagtagtacaaagatctaaccaacagtttgaatttaccacaaggagataatggctgttgttaacctccaaaactgatatttcactcaatagttactcacttttatacattcagtatctcagcttcaccaactgtacatttagaacacttaagatttcaatgatctattatcctggctaaaacaagggttacgctttacttgtgtactaatatcaccgagcattattctatggttcactaattaaatagcacctaagaagtcttgaggaactaaactagtctatgactaaatctgttaaagaaacccagaatctgcaatcaagatatagtggaaacaaaaggaagagatttcttattccttgttaccgaatctcttggcaatgacaggacgaacatcgttggcatcagccaatgtctctaagaagggaagtaatgtaatcagaccatcatcagttggatcatcataccaacttttaatagggatcccattgtttatttgcaatctgtacacctgaaacaagaacaatgagggtccatgtaatactcaactaaactacaaattctgcactgtaactatcgttctttgaaattcgatttgcttgtggtgtctatcactgagactaaggtaaaagcaaaaattaatgaaacaaaggtagtgaagtgaatcctttagaaaatacctgtggacagttgtcaactatagccacttttgctagatcaagacccaaaacggttaaatccttggtataaataccatctgaaagaatgcatgaatcccggtaaaaacgttgcgatacaaacttcccatctggatccaatatatctagaagctgagacgcatagatgctgtgactagccgtgaagatgacaacatgaaaaagttcaaccaccctctctaagaacctataaaggtatggtctttgtttcacgtaaacagtgttctcttgcatattgaaagtgactctgaaggaaaagtctgtatctctacagacttccagagtcgaatggaccagagtttctgcaatgtcatttaaagatgattagtaagtgtggttgtaccatggaggcaaaacttaaccaagtggttcatatcataccatccaaatcaagacaaaggttaccgccttccttttcggagagtccctaggctgctgcatatccgggacataattgaataccacatcagctaattctggttgatttcttaagaaaatctgtggatcaaaatcttcagtttgttcagcttcagtgtgattctctgctgcttccaagttttttgatcttgaccgattaatcctgttatcctcatcagacttaacatcatcactgctggctgatctatcttctaagtaaggtaataacatgtactgctcagctgcatctagtaacacacttggctctggaaagatacaatgaggcaagggacttatctcagtgaaaaaatcaacatttccactctcatagaatggcaagcttgcaatcagcacatcagatagaaagtaatcagaatcgttgcaaaactgattgttgctgcagtcatcagctccccacctaggcatttcccattgcacattgttcccttccacaaatactaaggaaaaccattcttagattactcgattctcaatcaaaaagacagcttaaataaaaaaatgaaagagtaagagaatatacctcggtcagtttcagaatacagttcatcatcaagaacaggtgaaaatattgtatccatattcgacgcatttttggaactgtcttcaactagcaggtcttggggttcatttgttacaacatccctagtagaagaatccaaacctatagtaatcaaaagcatcatcagaacaaatttaaaacaaaaagatgaccgacctatttgtagaattcaagaaacaagccttacctatattctgttcctcgttgttgttgcaattctgagtagcagtgaccaaaagttccattctctccgatattttgggatcaaagcatgaatttttaacatccttatgaggtttcttacaaacaccaagaactcttttctctcttaacgagtccttgcttatcttgctcttcattttcaaaaatggcattggcatagtctctagaaatacaacaacaagctgcaaaagaaatggtctcaagatcaaaccagcagcagatactgcaaaacaaagtcagcttgttgatgaaattacagaatatagtaagataaacatacggatctgtaacaggaatttttgatcattttcacaaactcaaacacaagtcaaccgataaaaccaaaataaaattgctaagaaacgttaaacacagataattaacaatcaaaattgcagaaaaacaacaagaattagattgagctaaggaagaagaagaagaagacctacctgaagaagcaagagttttttttttcttcctcctctctggtttttttctttctgaaagacaattccacgaatgagagaagcttattagttattacgttttttttattccgatcaaaaacttttggtgggcgggttcttaacctgtaataagatgacacgtatagagttttatccagctcagctactcacccttgtaacttgacacgtgcttctccttttaattcttttaaaatttgaagttaggtataatgggcttaggcccatattacacgtaggctcggaccaacgtccttatccattaatcaatcatttaaaaactcccagattctttctctccgcgcgttgttttagtagcgcgtgacctttacttttctcgaatctaaaatttcaaaaaaaatctccaattattttttaagccttttttttaatagaatctcagacaacaactgttttaaacaaaatatgtaaaattaagcttattattatccaaaacctattcatgtcttaattgaaaatctgctaaaaatatataaagttaataaaaaaagtaattaagctaccaaataatgataattaacacatataccattttctttacataactttccaaaaatttgaatttctttcctttttcccgaactcattatttagtcccaaattcaaaagaaataaaataaataaaaaagaggtttttttcttctttttcttccgatatactcgaagtcaatagaacgaaagagatacaaacatcaagaatctttattttgggttttagaattgctcgtcaaagaatcgtgaatctaagaagtttttgaattcaaatctgatttgtgttgttttccggtaatccggagagagagaggaataatgggtggtggtggcggcagcgttagtaacgcgaatggaggtgttccggcgtcttcgaggaaggttattcaggatttgaaggagattgtggagtgttctgagttagagatttatgcgatgcttgttgagtgcgatatgaatcctgatgaagctgttaatcgtcttctctctcaaggttcgttcttccagcttcaatagctttttatctcttttttagtttctgggttttagcttcgaatttgtttaatggaacttgaatagcaaaaaaaaaatcaaaacttcaaggagttttaatttaaccttgtgaagaaatttttgcaatcatgttgaatctgttagaacttcttgtataagagaatgtgtcagaactttatttgatttccttaagtttcttgaaatagtaatgttattttggattttgttgaatcttttttgttatctgtttctggaaataaatatataaatcagtttttttctctttttttatgttacagtttcttataatgttgtttcgttaaaacttttcagatacttttcatgaggcgaagagtaaacgagagaaaaagaaagaggtttgtcgaatataacataaaacagctactagtttagttactaatgccatatagctttagatgattaaaatctttttatctgattttcatttatttgtctgtttgttcagactaaagaccatgcagactcctggacgcgtaatgtcccgaatcgtggagctagaagcggtaatgacagttacaatacctctcgaggtggcagaaacaagtataaatctaatggtagtaagatgcaaattgtgcaagagatagttttctcttttttcttatgttcgttgtggttttggttatcttgaaaaatgtctaaacttgtttctggattttgcttcagagacaggaaaaattcaaggtgtacctgtgaatagaagagaaaacggagcacgtaatcatttggctggatcttctgcatcatctggtttgcttggacgcctacctggtttgcttagacgccaaccaccatcaaacaggttcttaccttcatgtggtcttttggtatctaattttcgtaacaatgtccaatattttgtgttatcttagtatctcctttgcattgcagtgatcttccaagctctaaagtcaagaaagcaccaacgacccccagtgatgcagttactttgtcttcgttgccttttcctgcgtatcaatcagcttgggctagcgctaaccctgggcaaagaactatggctgaaattgtgaaaatgggtagacctaacctgcagaagaatgtcgctttgcctcgttcatcagaggctcaagagagcagcagtaaagcccctttgaaggatgaatgcccttcaattgagaagcaagacgtttcttatctatcatcctctgtcttgaaaccatctgctgaatctaagatttcttccgaccaatttagtgagtctcaacatttggatgagactcttttggatgacatccaccgcgaaacaaaaacttatccaactgggtctcctcctgatgtggatcacaatccgctagcttcagtatcaagcagaaatttggttgacgatgaatctagagattccttagtatgtgacgatgaaaataacaaagctgaaagacattcttatgaggaaaatcaaggtgagatatccatattctctgtgtgagtcttctttttatctctttcttcctctttgtcatgttttctaatgtttgctttttccattattttcagatgaagatgtttctacttctgttgctactggttttcagcaactaactatttacaatgaagaagagcaggaagcattaccaaaggaagaaaaacatgcggtgataatccccaatcacctgcaagtccatacctcggaatgcttgcacttaatgttcggttgtttttcttctgggataggatctggtcaacctagtgccttgaatgataacttggaagaaccactagtagcagaggatgattcatcattcagacatcccgacactaacttctatggagaagaagaagcagaacagccgagaaatgctgttacaaatgaacaagtgtcttatcaaatcgattcaagtacccaaaattataattctgccacagattctaagacagacgcagtgcaacatgaaccgcctcaagaagtcatcaatacaagttttcgtcttccgaaggttacagatttgaaaacaaccaactgttccatcctccatcagaaacaaatcctcagaggcagaatctcgatacctaccccaacataatggtaaacatcaaacactattcagatttaaaaatctatcacacaatcgaaaaggatcactgaaaagattttaaccatatctactattttttttttcttaatgtgcagcagcaaggatatacaagttcgttacccaacactctactcccatcaggcattcaagatggaagagaatctaatcttcactactcgcctttcacaacactatacaacactgaaatttccatggccgaggtaaccaaatccccgtttctctttcatatgatcttattctaagctttccttcaataccattgcttacacaaatttgattgcaggcactaagagctgcgagtatttcacctcaaaacgcaatacccagtgcaggacagcaagcagcaactcttgcacaacatcttgccttaaatccctactctcatcagcctgagatgcctttaggacattatggcaatttgataagctacccattcatggcacagtgttacaaccctttcatgctttcagcttttcaacaagtgtttcctactggtaatcatcagtctttagttgatatgcttatgcaatacaagactcaaacaaccgctcctcctgttcctcctccctctgcctatgggttcggtggaggcgctgtctcaagtaataacttccctttgaatcccacaagtgctgcaaactcctacgaagatgtcttgagctcacagtttaatgagagcaaccacttggcatcatctcttcagcagcaggtaaaccatgaaattcttctcaggttttataatcatgttggtgtgttttggttctgtttggtttccttcctctgtttagtcagctggaatttatactggagtattcgattttatttatttttgttcgattttggatgggtttggctcagttttgaactgttggattttaagaaaatcggtgcagtttggtttctgttatttgtgcgttctctttttcgcaaaccttaacgagtagctttctttgttttgctttgatctacagaacgaaaaaacaacagcatggcatcaaggacaacaagccaactcgcgagtggttccaggaagcggatattacagctaccctggtcatcagaatcagcagcctcccggtttccgtcaagcccaacaactgcaacatcagcagcagtcgtctcaacaacaacaacaacaacaacattatggaggacatgggtatgtgagtccttaccattcacaagctgtaatgtcactagaacatcttcatcaccaataccaacaacagcaaaacgctagagacgcgtcgaaactgtcccaacaatagttatgggccaaccactactgatgaaaagcaatccattcaaatccttctttcccccttattttcatctctcattccagagcagcgatgggatgattccgttgtttgaaaatggcgttgtgttgtgtgtgtgtttaaggttcagggtagggtcttatgagagggttttgtgagagaaccttcaatgggttaacttgtttacttgctaaccttcttatattactaaaaagaactctatttttctttcttgtctgtttcttatcattttactttttaactatttagtcttgacattctatatcagaccaaacttcatagtaaagattattaagcttagcatgtcctgactaacctgcgtcatattaaatagtatggaaagagaagaaaaatttgaaaacagagaaattcaattactatttacacattttgacggtgtgattatgctaatttatctactattaaataagttgtgtataatgaagaaagctaatcaaatcatgtgttctttgtttggtactagtctactacacaatatttaattggatagtatagttaatagagagatgtgtacttatctaactctggaaaaccacgtcatgtgagatttgttaacaaaacgacacattttgccgttttatttgttttcagctccaaaaattcaagtcatctctgtgtttaaaaattttaatatgagagagacgctgtacctttttgtcaaacatagttgacactttaattcggtcgaagtgtttactggaattcaaacttacaacttcgacccctccattttaaaattacggttcccaatggtgacgaaaccgcacgttgcagtacaattttaatactccctccatttttatttagttgatgttttaggagaatacacatgcataaaaaaattatttaacttttatctattttaaaactaaaatatcatctattatttaatcaaccagtagaaaaataatctgcaaaaaaaaatcattaaaatcaataaaaatacaaataattttccattgaaaatttaaaacatcattcctttaaaaacaaaaataaaagtttaaaacatcattacggaaagagtagtaacaaaattttctgaaattgctagaattttagggccacaatcaattgcttctttttattttgctcagttacaatataataatacaatgaaaactacatcgcatttgatatgtagttaaaccgtatatctccattcggaacttatttatctgatctataatgtcaattagatttattattcggaacacaattcatataaatgttagttttagataaaattttagagaaaatatgaaaggagccaaactcaatcttagacttaataaagagtatttttccacaaatagttacaagaaaaccaattcaattattagcagcatgtgtaatgtgtgcaatctagtaatctgaaatagaataacaaaatcggtctggatatattattattgaagaagatgccatattattaattattataaaaaaaagatgccatattaattttaaaaaatagcatgttatataggttcttatagtatcatatgtaaatgtttcttgttttttgtgcaaaccgcatcaaatcattattaaatgaatatcagtatataacctttgatttctctctaaaaaatgttaatagccacaagaaaaacttaagaaagcgccatttctgcttcttcttacttcaatcctttgcgagagagagagagagagagagataaagtttcttcctttttcccacgtttcacgttcctcctcttacctctttctccttcgcttcaatcccttcaagtttcagtctttagatcaaaccaaaaaaaaaaaacgatctttttccgataattcagttaacttcaatcggaaaaccatttccagttttccggcgagatggccaacgaaggaagtgaccctttacttcaatacatgattagcccgagattgaaaaaacctccacagctgctgtttccattaccagaagacaacgaagttgcgattccgatgccgatgacaccgtcggagttcaaagagcgtttaatcttcggacccttttcatgttcgccgcgagattcgtctcacttcatcgattccatgaaacaaccgtcaccgtcgtcttcttcaaccgccgttaataatcctttctccgattcctcaaccctagatcctctgcttccaccaccaccaccacaaccagagccatggttgtccgatcaaacttcgagtcactgtcaaggccacgctcttcaccgatccaaaacagcaccagcaatggctgtaatcaatgatcttcatcacccaattcgtcaaaaagatcctacagagacgtcacgatctgtagtaagacaagcttttgctcttctcgttgtgtatctctctctaggtgtgcttatctattggctgaatcgtgatcactacgttgtgaatcaaacccatcctgtagttgatggattgtatttttgtatcgttacaatgtgcaccattggttatggagacatcactccaaacagtgtggttactaagctgttttcgattatgtttgtgcttgttgggtttggtttcattgatattttgcttagtgggatggtctcttatgttcttgaccttcaagagagctatatgttagactctgctaagcggagagatgagcctgagaagaggagatcttatataatcgatgtcaagaaagggagaatgagaattaggttgaaagtggctttggcattaggtgttgtggttttatgcattgctgttggtgttgggattatgcatttcattgaggaaatcgggtggttggattcgttttatctctcggttatgtcggttactactgtcgggtatggagatcgggcttttaagacattgcccggtaggcttttcgctgcgatatggctgcttgtgtctacattagctgtggctcgagcttttttgtacttggctgaggcgagagtggataagaggaatagagaacgggcgaagaaagtgctttgtgaaacaatgtctgtctctcagtttttcgctgcagatattgataacaatggctgtgtgaggtaatttgactcattccttatccatattatatgctctgacacactccttaaggttttaagaatcttaaactgatatctgaattaactgtgtgatgcttatgtttgttaaaatatccattgtgacatccgtaatgtttatgcatttcttagaagtcatccaaaagattttgtctttgctatttattattagtcttttaattttcgtttgtgtagaggatctttgaaaacaaaaacattcatagctcattagctaattagattcttgaaggtgttggatttctaagttaattcatattctgcacttcttcttatgaatctttttgttcaagaacatagtttgtggtcttaggctaagttgaagatctgtgaatgtgtgatgcgaaagcatcgtgtcattgtatgttttcggcttgatataaagtttgaatgaccatgaaagggaggcttagacgcattttcggatttaacacagagaaatgctttgcttgtatactcactcaaacctgagatatcttctggtttttttctttgtttttgcagtaaagcagagtatgtgatatacaaactgaaggagatggagaaaataaccgataaggacatactaccaatctccaaacagtttgacaaactcgaccgatgcagcaacggaaagatcactcttttagatctcttggaaggtggcagtggcgattgatcaatcctctgcaactttttgttttagcttagaattacagttactaattacaacggatcaacgatcctaatgatgctaatggtgatgatgaggagtccagtctccagtttatgtaaactggtttggaccgatattatgtctttggtcttgtcttgcataattggttaagcaggattcactgattcacatcaccaaaagttatcctctcctttctcacccaagattatgaagaggaattgtgggattttatcttaaccggtttgatgtgttgccaaatggttatgtgatcggtttactctggtacgatgagattttgatgaccccctgtaatttttgcagatatatgggctcaagcctcaaggtatataaatttggttggataaggtttgatccaaatttgttggtccagtatgcaaataaaactgtaactttcaagttccaatctaaaatatgtaaattcgaatttcttatcaacagttttaaaagagttttactgatacatcatcagctttttcatattagttcttttccagttaaagagaatttcaattcgcattgtaatgtaatcgaccatgtatagttactcaacatattgatgtcctaatatcaataccaattaatgaaaaatttagtcttttcggttatttgtttttaaatgcattttcttattcttgataatctatacacaaatatcatatatattaaattaatcagctgtaacaactcaaatttcagaaagaggataacgtgtgtgaaagaacagaaaatacaagagattcctttttattcatatatattttatatatactaacatgaataataatgataaaaatgtcacacatgacaaacctaacaacaaacctgccccaactattctattccaaagctaaagtcaacaatttcactctctttctttttattcttctttacgttaaattgaaacttaaataatgtaataattatgtgtttactagaaagtagaaataaatttcataataatatctttatatgttaggcacaaatccccaaaaataggtcagacatttcaactgcagacagatacagttatgtatacgtgtaattgtaagctaatgtttttttttcacttacaggttacaaattacatagaggtccacggtctaactttgggtaatttaaatgtggggcttatggataagacaacgcaaacgattaggcaccaattacggcgtttagtttctgcctaaattaaaactataaatgtgtattaatatatatcttagtatgcattaatgtggttaggtacgagaaacagattcatataccaccattatggcattattatagtatgcaatagaagattgaatatatatttgacttcgaagattgaattttttttggtttagagattattctattactcatatggaatctgataagagttgctgtttctctttcccaaattaaagtatgtatacgccttgatgttcttggtcaaatgtgaatggttaatgtctcttttggttcaaagagaattattcggtcttcttaattatttcgaccaaagattactagattggtattgattttctcgaaaacgtttttcatcgtagtttgttttgaccaaaaagcgttaaaaacatggaaattattatgcccttctttcattgatcaaatttttatataccaaagccatagtattttgattcattccaatattttatactgagtatcactgagacactgactatatatatgtatgtattctcgcgctatccgtaatatgctaggtaatatagcagtgattattaaacgcattaagatcatcatacgtaattcacgataatttgtaatccaaaaacttaggtgtgaccaaaaaaaaaaaaagagttgaatccttcacctaccaaaaaaatggattgtgaccaaaagaccatgacatatcaaatttttagtgattaaaccgatttcttccaagatgctagtatttgtttttatcttgccatattttagtgatttttcatagtagtaaatatatcactttgaccacatttaaagttgatgtatgtccccttcgcatttgtcatgtcggttaggcattatatgtctccttttttcctgatcatatgctcctatcaatttctacaaactcatgaaaacgattactagctatataaatcaagcatagggttcataacatgcaactttaattccccacaattatcgcaaataaaattgtatataaagggtttatcgtaattatcataatgttaacattttcataatatagatacttttggtttgaccatcttttccttaatataagttaataaattaagatgctcttttacttgcaaacagaaagttctaatgtgaaaaagaaattgttattgcgtaatcatgatctcacttatccgtcagcataagtaacgatccactccacatagctacgtcacttaaagtcccatagtaactaattttctttgaatgttatagcaaattattagcaatgtatgattctttgggtcaaatcttacactaaaaacatgaaaataatttgaatatcaagagattcatatattcatattttataaccaaaatatgtagggtctaaattattgcttcttgactaggaattacctatgaataattattaaggttcgtgaaacagtgagggaaaaagaagaagaagaagagaagacagtctctagcacgtgccaggtcatgtgtcggcgacggtcaaatgccggtgcaagtgtttccacgtggcagcctaatactcccaaaatataatcttttgttttcgtaaacttttttccctttgaatctttgactgcctcttactgcattcttcacaccaaacgaccggccggtgactgagtgtttccggtttccggtaacacatagttttcgctgactaagactccttcaataacgtcgtcttcttccacgcgccgtttagtcgtagcgcgtgttatcaagcccgtccactatatatgccacgtatagagtggggaagaaaatgaaggtgagaacttttcatgtcctactttttggccccataaaaaaggcagcacacaaaaataacccaaaatttatgcatgtttatcaaatgtggaaaaataaaagtagaattttaggaaatttatacgaagatacaatgcaaagactcgaagaaatgtatttagtggtatagaaatacttgcaagtaagcatattctgaattaaaaatatagaagcttaagtatgtttcctcactagaagccagttttgcagctctatttttgtcaacttagctttacgtaaagttcttattgcccgaaaccaaaaagtcattcaaaaggcataacatgatatcacaaataaaattatcatctacttctatatcttatttcttgaatatatatatatatatatatacctatctattaagttgcttatcgttcacattattaatttataattaactttatgtacatttgactgataaacattaaaaagacttatttgaacctttttgtatatgaattcaaaattatactgataaaataacgtgaggaagaaatattatgaaagcttttaacatataaattaatttgcataggaaaaaattacacaacttaaattgagattagttaagaaacaagaaaaaacaaagttgatagaaaaataaaagtattaacacgactttggattcacacacgtaccattgaattatatctcaatacacttttacttaattaacttatttccaaaccaagtagccaaaatcatattattcttctctctcttccttttttgagtttcaaaatgcataaatacgagaacgagagacgaagaccaaattaaagtccaagcaccaatctagacctcttaggaaaaaaacctaaaaacctaatccccaaacctaaaaggcttatctcatctcttcttctttgtcttctttactctttttttacctctctcttcattgttcttcaccatgtctaatgaaaccagagatctctacaactaccaatacccttcatcgttttcgttgcacgaaatgatgaatctgcctacttcaaatccatcttcttatggaaacctcccatcacaaaacggttttaatccatctacttattccttcaccgattgtctccaaagttctccagcagcgtatgaatctctacttcagaaaacttttggtctttctccctcttcctcagaggttttcaattcttcgatcgatcaagaaccgaaccgtgatgttactaatgacgtaatcaatggtggtgcatgcaacgagactgaaactagggtttctccttctaattcttcctctagtgaggctgatcaccccggtgaagattccggtaagagccggaggaaacgagagttagtcggtgaagaagatcaaatttccaaaaaagtgtaagtcataactctataggaacttttatgcaaaacattgaacatcatttgatctcttcgtttaggaatttagtctagcatgtgtattaattttatagtgtattatttttcagtgggaaaacgaaaaagactgaggtgaagaaacaaagagagccacgagtctcgtttatgactaaaagtgaagttgatcatcttgaagatggttatagatggagaaaatacggccaaaaggctgtaaaaaatagcccttatccaaggtaactaaactttccctttttattttttgaaattgctaggcttgtgaaaatttgtgtttagaaaaatgcgaccattatagtgtaactgataatagccaatggaaacgaaaataggagttactatagatgtacaacacaaaagtgcaacgtgaagaaacgagtggagagatcgttccaagatccaacggttgtgattacaacttacgagggtcaacacaaccacccgattccgactaatcttcgaggaagttctgccgcggctgctatgttctccgcagacctcatgactccaagaagctttgcacatgatatgtttaggacggcagcttatactaacggcggttctgtggcggcggctttggattatggatatggacaaagtggttatggtagtgtgaattcaaaccctagttctcaccaagtgtatcatcaagggggtgagtatgagctcttgagggagatttttccttcaattttctttaagcaagagccttgatcgatcattgttataactacatatattatatatattgagagagagaggtagagaaaaaaaaaacttatatgtaacttaagatcttattttgtctctcttatttgcatgtacatattttttcatgaaagaatgagacagttgggcttgcttatatatttgatgatgtttaatgtgttaccgttggatacatattttcgcttccattttgtgaaattatattttcttcttttggttagttttttacattatgatattatgctgtgtaatttgtactatcatatgtagaagcgaaaaagacataactctagctaggagcctacgattgatctcccaaatgttgattataatatatacatatgcttttgggaaacttaagtattaaattgacaagttcaaatggtcaacttcttactgatttatatcttaataatcaaaaattacaaaaaaaagttacaagctcatatgtgatgaagaaattagaatcggaaatttaatgtaagggtgttgatataaaaggttcaagttgtagacgacgaatatctatgtgtgtgaacaagtaaagaaaaaacaaaacaagttgagatctaaccttgtgtcctaagagaatggacccgaataaaagatttgactgcttctgctttctatcttatccacacacacatggaaacatagactgtggaccaataatattacccctaccatcaaaactgaaaacaatgttttaattcaaaaaacgaaaaataaaaagaaaatactaaacaataataaaattatatatcaaatctcagatttataaagagtgaatgaattacaaaaaaaatttgaaggaacgagaaggatgcgaagaagaaccttagaaaaagatctctttatatattaacttgtaaatgtgtttgtgcaaatgaaagtataggcaacaaagtaatagtggattctctatatataagtattttatgaggaacaagaggaccaaatttctgaattaataagcaatactattatttgggagcgcatttgtgtcatataccaaagtcattgaatttagctgaaacttgaaatcatgagatgaacgagtcatgagatcatagaacatgtggatttctgaaatttcaacatgcgcgctccaatgtaacttcagtttcctatttgaaaactattcttaaattttgaaattcaactgatatgtccaatctcgaatcttttcattatcaattatcatactcaatttgtattaaatcacttcaaatacagtagtttttttttttttagtttaaagacgtttcttaaaggttttaaatgttatgacacattcacaattatcatcactggtaaaatttgcattggagtgttcttggaaaacattctttcaatatagtcataaaattacgtttgacatataattcttacaaacctaaggtatattcgcaaaaatgttatagcaactttgagaaaacatattaaatatatacataaatcctttctatgttctagattttgactaaatatgtacatghttttgactgaagaatgatttggcctacacagataactattaaaatgatcatataccaagtcaaatcatatattgaatcatacgggaaatccatttgacacaaatctgtattagatggaacatttattttagtattttcatattattttgcttataaaaagaaatctcggtgataatgattttggttttgttttcggggtcgttatcaaattcacctaacaaaaacaaaaaaggaagccagaatgttagaaagagaagcaaagttataaaagatcttccgggagaatcaagtaattgccaaaccccctagtccctagacaactacaatcatatgacaaacattatattattttagaaaatacatacaaaagctccgtttttaaattgaaaaataagcttatatctaaagaaagatcaatttattacgtcaattttaagaagaattttaagcatattctaatggtggaatatcatctttcaaatacttcccaaacaccaaatctaggcatcgaaaccgttgtggacgtgtagatatcatttgtaatctattgccaatgaccgattgattgtatcatcatcaaaatgaaaaatgcgtggatattgtaaaaataaaaattttagttgacaaactcatgtcatgcgacataactcattgggtcaggcaaaatactacattcgaatccaaatctggcaattatagctagcactattccttgtatcaaaccggtaataaagctagaggtaaagttggcaaacatagatagtttataaacaactatgctttcggatatcattggtcttctttttgacttacattcatattatataatgttgttgcaagtatatgatatgtttcgaatgaaaagaaaaaaagtttcgaatgaccaatcttctcttctcgatcaataattggattttgctggtaaatgaattatttactatatatcttctttgatacgtctcttcttatttaaatgacataaaacaaatacaataatccaaattttaggcacgtcaacattattaactcttaagtggacataaataatctcactcttgacggtctttcaaaggtattgtattagcatgaaattctatattaattcttaacatttacctttatcttgtttttgttcctaagaacgttttctaaaattctccaaaatgggcccaaaagtatgaaatccaaattgagcccaaagttgtgatccagtgaaacgataaagctctcacgaggttcaagctcccacaagctcagatcgtgggcggtaaaagaaacggttaactaattgtaaaaaatgatttttttttttctacttcactaaaatattacagttttttttagcaaaagtaaaagtttcgagaaactctgaaaaagcagttttcaatcttaggagcagtgtatgtgtcatgtacatcgagatggagaattttcgttacctgaaatttttcttcttcttcatctttgtaatattatctccttctgaagcaggaaatatagtagacaaaagctctgttttccttgttgatgtccgtagctttggtgctcgagctaatgaccacagagaccacaccaaggtttttttcaaacaacattagatctgtgttttttgtttttgtttttggtagattcatctgtttagttacaataaatcagctaataacttgatgttttaaaaggcctttgtagcagcatgggacaaagcatgcaaatcatcttcaagctctgtgaatcttataatcccaagaggtgaattctctgttggttctctcagattctctggtccttgcactaatgtatccaatctcactgtccgagttaaggtagttttatcaacactctccaaaatctgtctttgttgcgttgtgtgcttgatttaatgctttctttctgtccacgtaactgaaattagggtcatctcaaggcatcaactgatctgtcaaagtatagatcaggcggtggttggattcagtttggatggatcaatggcttaactcttaccggaggtggaacatttgacggtcaaggcgctttagcttggccgtttaataactgtacttctgattctaactgcaaactccttccaactgtgagattaactctacaaacattgaatttgatcttaaggttttctccttttttaaagtatattaattgatttcagagcttgaagtttgtggggatgaacagaacagttgtgagaaggataagctcagtgaatagcaagttctttcatatagcattagtagaatgcagagacttcaaagggacaagactcaacatcactgctccttctgatagtccaaatacagatggtatacatatcgaacgcagttcgaatgtgtatttctcgcgttcacatatcgcaactggagatgattgtgtctcgataggacaaggaaattctcagattacaatcacaagtatcaaatgtggaccaggacatggtatcaggtaaaaatataacagaaccgcttcttttttttggtctgtttctgctgttgagtttattaaacggtttgatttcttgcgtttcaagcgttgggagtttagggagatatccaaatgagaaagatgttaatggactggtggtgaaggattgcaagataagcggtacgacgaatgggataaggatcaaaacttgggctaattctcctggtctaagtgctgctaccaacatgacttttgagaatattattatgaacaatgtgactaatccaatcatcattgatcagtcttattgtcctttctcttcttgcatttcaaatgtgagtcttctttaacactcaaataagatttttttactgaaatgggtatgagagatttgtttttgatatattttgttgttgtaggtaccttcaaaggttgagctgagtgagatatacttcaagaatataagagggacatcatcttcactggtcgcggtgcagctgcattgtagcagaggaatgccatgtaaaaaagtgtacttagagaatgttcatcttgatctttcttcgtctgatggaggaagaaaacagagtagtaacagaggaaatgaagctgtctcttcttcttgtagaaacgttagagctaattacattgggactcaaatcccacctccatgtcactaatcatcatcatcatcattactatcgtcaattcatcattttgaagtttatctagtacttaaacttttgtgctttctttttggacacgttatcttcatatggtcatattaagtttgctacttttgttgtctatagataaagtgctactacgctaaggaatatttttggctaaataataaaagaaatatgacaagaaaaaactggttggtaataaaaatttaaatttggttcgtgtttaacggttgataatactggttggtaagtttgatacttttgtctatagataacttgctagtaccctaaggatttgttttggctaaatataaaatatggcaagaaaattctggttggtaataaaatttggttcgtttaaagataggatcctacaaaaatggaggagatgattcattccaagagtgccatttaacaattcacgggaaatggttagtaggacaaattataacgatatatgtagtacttataattttaaaaactgaaatcttaatgtaaactaatactaactttatttattaaagaataatatatgcatacgcatttgcctgttatataagtaagcaacaccatctttatttgttccctgacatatttctccttcaggtttctatgatggaactagaatcagaaactcaagaactccatcttcacgtaaatggcggtaagtattgtaacagaaattccggcgtagagattcttgtgttcttcttcttttacttatgttcttgttctgtttcatgtgttgatggtagaacctgaagggaaattttcaacagaagagagaagtcacaagtactcttggaggttaagagtgtctctctatgtcactctcctcttagctggagagacaatagccactctcttaggtagactttactacgaaaaaggcggtaaaagcacatggctcgaaaccttggttcagcttgtagggtttcctttaacccttccttgctattattacttaaagcctgagccgtccaagactaaaaccattaccaaaaaaactacttcttccttcttgacactatctttagtgtatattggacttggcttgcttgttgctggacattgtattttgtactcatttgggctactttaccttcctgtctcaactttctctttgatctctgcgtcgcaattggcttttaacgccgtcttctcttacttcctaaactcacaaaaaatcacaccatttatactcaattcacttgttctcttaaccatatcttctacacttcttgttatccaacatgaaccagaatctccctcttctacttcaaagtccgcagccaagtccaagtatgtgattggatacatctgcgcggtcggtagctcagctggttattctctggtgctttctttaacagattacgcgttcgaaaagattctaaagaaatacacattcaaggctattttagacatggccacatatccgtctatggtagctacttgtgtagttgtggtaggactttttggaagtggtgggtggaaaaagctgagtacagaaatggaagagtttcaactagggaaaagctcatacattttgataaacatcggttcaacgatatcatggcaagcttgtttgattggaagtgttggtttgattatcgaagtttcatcgcttttttccaatgtcataagcactctttgtttaccagttgtgcctgttcttgctgttgtcttcttccgtgatgagatgagtggaatcaagttggttgcaatgtttttggccatctggggatttgtttcttatggttatcagcattatgtcaatgatagaaagccagaagaagaccaagagcttcctcagtctaaagaagaagaagaacaaaaacaagtagataccattcatgtccaagcttaggcaaagatccaagaaaaccaaaagcttttgtaatttgaaccagtttaatctaaaataaaaatgagttatatatattgtaggcactacaaataaaattggtaagtgtctcaaggtctcacagtcttcatgtatctttgttgacttctgaatccaagtcaagtgtacttatggccttcccgtcttgttgtatcgttgttgacttccaaatccacaaaatagattactaacataacaaaaacaagtaataatttttttttttcaagtggacggacacttgagccaataagattagaataagatacaacaatatcaagcgtctatatatctgttttcaccaaactcagcctactttaacaacgttgtgtataagaagttttcttaaaaccgccaattaaaaggtttcaataattcaaagtcaacggtaaacatctttacagaaatatgatgcacttgttcccaccaaccttcatatatataaaagctttaccaaaactctgtttgtgggaagtcctcttagagtggtcatggaaataactcaagtaatctatgtcaatggtaagcaagatgcatctcgtagtgtagattacttgattcttttcgctaacctgttgtttttgatgttttcagatcataacaacatagaagcaaacctaacaggtcaggaggaaatgaataccaccatggaaatcgaatcttcgtccgtacctcaatcgaagaactataagaaatggcttcgtatttccatttacgtgttctttgtccttgcttgccaagcactttctacaattttgggcagagtttactatgaaaatggtgggaagagtacatggatgggaacacttgtccaactaatcggcttccctgttctgtttctcttccgcttcttttcccaaaccaaaaatcccaaaccaacagaagcagatttcagaaagttctcttccttcaccattcttggatcagtttacatcgttactggactattagtgtctgctaactcttatatgtcctctgttggtttactatacttaccagtttctactttctccctcatcttggcctcacaattggccttcactgccttcttctcatattttctaaactcgcagaagttcacacctttcattgtgaattctctgtttctccttactatttcctctgccctcctcgtggtcaacactgattcggaaaacacagcaaaagtgtctagagtaaaatatgtgatagggataatatgtaccattggtgcttctgctgggattggattgctgctatccctggtacaactgatcctcaggaaggttttaaagaagcaaacattctcaacggtcactgacttggtcgcttaccaatctctagttgcaagctgtgtggttctcataggacttttcgcaagcggggagtggaaaactttaacaagtgagatggaaaactacaaactggggaaagtgccatacgttatgactttggcctcgatagctatttcctggcaagtctacaccattggcgtcgtgggactgatctttgagtcatcttctgtgttctccaattccataactgctgtgggattgcctatagttccagttgtagcagtgattgttttccatgataaaatgaacgcgtcaaagatcttctccatcattttagctatctggggattcatttcatttgtctatcagcactacctcgacgaaaagaagttgaagactagccacacaagtcctgtaggagatcctcatctactacctgctgaggaaggtcacacaaacatacatagtgtatgatcaaaacatatttccagtgtaaagccaatgtatctttgtacagtttgagcatagatataaaaacgtgtatctctagtcaatcataagtaactgataagttttgtacataagataccaatagttcggatcttttttacttctatataccggagatacccataacttaaagatgcaaatgcaatactctgctttgtcattttgcaatgcatttgaatcaccaaaaaacaagagcaaacatcgatagcagagaggcaaataggctaaagcatccttggaaaaccagagctttgaacaaaaaaaaagaaacaagtgaacaaaaataatacccacttacctggaagccactgacataacaaataaccaatgtagtgacttgaacagtgccttgtaaaaagactccttaaaataccaaaaacgtatactccaggagcttggattcttgtatctttgttgacttctgattaaacgtcagtagacactgagaaaataaaaaaaattctcgtagagccgccattcaaaagtttcaagaattccacaagtcaagtgtaagcaaataagaaaagtcaccggtcaacatgag

SEQ ID NO: 592 - DNA, 82697 bp, Arabidopsis thaliana
aacatataaattaatttgcataggaaaaaattacacaacttaaattgagattagttaagaaacaagaaaaaacaaagttgatagaaaaataaaagtattaacacgactttggattcacacacgtaccattgaattatatctcaatacacttttacttaattaacttatttccaaaccaagtagccaaaatcatattattcttctctctcttccttttttgagtttcaaaatgcataaatacgagaacgagagacgaagaccaaattaaagtccaagcaccaatctagacctcttaggaaaaaaacctaaaaacctaatccccaaacctaaaaggcttatctcatctcttcttctttgtcttctttactctttttttacctctctcttcattgttcttcaccatgtctaatgaaaccagagatctctacaactaccaatacccttcatcgttttcgttgcacgaaatgatgaatctgcctacttcaaatccatcttcttatggaaacctcccatcacaaaacggttttaatccatctacttattccttcaccgattgtctccaaagttctccagcagcgtatgaatctctacttcagaaaacttttggtctttctccctcttcctcagaggttttcaattcttcgatcgatcaagaaccgaaccgtgatgttactaatgacgtaatcaatggtggtgcatgcaacgagactgaaactagggtttctccttctaattcttcctctagtgaggctgatcaccccggtgaagattccggtaagagccggaggaaacgagagttagtcggtgaagaagatcaaatttccaaaaaagtgtaagtcataactctataggaacttttatgcaaaacattgaacatcatttgatctcttcgtttaggaatttagtctagcatgtgtattaattttatagtgtattatttttcagtgggaaaacgaaaaagactgaggtgaagaaacaaagagagccacgagtctcgtttatgactaaaagtgaagttgatcatcttgaagatggttatagatggagaaaatacggccaaaaggctgtaaaaaatagcccttatccaaggtaactaaactttccctttttattttttgaaattgctaggcttgtgaaaatttgtgtttagaaaaatgcgaccattatagtgtaactgataatagccaatggaaacgaaaataggagttactatagatgtacaacacaaaagtgcaacgtgaagaaacgagtggagagatcgttccaagatccaacggttgtgattacaacttacgagggtcaacacaaccacccgattccgactaatcttcgaggaagttctgccgcggctgctatgttctccgcagacctcatgactccaagaagctttgcacatgatatgtttaggacggcagcttatactaacggcggttctgtggcggcggctttggattatggatatggacaaagtggttatggtagtgtgaattcaaaccctagttctcaccaagtgtatcatcaagggggtgagtatgagctcttgagggagatttttccttcaattttctttaagcaagagccttgatcgatcattgttataactacatatattatatatattgagagagagaggtagagaaaaaaaaaacttatatgtaacttaagatcttattttgtctctcttatttgcatgtacatattttttcatgaaagaatgagacagttgggcttgcttatatatttgatgatgtttaatgtgttaccgttggatacatattttcgcttccattttgtgaaattatattttcttcttttggttagttttttacattatgatattatgctgtgtaatttgtactatcatatgtagaagcgaaaaagacataactctagctaggagcctacgattgatctcccaaatgttgattataatatatacatatgcttttgggaaacttaagtattaaattgacaagttcaaatggtcaacttcttactgatttatatcttaataatcaaaaattacaaaaaaaagttacaagctcatatgtgatgaagaaattagaatcggaaatttaatgtaagggtgttgatataaaaggttcaagttgtagacgacgaatatctatgtgtgtgaacaagtaaagaaaaaacaaaacaagttgagatctaaccttgtgtcctaagagaatggacccgaataaaagatttgactgcttctgctttctatcttatccacacacacatggaaacatagactgtggaccaataatattacccctaccatcaaaactgaaaacaatgttttaattcaaaaaacgaaaaataaaaagaaaatactaaacaataataaaattatatatcaaatctcagatttataaagagtgaatgaattacaaaaaaaatttgaaggaacgagaaggatgcgaagaagaaccttagaaaaagatctctttatatattaacttgtaaatgtgtttgtgcaaatgaaagtataggcaacaaagtaatagtggattctctatatataagtattttatgaggaacaagaggaccaaatttctgaattaataagcaatactattatttgggagcgcatttgtgtcatataccaaagtcattgaatttagctgaaacttgaaatcatgagatgaacgagtcatgagatcatagaacatgtggatttctgaaatttcaacatgcgcgctccaatgtaacttcagtttcctatttgaaaactattcttaaattttgaaattcaactgatatgtccaatctcgaatcttttcattatcaattatcatactcaatttgtattaaatcacttcaaatacagtagtttttttttttttagtttaaagacgtttcttaaaggttttaaatgttatgacacattcacaattatcatcactggtaaaatttgcattggagtgttcttggaaaacattctttcaatatagtcataaaattacgtttgacatataattcttacaaacctaaggtatattcgcaaaaatgttatagcaactttgagaaaacatattaaatatatacataaatcctttctatgttctagattttgactaaatatgtacatgttttgactgaagaatgatttggcctacacagataactattaaaatgatcatataccaagtcaaatcatatattgaatcatacgggaaatccatttgacacaaatctgtattagatggaacatttattttagtattttcatattattttgcttataaaaagaaatctcggtgataatgattttggttttgttttcggggtcgttatcaaattcacctaacaaaaacaaaaaaggaagccagaatgttagaaagagaagcaaagttataaaagatcttccgggagaatcaagtaattgccaaaccccctagtccctagacaactacaatcatatgacaaacattatattattttagaaaatacatacaaaagctccgtttttaaattgaaaaataagcttatatctaaagaaagatcaatttattacgtcaattttaagaagaattttaagcatattctaatggtggaatatcatctttcaaatacttcccaaacaccaaatctaggcatcgaaaccgttgtggacgtgtagatatcatttgtaatctattgccaatgaccgattgattgtatcatcatcaaaatgaaaaatgcgtggatattgtaaaaataaaaattttagttgacaaactcatgtcatgcgacataactcattgggtcaggcaaaatactacattcgaatccaaatctggcaattatagctagcactattccttgtatcaaaccggtaataaagctagaggtaaagttggcaaacatagatagtttataaacaactatgctttcggatatcattggtcttctttttgacttacattcatattatataatgttgttgcaagtatatgatatgtttcgaatgaaaagaaaaaaagtttcgaatgaccaatcttctcttctcgatcaataattggattttgctggtaaatgaattatttactatatatcttctttgatacgtctcttcttatttaaatgacataaaacaaatacaataatccaaattttaggcacgtcaacattattaactcttaagtggacataaataatctcactcttgacggtctttcaaaggtattgtattagcatgaaattctatattaattcttaacatttacctttatcttgtttttgttcctaagaacgttttctaaaattctccaaaatgggcccaaaagtatgaaatccaaattgagcccaaagttgtgatccagtgaaacgataaagctctcacgaggttcaagctcccacaagctcagatcgtgggcggtaaaagaaacggttaactaattgtaaaaaatgatttttttttttctacttcactaaaatattacagttttttttagcaaaagtaaaagtttcgagaaactctgaaaaagcagttttcaatcttaggagcagtgtatgtgtcatgtacatcgagatggagaattttcgttacctgaaatttttcttcttcttcatctttgtaatattatctccttctgaagcaggaaatatagtagacaaaagctctgttttccttgttgatgtccgtagctttggtgctcgagctaatgaccacagagaccacaccaaggtttttttcaaacaacattagatctgtgttttttgtttttgtttttggtagattcatctgtttagttacaataaatcagctaataacttgatgttttaaaaggcctttgtagcagcatgggacaaagcatgcaaatcatcttcaagctctgtgaatcttataatcccaagaggtgaattctctgttggttctctcagattctctggtccttgcactaatgtatccaatctcactgtccgagttaaggtagttttatcaacactctccaaaatctgtctttgttgcgttgtgtgcttgatttaatgctttctttctgtccacgtaactgaaattagggtcatctcaaggcatcaactgatctgtcaaagtatagatcaggcggtggttggattcagtttggatggatcaatggcttaactcttaccggaggtggaacatttgacggtcaaggcgctttagcttggccgtttaataactgtacttctgattctaactgcaaactccttccaactgtgagattaactctacaaacattgaatttgatcttaaggttttctccttttttaaagtatattaattgatttcagagcttgaagtttgtggggatgaacagaacagttgtgagaaggataagctcagtgaatagcaagttctttcatatagcattagtagaatgcagagacttcaaagggacaagactcaacatcactgctccttctgatagtccaaatacagatggtatacatatcgaacgcagttcgaatgtgtatttctcgcgttcacatatcgcaactggagatgattgtgtctcgataggacaaggaaattctcagattacaatcacaagtatcaaatgtggaccaggacatggtatcaggtaaaaatataacagaaccgcttcttttttttggtctgtttctgctgttgagtttattaaacggtttgatttcttgcgtttcaagcgttgggagtttagggagatatccaaatgagaaagatgttaatggactggtggtgaaggattgcaagataagcggtacgacgaatgggataaggatcaaaacttgggctaattctcctggtctaagtgctgctaccaacatgacttttgagaatattattatgaacaatgtgactaatccaatcatcattgatcagtcttattgtcctttctcttcttgcatttcaaatgtgagtcttctttaacactcaaataagatttttttactgaaatgggtatgagagatttgtttttgatatattttgttgttgtaggtaccttcaaaggttgagctgagtgagatatacttcaagaatataagagggacatcatcttcactggtcgcggtgcagctgcattgtagcagaggaatgccatgtaaaaaagtgtacttagagaatgttcatcttgatctttcttcgtctgatggaggaagaaaacagagtagtaacagaggaaatgaagctgtctcttcttcttgtagaaacgttagagctaattacattgggactcaaatcccacctccatgtcactaatcatcatcatcatcattactatcgtcaattcatcattttgaagtttatctagtacttaaacttttgtgctttctttttggacacgttatcttcatatggtcatattaagtttgctacttttgttgtctatagataaagtgctactacgctaaggaatatttttggctaaataataaaagaaatatgacaagaaaaaactggttggtaataaaaatttaaatttggttcgtgtttaacggttgataatactggttggtaagtttgatacttttgtctatagataacttgctagtaccctaaggatttgttttggctaaatataaaatatggcaagaaaattctggttggtaataaaatttggttcgtttaaagataggatcctacaaaaatggaggagatgattcattccaagagtgccatttaacaattcacgggaaatggttagtaggacaaattataacgatatatgtagtacttataattttaaaaactgaaatcttaatgtaaactaatactaactttatttattaaagaataatatatgcatacgcatttgcctgttatataagtaagcaacaccatctttatttgttccctgacatatttctccttcaggtttctatgatggaactagaatcagaaactcaagaactccatcttcacgtaaatggcggtaagtattgtaacagaaattccggcgtagagattcttgtgttcttcttcttttacttatgttcttgttctgtttcatgtgttgatggtagaacctgaagggaaattttcaacagaagagagaagtcacaagtactcttggaggttaagagtgtctctctatgtcactctcctcttagctggagagacaatagccactctcttaggtagactttactacgaaaaaggcggtaaaagcacatggctcgaaaccttggttcagcttgtagggtttcctttaacccttccttgctattattacttaaagcctgagccgtccaagactaaaaccattaccaaaaaaactacttcttccttcttgacactatctttagtgtatattggacttggcttgcttgttgctggacattgtattttgtactcatttgggctactttaccttcctgtctcaactttctctttgatctctgcgtcgcaattggcttttaacgccgtcttctcttacttcctaaactcacaaaaaatcacaccatttatactcaattcacttgttctcttaaccatatcttctacacttcttgttatccaacatgaaccagaatctccctcttctacttcaaagtccgcagccaagtccaagtatgtgattggatacatctgcgcggtcggtagctcagctggttattctctggtgctttctttaacagattacgcgttcgaaaagattctaaagaaatacacattcaaggctattttagacatggccacatatccgtctatggtagctacttgtgtagttgtggtaggactttttggaagtggtgggtggaaaaagctgagtacagaaatggaagagtttcaactagggaaaagctcatacattttgataaacatcggttcaacgatatcatggcaagcttgtttgattggaagtgttggtttgattatcgaagtttcatcgcttttttccaatgtcataagcactctttgtttaccagttgtgcctgttcttgctgttgtcttcttccgtgatgagatgagtggaatcaagttggttgcaatgtttttggccatctggggatttgtttcttatggttatcagcattatgtcaatgatagaaagccagaagaagaccaagagcttcctcagtctaaagaagaagaagaacaaaaacaagtagataccattcatgtccaagcttaggcaaagatccaagaaaaccaaaagcttttgtaatttgaaccagtttaatctaaaataaaaatgagttatatatattgtaggcactacaaataaaattggtaagtgtctcaaggtctcacagtcttcatgtatctttgttgacttctgaatccaagtcaagtgtacttatggccttcccgtcttgttgtatcgttgttgacttccaaatccacaaaatagattactaacataacaaaaacaagtaataatttttttttttcaagtggacggacacttgagccaataagattagaataagatacaacaatatcaagcgtctatatatctgttttcaccaaactcagcctactttaacaacgttgtgtataagaagttttcttaaaaccgccaattaaaaggtttcaataattcaaagtcaacggtaaacatctttacagaaatatgatgcacttgttcccaccaaccttcatatatataaaagctttaccaaaactctgtttgtgggaagtcctcttagagtggtcatggaaataactcaagtaatctatgtcaatggtaagcaagatgcatctcgtagtgtagattacttgattcttttcgctaacctgttgtttttgatgttttcagatcataacaacatagaagcaaacctaacaggtcaggaggaaatgaataccaccatggaaatcgaatcttcgtccgtacctcaatcgaagaactataagaaatggcttcgtatttccatttacgtgttctttgtccttgcttgccaagcactttctacaattttgggcagagtttactatgaaaatggtgggaagagtacatggatgggaacacttgtccaactaatcggcttccctgttctgtttctcttccgcttcttttcccaaaccaaaaatcccaaaccaacagaagcagatttcagaaagttctcttccttcaccattcttggatcagtttacatcgttactggactattagtgtctgctaactcttatatgtcctctgttggtttactatacttaccagtttctactttctccctcatcttggcctcacaattggccttcactgccttcttctcatattttctaaactcgcagaagttcacacctttcattgtgaattctctgtttctccttactatttcctctgccctcctcgtggtcaacactgattcggaaaacacagcaaaagtgtctagagtaaaatatgtgatagggataatatgtaccattggtgcttctgctgggattggattgctgctatccctggtacaactgatcctcaggaaggttttaaagaagcaaacattctcaacggtcactgacttggtcgcttaccaatctctagttgcaagctgtgtggttctcataggacttttcgcaagcggggagtggaaaactttaacaagtgagatggaaaactacaaactggggaaagtgccatacgttatgactttggcctcgatagctatttcctggcaagtctacaccattggcgtcgtgggactgatctttgagtcatcttctgtgttctccaattccataactgctgtgggattgcctatagttccagttgtagcagtgattgttttccatgataaaatgaacgcgtcaaagatcttctccatcattttagctatctggggattcatttcatttgtctatcagcactacctcgacgaaaagaagttgaagactagccacacaagtcctgtaggagatcctcatctactacctgctgaggaaggtcacacaaacatacatagtgtatgatcaaaacatatttccagtgtaaagccaatgtatctttgtacagtttgagcatagatataaaaacgtgtatctctagtcaatcataagtaactgataagttttgtacataagataccaatagttcggatcttttttacttctatataccggagatacccataacttaaagatgcaaatgcaatactctgctttgtcattttgcaatgcatttgaatcaccaaaaaacaagagcaaacatcgatagcagagaggcaaataggctaaagcatccttggaaaaccagagctttgaacaaaaaaaaagaaacaagtgaacaaaaataatacccacttacctggaagccactgacataacaaataaccaatgtagtgacttgaacagtgccttgtaaaaagactccttaaaataccaaaaacgtatactccaggagcttggattcttgtatctttgttgacttctgattaaacgtcagtagacactgagaaaataaaaaaaattctcgtagagccgccattcaaaagtttcaagaattccacaagtcaagtgtaagcaaataagaaaagtcaccggtcaacatgagactactaaataatgatactgctactgtcatctatcgcctgccccatccatataatacgatttactaaaagcctgccatgtttgataatgcaacttgtgtagggtatttagatgtttttttgtaataccatcaatgtgtgtttaaagaaaggcctcttgtgtatctgcacgacatctcaaacaaaaccaatcaataaaaacaagaaacaatcttctttctcatggacagatctcaagaacactatgccaatggtaagaagaagcacctgataaagttagatccttgaattcattttttcatgagatataataaacatgagtgttaatttttcaggtgaccagaacttagaagcaaaccttatagatcatgaggtggtaactgaatcatcatcatcagctgtgcctcaaaccgagaactataaaaggtggcttcgtgtctccatatacgtaatctttgtcctcttttgccagccactagctacaattctgggtagattgtactatgaaaatggaggaaatagcacatatgtggtaacacttcttcaactcattggcttccctgtactggttctgttccgcttcttttctcgaatcaggcaacccaaatcaacagatacaaatttcagtcagtccccttccttcaccacccttgcatcggtttacttgtgcactggactgctagtgtccgcttatgcttatttgtctgcagtagggttgctctacttaccagtctctactttctccctcatcttggcctcacagttggccttcactgcctttttctcatatttccttaactcgcaaaagttcactcctttgatagtcagttctttgcttctcctcactgtatcctctgctcttcttgtggtcaacactgattcagaaaactcaactaatgtatctagagtacagtatgtgatcgggttcatatgtaccatcggtgcttccgctgggattggactgttactatctctgatacaaatgctcttcaggaaagttttcacgaagcatacatcctcagcagtcacggacttggccatttaccagtctctagttgcgagttgtgtagttctcataggactttttgcaagtggagagtgggaaactttgccaagtgagatgagaaactacaaactcgggaaagtgtcatatgttttgactttagcctcggcagctatttcctggcaagtctacactcttggtcttgtgggattgatcttcgagtcatcctctgtgttctccaattccataacagctgtgggattgcctatagttccagttgcggcagtgatagttttccatgatagaatggacgcatcaaaaatcttctccattattttagctatctgcggcttcctttcattcgtctatcagcactacctcgacgaaaagaagttgaatactagccacacaagtgctgtaggagatcttcatctacctgttgaggaaggtcacacaaacatacaaagtgtgtgatcaaagcatatttccagtataaagccaatgtatctttctttttttcccctcaaaggccaaagccaatgtatctttgtacagtttgagcataaaaaacgtgtaacgctactttgcaaactagtcagtcataatagctaataagttttgtacatatgataccaataatttcagaatatttttcttctatatataccaataagttttcttaaagatgcaaatgcaatactctgctttgtaattttgcaatgcatttgaaacaccgaatcaagagcaaacaacgaagtcagagagacaaataggctaaaacagagctttgagcaaaaaaaaaaaacaagtgaacagatataatacccacttacttggaagccactgacataacagataaacaatgtagtgacttgcaacaaaactccttaaaataccaaaaacgtatactctaggagcttggcttcttgtatctttgttgacttctgatttaacgtcaatagacactgaggaaaaagagttctcttagagccgccattcaaaagttttaagaattttaagtcaagtgtaagcaaataagaaaggtcaatggtcagcatgagactactaaattatgatactgctgtcatctatcacctgacccatctttattattatacacaaattagtaaaagtctgccaagtttgattagtgcaacttgtatctggggtatttagttactataataaatatcattttgtgtataaagaaaggtctcttctgtatctaaaagacatatcaaacgaaagaaatcaataaacacaatattctttcttccaaattttctcatttctcatgggcatatctcaagtacactattgcaatggtaagcaaaaggtacctgatgacgttagatcatttgatcctctttcgatgaaatataataaccacgagtgttaatttttcaggtgaccagaacttagaagcaaaccttctagatcatgaggaaactgaatcattttcagtacctcaaacgaagaactgtaagaggtggctccgtgtctccatatacgcaatctttgtcatcttctgccaaccacttgctacagttctgggtagactgtactatgaaaatggagggaaaagcacatatgtggtaacacttcttcaactcattggcttccctgtactgattctcttccgcttcttttctcgaatcaggcaacccaaatcaacagatacaaatttcagtcagtccccttccttcaccacccttgcatcggtttacttgtgcactggactgctagtgtctgcttatgcttatttgtctgcagttgggttgctttacttaccagtctctactttctccctcatcttggcctcacagttggccttcactgcctttttctcatatttccttaactcgcaaaagttcactcctttgatagtcaattctttgtttctccttacggtttcctctgccctcctcgtggtcaacactgattcagaaaacacaacaaatgtatctagagtacaatatgtgattgggttcatctgtaccattggtgcttccgctgggattggattggtactatctctgatacaactgctcttcaggaaagttttcacgaagcatacatcctcagcagtcctggacttggccaattaccagtctctagttgcaacttgtgtggtactcataggactgtttgcaagtggagagtggagaactctgccaagtgagatgagaaactacaaactggggaaagtgtcatatatcttgactttggcctcagcagctattttctggcaagtatacactgttggttgtgtgggattaatcttcgagtcttcttctgtgttctccaattccataactgctgtgggactgcctatagttccagttgtagcagtgatagttttccatgataagatggatgcatcaaagattttctccatcattttagctatctggggcttcctttcatttgtctatcagcactacctcgacgaaaagaagttgaagacttgccagacaaaacctgttgaggaagaaacacaaactttatgaaacaagttgtatcgaaggtctcagaaacaaacatacatagttgtacacagtcatgtaaataacctatataaagcttgtatgtgtaatatccgtaatggtccatgcaaatgggatatgtatgtcgctcatatttcaggtatttagaacttttattcaaaagagtattgtgtaatacgagcagagtgataaaagcagtcatttatttaacagaaaaaccatgtcaattttgtgatactttcattgtgtgagtgtgaaacccgataaaaattgaccagttagcataacttacagatatgtcaatgcaatattctcctttctagttttgaaatgcacctaaatcttgggaaacaagaacaaacagcaaatcatgtataatgagagatagaagataatttgtcagattggtccaacatccttggggaaacagagctttgaacaaaaagtaaatgaccagaaataataccattttatatagcgacttcctctgccgtccagtattaagttgttgcgaatgtcttctcttgaaaagataggcgagacataatctttagctaacgtcagcatcatcttgatggcaaaaacttcatgactagccatggaaaccgaagtgtgtacccaatccaaataaatttaaaaagacaaataacttttagaaatgtcgtcctcatcaagatcacagaatactacaacttgtgtacacgttcatacatatgcgtatgcgtgttaagtttctatttgtctatgcgtatggggttcatgtcctccacatagttgcagaagaaagtctgaatgaatattgcctacacataatttcctcctagacttaactcatctcttggtcaacaatagaggcatctttgcatgtagaaagactacagatactaaattcatggaaagagaagagatatggttggcatttactgaatgtggggccaagaacaaagaaaacttagacggtgaccgattcctaatcccagaatatataacttagcatatctcacccatatcaaaggagcaatcacttggtagcattatcaaccaagagaattgataataagatacgttagttcctccttgtccatctccaaggtggtgattccacatccaccatgacggcggatcaagaactacaaatcattggtgagtaagcataaaccagtttgtggtgaacgtcctattctttcatcttcaaaaaaaaaaaagatggttatgatattttataattcaatatatgaaacgatcgacaacaaataaactaatttttgcgttattttcactcacttaccagttcggcagggaaaagaaccaaatccaacagttcaagatgaaagaaattcagtcagtagcagccaagcagaagtatctcactctaacacatacaaacggtggctcagggtgactttatatacattctttgtcatttcaggccaaacagttgctacaattttgggcagagtatactatgacaacggaggaaacagtaaatggctagcaacggtagttcaacttgttggctttcctgtgctacttccatattatatcttgtcatttaaaacacatgcaacaactgatagagatggaaaaagaacctcacctaggaaccgtgtattggtttacgtagtgcttggacttcttgtaggagcagattgctatctgtactccattggacttctttacttacccgtttctacctattccctgatctgtgcatctcagttagccttcaatgctttcttctcttattttcttaactcacaaaaacttacccctatcattttaaattctcttttcctcctaactatatcttccaccctacttgcattcaataatgaggagacagactccacaaaagttacaaaaggagagtatgtcaaaggtttcatatgcaccgttgctgcgtctgctggttatggtctagtcttatccctacaacagctagcctttctaaaagtcctaaagaagcaaaatttctcagaagttatggatatgataatctacgtgagtctagtggccagttgtgttagcgtggtggggctttttgctagcagtgagtggaaaactttgagcagtgaaatggataactacaaacatgggaaggtatcctacattatgaacctagtgtggacagctgttacctggcaggtattctccatcggtggcacaggactgatcttcgagctctcctctctattctcaaatgcaataagcgttttgggactcccagtggttcctatcttggctgtaatcattttccatgacaaaatgaatgggttaaaggtgatttctatgatcctagctatttggggtttcacttcctatgtctaccaacaatatcttgatgacaaaaacttgaagaaaaatcatgaaatcacaacaacagaatcccctgacccaccagaagcagaagagtcaacttggcaatcaaaataagctgatattttgaaagatgctgtcccgcagtttacagactcaatcaatctagttaagtaaacttactttacttatcggcctggaggcatcctacattgaagaatacacaatacatttttgatgcaactaatgtaaagtctcagcttgaaattttttgcatcattgtaacaggaagtagatttcatttaaataagtagtgaatgactttggtttagtttcaattacgattacccaaattacattgtaatctcagtgaaccaacaatcttaagtttagaacagctgattacaaaagttcatcgtttaaacttgggttcatagcagctaaagattaaatgtaactcaaccctgtatgtaacaagaacctgtaggcagattgataaaagtagatatttatttaataaaaaaccatgtcaattttgtgagtgtgacacctgataaaaattaacccttagccataacttaaaaagatttcaatgcactattccactttctagttttacctgaaacattgtgaaacaaggacacacagaaaatcatttctaatgaagaaagaagaaatattaatcagacaggtccaaacatccttggtgaaacagagctttgtacaaaaagtaaatgaccagaaataataccatttggcagtctccatcttagcagttaataaagtgacttcctctgccatccaatattgtggtgcaaatgtcttcttttgaaaagagaagcgagacatcatctccataaatgtgtttctaatccacatgcctgatctcataagagaaagatagtcagacggaacaagccaaagaaattaaagaagacgaataactttcaaaatagacatcctgacggtcatacaatcttacaacttgtgtgcatgcgtgttaagtttgtgtctatgcatatggctgatgtgtcacacaggtataaaatactgagtgactaatggctacacatcatttccttcttgatttgactcgactcatctctagatcaacaatagtgacaaaagaaattaaattcacagcaagagaagatatacagttggcatttactgaatgtggggacaagtacaatcaaaacatagacgatgaccgattcctaatctctaaatatatagctacagcgtgtctcacccatatcacagaagcaatcacttggtagcactagtaaccaagcaatttgataataagatacctaatacttagaatctattcagaacattgttagtacctccttgtccatctcgaaggagggggattccacatctactatgaagggggatcaagaagtacaagtcattggtgagtaagcataaaccagttcctcgagaacctactggtcttttatcttcaaataaaagacgaaaaatatggttatggtatcttattattcaatatatcaatatttttcatgtgtgacaacaaataagtcataatctaatttcttgcgttattttccatcactcaccagttcagcagggaaaagaaccaattccaacagatcaagacgaaagaagttcggtcagtggcagccaaacaaaactatctcactctaatacatacaaacggtggctccgggttgctatctatacattctttgtcatttcaggccaatcagttgctacaattctgggcagactatactatgaaaatggaggaaacagcaaatggctagcaacggtagttcagcttgtaggctttcctattctacttccatatcatctcttgtcagtcaaaacacatacaacaactcagagagatggcaaattaacctcacttaggaaccgtgcattagtttacatagtgcttggacttcttgtaggagcagcttgctacctatattccattggactgctttacctacctgtttctaccctttccctgatctgtgcatcacagttagccttcaccgctttcttctcttatttactcaactcacaaaaacttactcctatcattttgaattctcttttcctcctcactatatcttccaccctccttgcatttaataacgaggaatcagattccaaaaaagttacaaaaggagagtatgtcaaaggtttcgtatgcaccgttggtgcatctgctgggtttggtctactcttatccctacaacagctagcctttcgtaaagttttaaagaagcaaactttctcagaagttataaatatgataatctacatgagtctagtggccagttgtgttagcgtggtggggctttttgctagtagcgagtggaaaactttgagcagtgaaatggaaaactacaaacttgggaaggtatcctatgtcatgaacctagtgtggacagctgttacctggcaggtattctccatcggttgcacaggactgatcttcgagctttcctccctattctcaaatgcaataagcgctttgggactccccgtggttcctatcctggctgtcatcattttccatgacaaaatgaacggcttaaaggtgatttctatgattctagctatttggggtttcgtatcctatgtctaccaacaatatcttgatgaaacaaacttgaagaaaagtaatgaaataccaacaacagaatcccctgaccgaccagaagcagaagggtcaagtgagcaatcaaaataagctgttacttcaaagattgtggcacacacagtttacagactaaagcgagctgatcaagtaaacttacttttctttattggtatgaaggcagcctacaatgaaaaataaacataatagatttgtgatgcgactcaagtgaagtcacagcctgaaaatgtgtgcatcattgtaacatgaagtatattttatttaaatatatgttgtgcacgattctggtttagtttggaataagatgaccaaaatcacattataagctcactgaaatagcattaagtcattaacaaagtcaaaacagctgattacaaaaattcattgtttaaaactcaatcctgcatataaagagaaggtgtacactatgtagctttctaagtttttgtaatatatctaggtgtaagtagagttccaatcagcttacatcaggcacccaacatagtgagcccgaggatacttcttatgcagttgtggccattgaacaaagaattgatcagctattctcaacttgtaaagcaacaatccacttaatgagagctttttcactcttgctacactctcaacataaaagattgatgaccatctaattcccagcacctgtaacccaagatgaaacaagcacttatgggaattctagatgtaatggagaaaccatgactaagaataaacaaaacacatcctctgtttttggtcacaagtccattcaaggtcatccaaaatgtagaggaaagaactgcaaagaatcttgataaaatatttccgaagtgtgtataccttgaataaaaaggcgatcacacacagaggaatacaggtcccaggaccattgcaaagaatctgaaaaacttcaaccaaatctaatcaataacctgattcaaatggtttaataaagaacccttgaagaaagtctaaaaagcattcagataaaaatcataccacttgtggtctgatccggatcattagccacagagcgtgaagaatagcaacaatggtagtccaaacagaagtcacataagactgaccaacttcacgactccggtaaatttgcatgaactgtgatgatgcttccttaacagcaggctatgccacagtcataccaagcaaaaaacacacaagaaataagtaataagcaatagcaaaattcaaagaggagggacaaaactcaaacgaaattgaatttaaggatttttaactaaaccttctcagctagagaatcttcaaaactacgagctttctggagactcatgttatctgtagcagcagcaatgtaaaaccttggtgtaaatctatccttccgcaaaacagagaggagactcaacatctctgctgtgtgtccccctggtgattaacaaaaaccccacaataacatatcataatatgcagcacattacttagatccaattgaagaagacactgcattaactcttcttaccagaaccaagaacaataagagtagtaaaagactgtgaagctccttttggaagtggtttgccacatcggtatataacatacagtacacgaaccattagaagaacgatcgccaaaataatcaataaaccaatgctgaattttgaggccatccttgagtaaacacagttgcaaccttcctccatgatcgtacttccttttgagatctaaaacgtcaaaatccaagcgtaatggagaaacaactcaaaatcagatcacaaacaaaacgaatcgtcaaaatcgagctcgaaattagacaaaaaaacgaaattgaagattcaacacggcgattataaggtgggaagaaacaaaataaaaaactcaccggcgacggagaatcccggcggtgacgggaacgtaaaggattagagaattgaattttattggttacggtgtgtcttctttttaccaccgttcgatttggatattgcttagaatacacgtggcgtaaccacgtgacttttatctttgggtggacctgcaaacatgtaattccttcccaattttttattttaaaatcttaaaaagatactaagaactgatgaagaagatattgtacaccagtcggtacttagaaaaaaaaaaatgagattttttcacaaaacctccattgaagcaacttttgtagctttcttcgtttaggtatctaattaaacatgacgacgaagctatcgagcttctgtttcttaacccatggattagcaggaatctcctgcgagagagaacatggaagttctcgtcgatttttctatctcccttctcgtcgattagtttctacttcgtgtaagatgcgacaacaacgtggtttcgagtgagttttttttttttgtcgatttctgtgttggggtttgagaatttatgtaccaattcgattgatttatgtaacttggcatttttgaattttgcattataaagttttgtttttctcagctttagagttatggtgaatgctcatagatgtgaacgtgtttataattatcttgatttagattcatttgtatgagtttggagaggactatgagaattaaaactctgattttacttagtgatgagatcaaaatgttgcatttgatttttgatatgaatccaatttttgttaaagctagcctctttgtagcttaagttcctttcatttcccatttgatttgcattacaccaagtcaaaaaaaatctgatatcttgactaatttgcagctctagtaaaagacaagaggtcaagaaaggctcccctaaaccgatcctatctataaattcaggtcttcagagcaacaatgatgaggaatctgatctggagaatggttctgcggacagtgtcccgagtcttaagtcagatgctgaaaagggtagtagtattcatggcagcatagatatgaatcatgctgatgagaatcttgaaaagaaagatgatatacaaacaactgaagttactcggcgcaagagtaaaactgcaaagaagaaaggggagagtattcatgctacgattgatattggacatgatgatgggaagaatttagataatattactgtgcctgaggttgcaaaagctttggtatggatttctttttagtgttaatggtatatcgtaactctcttcttctgaaaaaggccttcttttgatcacttattgtaaatcattttttcagtcccttaacaaaagtgaaggcgagcagatttcagatggacagtttggggaactaatgacaatgataagaagtgcagaaaaaagtagaaattttcttatctgtattagttatgtttgtttcctgatcttgtgaaagcctttgttaattcctgatgtcttattgtgtcagatattcttcggcttgatgaagcacgggccactgctcttgacgaccttaacaagattcttagtgataaggaagcgttgcagggagaaatcaatgtcttggaaatgaaattgtctgagactgatgaaaggattaaaactgctgctcaagagaaagcacatgtagagcttctggaagaacagttagagaagcttcgtcatgaaatgatctcccctatagaaagtgatggttatgttctagctcttagcaaagagcttgaaacattgaagctggagaatctatctttgagaaacgatatagaaatgcttaagtcagaacttgacagtgttaaagataccggtgaacgtgtggttgtgttggaaaaggagtgctccggtttggaatcttctgtaaaggatttggaatctaagttatcggtttctcaggaagatgtctcgcagctttctactcttaaaatcgaatgcactgatctatgggcgaaggtagagactctacagctgttgttagatagagctaccaaacaagcagagcaagcagttatagtgttacaacagaaccaagatctaagaaataaggtcgacaaaattgaggaatcacttaaagaagccaacgtttataaagaatcttcagagaaaattcaacagtacaatgagctaatgcaacataaggtgacattacttgaggagcggctcgaaaagtctgatgcagagatattctcatatgttcagttatatcaagaatcgataaaagaattccaggaaacacttgaaagtttgaaggaagaaagcaagaaaaaatcaagagatgaaccggttgatgatatgccttgggattattggagtcggttacttttaactgttgatggatggctgcttgaaaagaaaatagcaagcaacgatgctgacttactgagagacatggtatggaagaaagatcgaagaattcatgatacctatattgacgtcaaagataagaatgaacgtgatgccatctctgcatttctcaagcttgtctcatctccaacaaggttatcatcgtctattggaaatgcttttttttttttcagtttttaaagcttttgaaaaaagtaacctattttcttcatcttgtgttgattctagttcaggattgtatgtcgttcacattgcagctgagatggcacctgtagctaaggtgtgttcagctaaaccctcaaaaatatctcttgcttacatgttagattttccgaaatagaagcattgcatggtaaattttcaactttatccccattccaaatttccttctgtaatttctgtaggtgggaggtttgggagatgttgtggcaggtcttggtaaggcattgcaaagaaaaggtcatctggtggagattattcttcccaaatatgactgtatgcagtatgatcgcgtgcgtgacttaagggtaatattgttgtccaatatgatgaaaacaaaattataagcggactttaacttttaacgttttagttggtttgatttatttcactgcaggctttggatactgttgtggagtcatattttgatgggaagttatataaaaacaaaatctggattggcactgttgaaggtgaggagactttttcttttctcgtgtttgtgtcttttggttttcaaaatgatttgaagtttctctctattgacaggtttacctgtacatttcattgaacctcaacatccaagcaaattcttctggagaggacagttttatggagagcaagatgatttcagacgcttctcgtattttagccgagctgcactagagttgcttcttcagtccggcaaaaaacccgacatcatacattgtcatgactggcaaacagcttttgttgtacggcttgatcttattttgaagcagtaacgtaattcattttgtttaggatacatcttgaagctttcttttttttttttttttataacaggcgccgctgtattgggatctgtatgctccaaagggattagattctgcaagaatatgctttacatgtcataattttgagtatcaaggtaccgcgtctgcttcagaattgggatcttgcgggcttgatgttaaccagttaaatagaccagacagaatgcaggatcactcgtctggagatagagtcaatcctgttaaggtaaataatgatcacaaagccaatataaaccgtgagagaaataaattcgacattttactcttgttcatctctctttctccttttggtccagggcgctataattttctcaaacattgtaacaaccgtgtcccctacttatgcacaagaagttcgaacagctgaggtagaagaatttcctttggtaactttccaatgttaattaagtaaagctttcttactaaaatgtcttatgtatctacagggaggaaaaggactccattcaacactcaattttcactccaagaaattcattggaatcctcaacggcattgacacagattcatggaatcctgccaccgaccccttcctcaaggctcagttcaacgctaaagatctacaagggaaagaagaaaacaaacacgcccttagaaagcagcttggactttcttcagcggagtcaagacggcctttggtaacttaatgtttccgcgaatactgcgagagtcttgagcatacagattcagttaatttattacacatttattttggtataggttggttgcataacaagattagtaccacagaaaggagttcatctaatcagacatgccatatacagaacattagagttaggtggacaatttgtacttcttggttctagcccggttccacatattcaggtaacatcccggtcccttagatgctcttgatttcttctatttaatctccagtttcgtggttttgagctttgaggcattttgtttttttgtagagggaatttgaaggtattgaacaacagtttaaaagccatgatcatgtccggttgttactgaagtacgatgaagctctgtctcatacgatttacgcagcctccgatttgttcatcattccgtcaatttttgagccttgtggacttacacaggtaccatacaaaacatgatctttttttgtgtgcaaaacatgatctctagaaggaaatcgaaccagtggtgtgactaaatgtctgctaatatcattgtcggattctctctttgcacagatgatcgctatgagatatggctccattccaattgcgcgaaaaactggaggcttaaatgacaggtaaaaccaaaaacttaagaactgatctgatcttcagatgacattggtttcaaagatcatttcttttgtttcagtgtcttcgacattgatgatgatacaataccaacacagtttcaaaatggatttacatttcaaaccgcggacgaacaggtaatttcacgatgctctcatctttatcaatctttgctcatcatagctgaaaatagggatggaaatttatttagtttggttcagttttacatgtccgtctttagctgaaaaaggaaatgtgaaaaaacagggtttcaattatgcgttggagcgagcatttaatcactacaagaaagatgaagagaaatggatgagacttgtagagaaagtgatgagtatagatttcagctggggatcatcagctacacaatacgaagaactctacacgagatcagtgtccagagcaagagctgttcctaatcgcacgtgagtatcacatagctcctagagattctttcttgtaacacatttttataattttacttgttcataatagaaaaaaatatttgggagtttcaatcacattcaaatgatttatactccctttatttcatatgataataaatgttttgtacacattaaaaaaaaaaaatagtatttgttttgggctgatacttacacatgaataatgtaatcataaagatcaacaaaattaagtcatcaagaaaagaaaccaacaagaagatcccaacattttgacaacatccttttttctattacacaatatcttaaaccgcttccacagtatattggtaattcgaacgagtttttctctctaacaagctttgtgtcgagagtctagaagtctgttgactatcttcagaagtttcccaatccgttactacgtgtaaattcaagagaggcttaggtggaacctgtagagcttctagacgactgccctctaacatttcaacaacttttctcattggtggacgatcagatggattggtttgtatacaccacaaacccactaatgtcattctcttcactatcttctcttcttcttcttcttcgattatatgatcttctaatagtctcatggtttctttcctctcaagatcctcatagacccaatcaggaaagtacattgaacttttatcggtcgcagaagtttcaacttcttctcttttcgttgccccaatcatctcaagaaccaccattccataactatacacatctgacttatgcgaaactcctccatagttcttggaaaacatttcaggagcaatgtaccctactgtccctctcgcgtctaacattgatatgatactttctttctttttgcatagcttagcaagaccgaaatccgaaatcttcgggcataagtcttcgtctatgagtatattctgtggctttatatcgaaatgcacaatcttggatacacaactattgtgcaagtactcgagcccacgagcaacacctaccgcgatgttgtataatgttttccactctatctttgttgacatattctcggatataaacttgtcaagggatccattcggcatgaactcgtagataatagctctctggctcccttcatagcaaaatccaaaaagagaaacgatgttaacatgagaagctctactcatgctaactagttcattgatgaactcttctccattcccttttgactctttcaagatcttcagagcaatatctcggccgctggcatcgggtagttttcctttatagacagttccaaatcctcctttcccaataacatgatcaaacgagtttgtcatcttcttgactttttcaaagctataacgtttcaacatcacaaccgcttcaatgttctcgtcgttcaattcactctttcttttcgcatgcctcgctctcactactagcgcaatcacaacaatactgatcaacacaattaaagctgctgagcctcctggaagagaaaaaaaagaagcaaaacttaggtgtcatgtacatgataaatgatagggcggcaacagagatgtggttgcaatgaaggtggtaccaagtatcggttttaacttccgtagagaattatctgcgaaaatttcaaacaaaaactaggattaacattcatttaaaaaaaaataataataaagtgcatacatattataggatgaagaaaacaaaaataaacttacgttttggttgtggtagttgagccatcgagctgctggtattgttttccaatcaaataacacaattacatttatcagcttgcatccaaagcaaccaaaaatataaagtaccattatattacacaactataacctaaatcatgaaatgtatatatatttatcatttcaagaaaattttgggttggtgggtttccaaagaaaataaatatcaacgtctttacatagactacaaacgtcttttgatttttcgtctcccccaacttaaacaactacgcactagttgccatatgtgtgggcgtttcgataagatatataatcacaccactagcctctagttggctattttttataattgatagaagacaaaatgaaagaaaattcatagtaaatggccaaattgtatgtagtaacatgtcattttacatatatagtatgatgttttaagaaaagaaaaaaacaaacgtgaaaaaatgcactacattatttacgaaagtatcatcacttaattttgctaaaaatgactatctacctaacaaaaatatgtatcatatatatatagcttaggggaatttaattaccttgtggtgttgggaatggaggagggacaaaacgtgatcacgtaatcagttgaatttgtgcatgtgaaggtactgttattaccgctgaaggggtagctataagcggatgggcaagcacggtcgaagttctgtacgtacggtgtcggcttacaagtttgcttatacttgaagtaattagtgcaacaattctcatcggatgcggattgtcgacacgcacttttgcaggcgactaaacctctcctggagaattccttaagatcatttggacatgtcttgttcaagtcaaccatacaacctgagctgatacatgccgggtttgacggaacaaccgttagtggaaggttgtaaccgaactcgaggctgatgatatagctgttgatttgtccgtcatcgattctaaatatgacgtaagttacaggagaccatttgtaggtgccgggacactcgatctcgccggattcacagtctcccgtggcgcatgagaagtttcctgttgagtcattggagcaaagagtcctagctgagataagaccgtaccatgaagatggtgcgtttatggcacgttcctctccggtcttgagagtgaagccggtggtggaaacttgtgaccgccatgagaagatgactggccaaattgtgttgttgcatttgttttctatggttatgatactattggaaaacactcctaggaataaaataaagataagaaagaaaaataaatgatcagcaaatcaaagaatcgtcgaccaatctggtaaaaaatggtacctgatacgaacaagtgtgaagcaaggaggagaattaatggcgacctcttcgtcattggcttaaacgaaaaccaaaacgttccaaagagtgaatatatacgtactacaatacactttgtgttatatatgttttttcttgctttgtgcttcttcattgttggtcaatatggattggtatataaaagttcatagccaataaattaatcattaattaactataatttaaattttaaaatgaaaaaaattgacaactattataaaaaaaaagaaaagaaacagattttccaggaaattgtccacacagtgtggtcgcatttgttctctaatctccatggtaaggatatcatcgactctcatgttggtgtccggtttcggacatatcaacccaaccaaaatcccattaaacatcaaatatcaattatttgatttatattaaataacttttaataattagtatgaaatattatatgcatgcacatcataaatatcatctctaggttaaattctaattattgtaccctatctagtactgcctcatggaataagccattcatttactactttagaagatattgttctccatcttttgtggacagcatcagctaatttattaactgaaaagtccaacaatttcacctagtaatgcatccatatatctttttggggaaaaaaaagattgactagtcgaaattggaggcatgtaatgtttgacgtacgtagtcgtcccctggccccatcaaactagagacggaaagtgatatttatggaagtttctttgggcatgtgaaggtgttgttattatagtcaatggcactattggtatcatgatgcaaattgctttttatacatctagtttatatatgtttatagtatagactgtatagtaaattgcaaaggcttatttacctaagctttatcaacctttttgggatctttatcttttaagtttgaagaaatgtgtaaccttttttgtgagatctcgtcgttcatgtattataatgcaatgcaagtggaaataatataagtaggtggaacacaaattctttttataatttattaaagaaaggaaattacacacattgactcaaagaacatgtttcgattgactagtcgaagttggaacatatgattttttgacgtaatcaacccctagaaaaatggaaataaaagctcagaggggatatttattcaactctaattagttttgtttgaaggacaaaacgtgatgacgtagtcagtagagtttaggcatgtaacggtgctattgttatcatcataggcgtagatatgagcgagtgggcaagctcgctcaaagttctgcgtgtacactgtcggcttgcagttttgctttgacttgaagtctcgggtgcaacaagcctccggagtatcaaactccatgcacgtgctactacaggcgactagattttctctggacattttcataagatcttttggacaagtctttttcagttcaacaacgcaaccagcgctgatacatgtccggctacgctgtgaagggaccaccattagtggaaggttgtaaccgtactcaacactgatggtgtagctgttcattctaaagtagacataagtcaccggagcccaaccgtaattgccaggacactcgatcgtacccgattcgcagtctcctgtggcgcaagagaatgttcctgttgagtcgatggagcatagcgtcctagccgagataagaccgtaccatgaagatggcgcctgtagggctcgagcctcccctcttctgagagcaaagcctgttggggagacttgtgagtcaacgttccatgagaagataactggccaaactgtgtgattgcacttgttctctatggtaaggatactcatggacaacactcctgcgagcaacattaagcttagaaataagaaacaattaacaaaaaaccattgttattatcaatcaagaaaagaaaatcctacccgatactaaaaaatgtgaagtaaggaggaaaatcaatggcagccttttcgccattggctgctgaaagaaaaaaaaatatacgttccaaagaagtgaatttcgcgttataatttctcttgcttcttcctcgcttgttagtagaaattactagtacatattcgttggtgatgagagtcaatcaagaataaatagaaggaaggaaacagatagaggaaataaatgtaactacaatactatccttttcccaatccatatttttttccgggaacttgccaagaaagaagaggtattttatttttttctaaataattccatttagtggcaatgggaataagttttttcatgaaaaaagagaaaaaaaacgactgttttatcgaatgattttaccatttattaacagttatgggacaaacgatttactttcgtaacattttactagaaaaaaattaaaagagtttaaaatttcagatttagaatttagattttttaggtgtccgtttttaaatttttatctacctaattcacaaataaaatgatgggttgaggacttgaggtagaggctagcaaacaccaaagtcatttttttttttgttcccttttatctaatcactaagttaaataaattttatagaactagctagatacttacaaaaaaaataagattgaaacttgttgaggctaaaaagtattaaactcattgtcttctttttttttgttcctttttattcgctctaattttgatgattggccactcattaggctttcactatttgcgttgatcgttctactgaaacataacattatcaatttgaagagtgaagagtgaagactatgcacactctctatatcttagcatccaaaactgatcaaacatgggtaaaaggcttaagctcttctgttgtggaccaaaatcaaagttaaaccttacagttacgtaacaatattcgtttaggcaacaatctatgttatacttattttaaaaagttttttagtctctaaatcttataaaaagtctggaaaaaataaatctaaatgacaactgtgggatttgaacccacgccctttcggaccagagcctaaatctggcgccttagaccactcggccaaattgtcctttgtgtttgtattgagattagattttatatattatacttgaaagatccgcgtaattatataagttgccaagtcttattattattactaagcaatttaaaatctgtgggaaaatacttgccatgtctaagtggatgcaacaaatttgttataaggattatctattggtaactttgtatagaatctgttgattgacaacaatccacagtacataaatcgcttttaagagcatatggatacagcttcatcccttaatgatggcttacgtgttcttgttgcagccatattactcattcgggttcggtggacaactctgtcattgtcttctctgcgttcaggccgcaactcaaaatccaatagcttggcgaagcgaaaaatcaagttttttgttcatcttcttgttgttgttgttgagcctttagtttctcgagctgcttccgaagataagcttgtttgagtttctcccgacgatttgttgcttgctcttgtctcctttgctttaactcggttgccttttctctcgcttgattgacttcctcatgaacctccctacacaaaagattttcgataaacaataggcagaatcagagagagatattgattcacttcctaaaaaacagagtaaaatctataacaatggacttatttccttctatctacaagctattatcagacaactaattacctgaccatgcgcacgtgttgacctacatcagctgtcccaattgcatgtccaagtccagcaaatttggtgctaaaaagcgaaccatcatcttcaccatcttgcttgaaatcttcaggtggtgctgaaatggaactgttgtaagtgcttgatggttttggatcttcatgttgaattcctttcctaaagaagtcaacacagtacttctcttcaccttcttcatcagaaagctctcctctagcaagtttatcatacaactgagcctttttctccaatgcggcataactaactgctccatcttttacagctttgtgctcaagcttgtcccttcatttccaacatacaaaaccactgtcgtatataagaacaaactaaagtaaaattgatcctcatgaaagctaaacttgatgatcctatcatcttgatcctaagtaattctgaaccatagcaaaacactgaaactaatgaagatagttacacaatatcatacaacacagccaatttgacattcttctacatcataacataatcctaaaatcttacaagtttttttgcttaatcatctcagagcaatgtatctacttaagctacgaagtttgattactatctaatcttaatcagaacgatagacacgataactaaagatcaatagcctaatttacaagcaatctctatttcctaagaaaattatcatccaatcttaatctaaagaatatacacaataagggaatttcaaaccctaacccaaccctacttaccaaatgtgctcgtttcatcaaattgaaagcaataacaacaataaaaaccagaggaaggattcgaattcgatgaatttcagacttactttaaattgcgactttcgacgccggagtttttcgcggcgaaagaatctttggcggcaatcctttctttggcgcgatggtattgagcatcggatcccgtaaaatcctttgtctgtttagcttcctcctgagacttatagagctgagctttaagctccatgattgaggaaggaccaacaccttcgatggcgcgatgcttctttggcataatcgaagattccgttaaccatcctagcgattcagtgactactctcttcttcgtctcctcttcgcctaccattttgttctcctctctctctcgttctctacaaatctgtacaatacacgaatctacgaaggagagctttgaatctctctagtatgtgttcgatcgaagaagtttttgtaaacattccacccaaaattaaaaaataaatcggaagttaaattcatatcaattaatttgggctttattaatcactgttgggcctttcttcggttgattaggcccaaaattaatcccgcgtcatgtccaaccactcgcaagggaagtgtgtgacgtcaactcaccgaaaatttgtagactaagaaatccaacattgtttaaagatgatgatgttaacgaaacaaaagataagtactaaaacttttcctaatcaaatttcaccttcaaaatctaccaacaacatttttgagtactcgataaattgtatatgtttatcgcatgtatcatcgaccaaaataatatgctatcgtttatgatgttttttcgcaaatgaatgataaacatatgggttatgtaccacaatccttactttttttcatttcttttaccatgttaaacaaatgaactatccaaatactatacactgaaaggaagacaaaaaaaaacatgtacttacaagatccactacaaaaacaaaccgaagcaaaaccaaccgtatatatcattaaaaaaaatgtaggaaagaaacaaaaaatccttatataattgacatttcacaccaatcaaatcaatttaaacagattcacaagtgcattacttttgcgacaaggctgaggaaccatgaccttttgttcatgatcatttctcgttaccacttggatgctttggttatttcttccatttgtgttattattttgatgatccaattcgtcaagaacaactctttgcttttgaaaatgttcccatttgtcttgatatagatagaagaagacaagacaagtgacttgaactgtgaacaagattgtccaaagacttgagtctctacttaatgatgtcttcttttgataagcttgtatgcctgtgtatatgtttactatgccaactattgacactattgttccaagtatccaatgcaataagaaccatcttaacctccttttgctccctctacaatgaatccaatagaatcgtaacaagggtgaggcatatgtaaatatataggtacataaaaaagatgtatatgttacgtgtatatatatgtaccttgagggcttgaagacaccggtcaagaattggagccacatggcagcataaagagccaaaccaagtctttgatggttgttgtcaaaagagttctccaatgttcttaaagacagtatagctcctattgttgctaaaactactgccagtatctgcttattcaaaaaaaaaaaaaaaagataagtatttaagagttatggatatatattgatttaaggacttgctttatttactatatggatttgagtactatgtgtgtaagagtgtaatcatagtgtgtccttatagttcctttcccttaatattcaagaaatcatgatcaaagctatatagcaaattcaagaagcaattccttcataagctatctttttgaaattaatttcgatgcatgtatatctagctgttgaaattgagtaaatctaagactatgagtgcttgttgtttttcagtttttaaaaatcatatctcccttatctatcatatagttttatcccttaaatagcattttcgatattatatttatagtggagaaaatgattaaagtgagatcactgagatgtcatcatgagtttgaactaaagataaatttgtaaatagaaatacttttcatatctcaaaatttgaaaatgatacaaaattctcaacaacaaaaaaaatacaccgtttacatcatagaaatatgtatggagtggctaaaaataattaatttacctggaaaatgacatgaaggtagaagaacactttaacttttattccattttcatgagctttattggccattctaatgaagagaatccccactggcataagaaagcccatggaaacccataagagaatgccatgaagctttatgctatttatcatttgatgactcaactgccatataaatttaagataaatatgtgtaaatttagaattatagtagtaaaaaacgtaaaatgtatagtattgtaatatataaacgacgaaaaaagagtaatatataagtttttattattgaagaaacaagaaacaattacgaaaccataaaatgcaagaagtaataccttatcttgttctagggatcctttagtcttgagattgcttggtgaatggttatcaatggtgacttcaagagatgagcaaatcacaaatggtggagcagaagtaagatagaagagaatagaaatcataacactccagagagatttggagattttcattctgatctcaatctcaatagtaattaatcacacacacacacacaaagaatctcaaagcacacaaaccactctctaaatttccctatatatctctctctctctaaatcagttcatcagttctatgaactagacaaaactcatgaaatatatacacatgacatgcatgaaatatataagtatgtgagatggaagagggagatagacaaatagagaggatgcatgtgatggctggtgcaaaagaggcttttaatggaatgatttgaaggtttactaattaaagaaatgatattcaatttgatcatggaggagggatgggccaaattcaaaatgatcattattataatgttaattttccttgatgttataaattcaatcaccaaatccaagataccatccaacataatcatgatcataatataacaagtcaaaaagttttttttttgtttcaagtaaaaaaatattatctgcttggggattttcatgtaattgtattatgatcacatccctgttctccttgataacttaatatatgcacacacatatatgtgtatgctaatacagactcacacaccactcacatgtgagatttttgactttatgtgttaccaaagggaataaataagtaataattttagcttttcaatttggtctcataggcaatcaaataatccacttgttcttggctccaatgatgaaatttatgcataatatgctcatagatctgttataactaatcatttatagaacaagagagttaattgatctcattatgtaatcttcgtatcatcaatgagttaattttcacagtaatattttagatgtagccacatcattaattagtaactacatattcgatgtattgcatgaaacaagggcaacctcagcttggcaaaacaaaaatttaagaaaaaaggagagaagaaattaacatttagagagaatgtggtcatacatcttttcaatgttatttttcatcaaaaaatttaagtgcattttagtaataaaacgaattgtaatagaaacaaatgtctttgacaaaaataataataataataaaagaaaaatatgaaagtaaagatgattatgtagaactaataattttgtaataacatgttcgaataactaattatttattttgtattttgtgtcaattcttaattttcatgtatttgtcttttgactattccaaagtttttatggtttcgttagaatcttgatggattaaggtttaagaagtgataatctctgtcagatctcgagaattgcgaagataacaaaaggcaaacctaatttctattagggttgctttttacaaattcacattatatttcatgtctcgcggtggacttaacgatcatcgaaatgattacaaatgcatgggtaaaaaaaagtctctgattctatcgactaaaacactaacaaactatatataattgtacctaatgaaatttttggtagccagtctatttatatgaactttgttcctttactttttctctctttacttcactttgtcatcaaagttgagagaaaaacaagaaaagtgatctagatccattggaaatttttataaaagagtaggccttgatgaaaagttgaaaactacacaaattacggttaaatcacatcaataaaatttgctcgatcatttccagctcaagtttttaaaatatttgtttctttagactatagtaaaaagaaaacataacatcaagactgtttctttttttcttttatgtgtgctaaaacttaaaagcatcaagttggtaagagtagaataacacaatagcaaatctctagcatttctattattctagattgccaattaaaatcgtaaaaaaggttgaagattagagaaaataaaatggttatagcctataataaaatcttattgatgtgatttaaccgtaaaatttgtgtagcctactcttttataaaagtagtcgctataataaacattactctatttaaaagaattcaagaaaacaaaaattgggtagaggggaagcaaaaaagaaaaagaggcttatgcagaaataagacctatgtaagctgctgaaagagagagcaaagaggatattacatatgccatcgttactatcattggctcctttaaaccgtttagcctaaggtgatgatgaaacggtatagtcttgaatatccgacgcccttttccttttaaacgcttagttgtcgagtaatacacgacctgcatgccagaatacacatccatcatcaggggttgggattggggttgtgttgcgattgtgagttaagaaagatgttctatttttttacctgtataatgacagaagaagcttccaaaactgcgacaccagacgatatgaacaacgggaagaacattcctgagcaagcagccattgcagccaaagctccacctagagccaaggatcctgtatctcccatggaaactgatgctctgtatcgattgtgaagcagaaacccaaaacaagctccagccatcgaagctccaaatacagagagatctgatcgcgaatagacaatacattttgaaagtagtgagccacacacactatcttcacttggaatgcaatgctttctagatttgtgaatcttataaaggtgtaagtaaatgatttggtataatagttagggactcaccagagcaaataggaagaactgctattgccattgcaacaaaacacaaagcagcaatacctcccgccaatccatcgagaccatcggttgctttgactaagtttcccatggaaacaaagtaaaacgatgtcaacagtaggtaaagttttcccaagaaaacaagacctaatggtgaaggcaaggggaccaacattttcctggaaaaaaaattcagattcaagaagatggttatgtaaacttctgaaatactcaatttttcagacttttagaactctacaaagctaatttgtggactggtttgaatataatcatgtggattcttattctcaagtacattcatatgaaagtagatacgcgagttaccatcatatatgcgttgatcagattagttataagaggctatacatgccataaggagatgataagcttgcagtctccaaccaaaacgcaaagcaagtcccaacagctgcctgtgatggatgcagatggatcaagttaagaggatgaaaacgttgaaaatcacaagatacagatgaagaattagttaaaaaaaacctccaaaagaagttgtatctttgcagataaaccattattattctcactgtagaggcttaaggagtcatcaattagcccaatggctgcaaatgctacagttgcggctgctgctcccaagacttcgatggatgaaactttattcaaggctattgcaacaacaacaccaattggaacaaaaaacaacccacccattgtcgggattgttggtctgcggttatgtggaactggccctaatgtcctaattggctcatgcactctcagtctgtctagaagcggaacaaaaatataaccagctaaggtaactagaatcgccgatgtgaagaagggcatgcttaagaaatatggaggcaaaggtagtctaacaatcttccaagcaaaagagtccatcagtagaagcagcagtgacaaaaaagcaagaagccccaaattaatcccatatctgattctgcatattgcaaaaaaaagcaatgtcaaaacaaatgaaagtacttgttactacactttcatacacattctagtggataaaacgaaacatagagatggtggtaaatgatgcttaagagtagagaacagtctgtcataagactaacaactagaaagaatctctagggaacaaaacccagtctgctatgatagtaatcaaatgactcatagcctcctttcacttgatacctacacttcacttacatacacattctagtgggttcaacaaaaagtagagtcatggttaaaataaaacgtgcctgtgctttttgcgacctcttggaaactttcctagcttctgtgcagtagtttcggtaaccacattcaaagcataatccccatcgctctcttcgccttcactcgacgaaatagcataagtagcagcaaatatgtcaccggtatagaaatcaaatgtatcctaaggcaaaaagaaaagaaagaacaatataaactttgatgctagacatggttagtcaaaaaccaaaagtatgtcaaagaatgcaaataaatctgaaatggattttgaatacttacatcatcaaatgctttaaccgagacagagctatgtctctgcaagctcggcgcactgaactgcaatgaatccaaaatataaattagaaacgagaagaagctatcaaacacgagagtttatggattcgaagtttgtaaatacagaacgttgaacgcttctgccttctgccataggtatcatcaatcaatcaatctccggtgaagagaaaatttcggtaccttgaaagaagagggagatccagattcgatgcgataacgtgaatttgaaaggggaggaatcgattcaagagatcgaaacgggtttgggtaatgaaatcggtaagaagtcggagttaacaaggaacatctcatcgcatcgtttccggggacagtacagaaggttggtgatgaagagtaattgaatttagtgagagacgaagaagaaagaatgtggagaaacgtaaatggcgtcgttgatgaagaagaaacgatttgggtcaagctctctgtgggttatgtgattggtgactccggattttttatgtcgcaaacaaaaatatctgtatgaaattgaaatccaacaaatttattccctcattattcattagtctctaatatttggttagatgtcgtttttcttcgttagatgtcgttttaaggtcggcaatgtttaagtagaggctatttttgtcattcacgctacatctctatttcggtccatatggaaagcatcttggcgcgacaaaacaatccaaagcacaaacataacaacaagaacaataactatgagagtacacataaaatccaaactattatctttatatcaactcatcctctaattaggttatctaagtagtctctcatatatataggcattgttgggtaaacttcaaagttaacttaaagcccaagtagtctttaatgaggaggttaaagaataagaaaggcctagaagtttctattaggtttaggagttatctaaattctaattgtaaaaggattagcaaagttgtgccttatataaatacatctcttaagttgagttgtaacctcaagagttgtgagaacattaagagagctttggtgtttagtttttagagagttttctaatcatcaataaaagagagttattcttttaaagcttgttcttgtgttcttaagaaactttagtcatgtattgtgaacaatgtgattaacctatagagttgttgtaatttgaagcaactcccctcttttacatttcatgaaatcaaacctaaagtgttagtgttcttagtctttatgtgtgctctaattaataacatatatacatgcatgatcacctttcttcataaaccattctagttattgcatatagcaatttatttttgtagagcgccatttgaaaatacaatctctaaatccaattattcagttttattaatgaaagtagaaggctggtatagacatgtgaaaatatctcgttatttataaacatctccaacttgaaaaagaaaaaaggaaaaaaactttttagccactaacttgatcttgaatctaggtgcttctacaccaggagtggtttcctctcggagattatatgtaaaaggactattatactaataaatatatactttttcaatagttttgaaagaaatacttgagatttatttgagaatttatatttgaacagaaataaattctcaaatagtattgataaagcctttcacagtcacagaccccaaacccgaaacacatgaaaaagtcttcgaggtaggaattattatcttaactgccaacaacataattcaattactctttcagtggaaatctctggagagatagcgacagtttatatagaatgtgagctgccatttgtcaacaagtcacgataaatgtttcctttcaagaaatttataattcttctcaacattacttttttataattagtacagaagatgagaatagtactcattattatagtaaaaacatttcatacaataaatgcttgggaaattcgaaaacgttacctatacaacttatatagttatactatataacattgttattattattgaagaatacgatataaattttgacccaaataaggaaagggaaagaaaagaatgtccaaagagttagtggggttataataaaaatagcacaaagcatgagtggtgtgactcgttactaatactatggtcgatggaagccttaaaaaagataacacagaaaccgacattttaattctaaccctaaaatcggattctcacatgtctgaaaagagagacatctcacggattgtgtcactaacttcctctcctttttacttaaaagcatttttaattctttttggcattcacttgcagattttttttcattagattcatcacataataatgaatagtaaaataaatacgtgtctaatgcgtgttctcgtgttattgcgtctataaagtcttaacgagatgaggccttagagtaagaacttaaacagatatttcataaggaaaatgaagggtgagtttttcacattgatggcaataatgtctctcctcttagccttctcgttagtccatggaggaggagagtctggaacaccttctaatgcagccgctaccccgactagcccaaccgaaggatccagtggttcaagtggttcagctcatggacctaattggggatatagttggggatggggttcagccccgggaggtggttatggctatggttctggttcgggttcgtcaccagatggaggaggaaaaggggctggattcgggtttggttcggggtcaggttcaggaactggatttgggtctggctcgggaggaggaggagccacagacggtggttctggccatggaagtgggaccggacacgctggtgaaggcggtggctcaggaagtggaaatggtgaaggatctcctggtcgtagagagaggagccaacaccgctaaaagaagttttcttgttattattactaccttaacacaatcacacatgcgtaagatgataagactaaaagaaggaaaaagaaaaatactatagtagcatcttaattaattaatgcataaataaggaccaaaggaataagtagttgggctttaattaccgctgtactttgtaatataactaaacctataatatattgtgttcttgcgccaacctagtatgctaatatttaatactgaaagatgatgatcatatacaagtagtgaaaataaaatcttctctttaaagtggtatgctatatgatatgcaactagcaaatgaaggctggttaaaactctctgtacaaactgattattcaaagtgttaatgtaagtcgagaattaattccattccaaaccgaattttaacaggcctagtgttatggattgtgtaggattgccttaccaactcttgttacttcataatgaaaaaaccatatccagaaattttgtaacttgactcggtggtttttaaggaaactcttttatagtttgggccttggggctcaatgttttatatgtaaagactaaagagcccaaattgtatgatgttaaataaattgggtttaataaaattaattttcacaaggcccaatatgtatatgagccgagcctgtcaccaaatacagttaagttgttgcattcagccattcacagaacatcatggttctcactacaatcttttacgaattacctctcaatgccacacctgagcttaccatcagtaaatcagaatatggaatcctgaatttgaaactaaatcctgaatatgaaatctttagatatatttttctatttaatttggtgtgtgtttggcaaatattaaacaaagaaaaatacattctgttacgctatattcaaactcttcgtccctctttgctttatcgacgccaagagataattgatatatgttatgcatggacataaaacaatttgttaaagattttaaaaacttaaaattgcttcttttttctctatgagtattgactacccttttcataatgcctatagtcaagcgaaaaataattttaataatgattatatgaatttcgaggaatattaattaaatgtaagatcccatgccattttgttttttttgttaaacgtaagatcccatttcaaggaaatggaatagtaactaggcacatatattcacttgctaggctggggatagtcgaaatttaaaaggaaaacaacttttaagaaaaaaatttaatggaaagattcttggaacagtgggtttttgaggatttgtagttggagttgacaaccaaaaaaggattagtagttggagaaatgacaaaggatcgttgtttttgtctgcaaccatttgtatagaaacagagtaaagcagtagctaacttttggcaattgcgtatttactatgttttgattgatttgtgggataaattctcttacaaccatcatgccaaagttatattagctaaaataaaaataaaagctagattaatttataatttatgataattatcaaactaaatattggattaattaacatcatttagttaactacatatctaccaattattaagtaacttgtaaaaccatcaagtagaaacgtttcaaaattgtataaaaatttgttgatcgattacgactaactcaaatccaagtgatcaatgtataacataatgacgtgaaattcgaagattagtctataatttagatcatgaaaataaaatactattttcttcttctgacccttagaattttacccctttcacagaaatgaggttatcaaatttggagggttggaggcacagaatatggaaacatcaataatagatgcgaatgagcactttggtccccttcaagacttggatacacaccattttgcaatcacatggcactatatatgtattcatctctggaatatattagtatttacacactttcaaaaacaaaataaaataattaatgaaaaacgtaatctaagagaaacaattaatatcctgcaacgacctaaaattataaaccagatattatagctatgattgtttttattccataacaaaaaaaaaattacggtgtcattatgtgcgtaattttgagtttatccaaccatttcaatctcaagaatatgacacaacaacaccactgatattcacattacatttcccatttttgttctctaagaatcaaaccgctcacatattcaattgatatgacttacgaaagaaaaaaataatctataacgagtcgtctaaacatgtcatcattcaacaatacattcccactatagtctcatcgagtaatgcatgcacatgtgaaatgtatattcaaatcattatggcttaggaagtacaacttattcatttaatcctagcacatatttagatacaaatatacaatcatcaggcatcagctttcatacaacatttgtatgcgaaattaaaattgaagaatatataagaaaaaataattaacttcgaaacgatgcatgtaacattctgtttgtcaacaatatgcataatacaaatttaaaattgcatggtgatacaacgactatacctataacaaatcactagtttacatgtgataacctactatatagatgttacattgtcaccttgatttttttttttttttgagttacatatcttgatactgtctaacccaaaaatattgataacagtttgtttctttcacaaaaatggttttaagatatcaatatacaattttcgattttctatattcttgaataactaactttatcatttaattagataatcgaacctcttaaattaaaattcatataaattttcttaacaaatttttttacaaaattaggttgatcaaaatttacatgtctacgagaaatggcgagagaaattataaccataattttcagtttatataaaaatcctaccaatagcccgtgcgagcatttaaaaggagagaattggataatgagttcatatttggacaccactagccaacaatgtggaacaataaaggaaagttaaatttgcctcactgaaaagtaagtgtttttaacaaattggccacatttttttttctaaagaaagtaaataagacataaataagggaataatcaataattttatgcaactgcaacttcaccatcttgagattcaattggctgagctatattgggtccccattggtcctcggcctgttaatggaacatttgctctctctcccccctcgatttatatgcgtgacgcggtctatatcaagtacaaattcttttactctttgtgcatgtagaggataaatccactgcactgcatgatcaagactgttattgacatgatactactcttctagctagtatttagattattgatatattcttggttattaaccagttaaactaatcagaattagtcaatactaatattctaatgcacaaatgtaatagaatatgcaaacggataaaaaaaatcaacctgattatgagatgtttttgatatatatgagaatagattggtgtgattatgagatgtttttgatatatatgagaaggttttagggtcaaagcaaatgagttcttttccaaatgcaaaagtaatttaagtctacggcattggttttacttttagaaaaagcaaaactaatcttaacaactatagaaatactccaaaaccatatcaatgctatcaaatttgttcttgtataactttgatcaaaatatttgttagaagatagatgcagtaacaaatgtcatttttggtgcccctacaatatagttggtagacccaagtgttttgcaaaatcatcaaggacttttgataatgagagatttctcaatgctcatacatacatacgttttctctatctctttaaatattgagggatatactctttgattttggtcttcatttgtcaaatggtagattggaccaaatctgaaacctccacttccatacatctcatgttagagtcacatgaaactcgggccaaaaagaccatcatcatgagaaaacgaaaaaaacatatagctgacgaaaaataataatgagtaattcattggtcaagaacttacttataacaggcagcgacttaagtcactaaatttaattaattggtttggaacttgctaaatggagccgtagcaagaaaaaaaaaagaagaagagatttatcaacatactaatacattggtaaaaatgagaataatcaacaaatatgcattggtttactaatttgcttatatataagacctggcaacagatattatgatgactataatattaaaaaaacagatcaaaattagttttctgagcagaccataacatgcgaagagagaatctgaaagattttggcctagtggttctgagcataaaaaccggaaccaaaaaatgaaccgaaccaaatcgaaaatgggttcctgttcggttttggatactactaaatacccgaatgaatttcaatcacactatccactagataaaaataataaccggaccgaaccgaatatctatggatactcgaataatgtttggttgaccttctacaaacctacatctaagtccaatatgttttgtcctaacatttgtatgtaatctacaaacttacatctaggtccaagatatacgcacaatagaccgatagacgctctgaccttacgtacgttgtactttaaaaaattacatttgagaaagcttaaattaaggaggctacttaagacaaacatgcagtagactagcagtaacttaccccataaatctggaaaaaataataatcagtagatattactaaagtttgatatatctataagcttataaaatgaatgtataaatgtgttgaggaggaattttgtgctataaatgtaaaaatagtcaatcaactaattaggtatgaatgtttgttttttcaaaagtcgcatccgagagccgagagggtaataaactgctaaaagttctatgttaatgtttatgtactttatagtttttatggttattatatatttgaatttagtagagtatttataaattagtttaaaacactaagtataatcaatcaaacaacttttgatttaaaattatttatctatcatacttaagagatacacccagaaaaccaacctatctgggaaggggaagccgggaaaggtagttgtatttacttgtacttttttggtataatacctttactaaattacacgacgaacatgtgttatgaatctagacgatttcagtagatcttattcatgcactagtacttttattatttttattttttgtgtttaaggtatttttcatgtactagttagtacaattattaaacaaaattgtacaaataaaaggaaaaaagaatcattaaataaaaagacattaaaatctaaatttcaaatgattcatacaagtttccggaagataacattttaataaacgggttgcttgattatcaatattggtataaattttggtattctcatgaggaatctgaatcaaccttttgaaagaaaataaaattatgccgtccaattcattatgaatttgtattgttttatatgatatgtatactatacacactttttaatgataaccacttatggaaatggcatatattaagatcttccgcaactatggcgtaaagaattttgatgataaggagaaccaaaacagtatactgtataccatacatttctcattacatcaatataaaatcgtattttattcgaaaatattcgagctaatcaatactatatgacaagtcatttttgttgaattcaaagagtcaacttcattttaatgtcttttagcctacacatattagaatcgagtttgatcttcactttctaataccctttttatacatccatttacttttatttttctctttatatgatatcctttcaaaattatataagataaaagaatcatttcaaaagaaaaaatttggttaacataatgtggactataaagtatacacctggttctttctacatggatttgaatatgagggtttagatttaattataaaaaaaaaaaattagaaccataaactacaccacattgtcggtccattaattgtataatctctaaaataaagtatttacacattaaccaattcactaaaaaaacaataactaattcacaaaacatagatcattcatctttacacacgcatttcacaacttttgttctatacattgtaaaattgtatatttcattgatttgaggaagatatgatttcttattcctcatattttatatttcaaaagtagaataattgttggtgaagcaaatgttgttttcgaattttcatatttcaagatgggaatcaactatgaacttcactttctatcagctttttgtggtggatcggtttcgttctcatttctaagatgtttttgaagtttttttcagtaatttgtattcttcttccaacaaaatatagtgattccgtcgtaaacaattttttatttttttggtctctttgacaataacaagaaagagattcaaatacttggaagctaaaccaaattcagcaatcgagctgtcaagcattttcttttgggttgaaacagattgttccattcaaattactagagaactcgtgaacaaatttcctttttccggttccaaccaattttttcaattgtatatatattttgataaccggatttgaatccgagtatatgatctcttagtgttctcctacgtaaactgttttgttaagcgttcacaatcctccatatataaccataaatctttatgttaaaatataaactttggaagtgaatgcaacaaatttatattacaatataactaaaatacatgttgaaactattttaaacataatctattcatgtgtttactttctatatcacagttttaaattattttaataaaacgtaaattgtaatttctagaaaacatatcatttgaaatacaaaaatttgtcgacactattggtaaaaaaaaattatcttcagaaaaaaaaattcaaaattcatagttctataaaaccatgcaacttactatcatgtatagttcatatccaaaatgtattgttaagaaatgtattattattatattactataagttcttttaagaaatctaatttcttagaaagagtcaaagttttgtgatactcatgaactttatgttttttctcaaataatagttaagtctaataccgtcaacataggatcatatatagttcatacaaaatcaaaattcattgataaaaaatgttattatatttcaacataaagatcttttaatcaatgttccatttttaaaaagaatcaaatatttgctagatactcatgcatgaatttggctatacaaacatataagaaactaaacggaccacgtgaatatgaaggcctaacatagaagctttgaaggcagtaattaaggacacccttcatcattgtcctcaaggaccacttttacctcttgcctcttggctttatcttctaagatccaccaccaagattctctctttgcctttaatagttttatgtttctctgattttcttttcatttaattagggtattactaacaaaatccgagattagaagtattttcggttattcagattgtattgtgatttttttttaaacctaatgatgaacacaatcccatgatacaaagaatacgtatagtttgattactacaattagtcaattctttttgttctcgttattgttattggtatttgctagagttagagtgcttaaacggttcttcattcatatatatagttaacagatgacgaagacaaaaccaaactttagtttcttttcaatttcataccaaagtctcacatagtaggactgtgatcacaaggagttcattttgtcttcgactctaccacgatatcttaaactacataaatctaatcccgtgaggcataacctactaagcatatttcgagaaccaaataatgttatggttaacataaatatcattagtatgttaagatatttattactagggccatttttggtaagcagaactggcgatgcgaaaatataaaaaagaaatgaattttcacattaaaataaaataaataaaaaaataaaaaataaaaaaagatatttattactaattatcaaaatataatgacgcaatgttttttgttttttttaatgatgcaatgttatgagatgtataggtattgcttataagtttactaattatttgtcataagattaaagaattcgtacaaaaaagttggaagcagagagaaagcaaaatctacgttaaggcaaatttataaaacgcacgtgacataaatagcaatatacagacagtccatgcatgaaaccggaccgtgtatgttcgatactaaagctgtcatttggatcatagcttgtcatacttaattagaatgatcattttctacgttaaccagataattcaatttcgttcttaaatgggatgaatcatgatgacagaacaaagagaataaacccggtagattcgatcgctaaacctatatataggtgaataggggatacttactctaattatgattacgtacaaatatttctcatgataaggcaataaagctaaaaggtcagactaactacttcaacgaatctatatatgggtgctacagttacactaactctgattacagcgattgtatcatgataaaacaatataagtaaaagaccaaaacgaaaacgcaaagtgaatcctcttctctttttactcctataaaatttgaaagtaaattgattttaaaaattaaacattgactaatcacttacacgtccagatctgttgtctagtataagaccaccataaattaaccaacgttattatttttatattagaaatcaaaatcaaacatttgcaaaatatcggtttagtgttctctcagtcaaatagtcacaaatgcatgtcacctataatatgggttgcgacttctaagtcgaaaactgtgtttcccccattgaaaaataacgacaaaaaatattgaatcatttggacccaatgtctctttttgcatgtgcaagatttaaccgatttttgttgctttttcatcatatttaaccgattcttagaccgagtggtgggtttttttgtttgcaaacattcttgtatttcatttattttatctccaaaggatcaaagtttacaagatcttcaaccaagaggttggtacaataacttcaagaaagtgaaaacttacaacatgaaaagagaaagataagccatagagaattagagacagaggctaactagcagcatgccacaaacaaactcataaaccgagtggtggttatagttcagattaatagaaatttagataatgtgctacttccacagaaagaatggcaagcgaagagaattaaaatcagttcgatttttttaatttgttacgtcttcttttcttaaatattccaaatgttagttaaaccatctaaaaagatctgcaggcaaaatttgtctctagtgaaattttaaatttattaaggatatttctatgaaaaagcattatgaattaaggaaaaaatagaacatggtagtttttaacagaatgtaagtagtattctgattttatttttattttgtaaattttttataaaaaaaagaagaagagaaaaatatagacaaacatcatacgtaataatacttttcgatataatcttatttaagaaaatttccctaattgagaaaacattatcaccgaaattatagactataacatcatgtacgttttgattgttactagtactacttcaatcagtttccattataatttatagtgtgaaacagaatttgtttgtctgctttaactatctaattagtattttttttgttctttccatgtcgtgacagattctctgattggatgtttttttggtgtgtcaattcgctgattagatgtttacgcgtaattaaggattaatctttctaaattaaaatcaacgaacggtctatataagttttccaggtaaaacacacaatggcacaaaaaatatcaaacaaaacgtaaatcaagacactaaaagttaataataatcattatatataaataaaaaactaacctgaatcaaaaacaagaaacaacaaatgtggaactggaaacctatattggtccacgtgtcatcattacatattagctgtccaggtaaagaatctgagaattggttttcttgtagctaacatctttgttaaaccgctcaacattttagttttaccaaaagagaattcaattaagcagtgtttttcaaattattgtaaagtatttgatctacttaacgaatagtggaatatttacttgtatctttctcccttttggcccttacaaaattctattctgaccatcttttcttttttccccttacttggtccatttctagattcctgtaacaaaaacacctaaattttgccattaaatcacacatttgtgtcattgtgtggatgcatatatatatattagcctcaaatgctaagtaaatggatatcccaccacagtcacaatctcatcaagtccattaccacattccgtctttcttcttcttcctctctctatatttcaaatctttacttcctatcagaagcagaaactctgtaaaatctcaatgtctgccacttaattatacatcttaccaaacgtgaaactcgattcttatttcaccttcttaatcattttcttgtgtaagccttctttgtgggtttttgcagcattaatggtgcactaaagtttgtgcaaaacagttaaaaccttcccctgcaaagccaaaaacaaaaattcgtttttttcccttctccttttttagaaaacgataagaaatgggtcagggcaagttgatgttgtaaaagtcagaaccacaacgtgagagagagagagagagaaagaaagcaaaaaaagttcgttagcttgtgaaacttgtcacaagtttcatcactatatttataactaaccttatgttgaagagaaagcacctcaacacaagaccaatgtcaatctcttgtaccagaaacttcttcaaacgattctgcgtcgaagaatacaatatggatacattcaaacatagcagtttcctctctgctgatctcttaccatctcttggagctagaataaaccaatcaactaagctccgtaaacacatcatctctcctttcgatccacgtttcaggtgttgtatatatctttcttgcacattttcctcgttctgttctgttctgtttttgtgtttgttgtcttcttgagttatggcttaatgttgaattcaggggatgggagatgtggctggtcattcttgtgatttactcagcttggatttgtccatttgagtttgccttcatcacctacaagaaagacgcacttttcatcattgacaacattgtcaatggattctttgccattgacatcattctcaccttcttcgttgcttatctagacagccactcatatcttctagtcgacaaacctaagaaaatagctataaggtgaacaacaagtacataataaagacaatggtacggtttttacgtatttaagggaagcatcatttctcatttttattaatgagtatgttcttaggtacctttctacttggttcgcctttgatgtctgctcaacagctccattccagtcactgagtcttctgttcaaatacaatggaagtgaaataggattcagagttcttagtatgctcaggctctggcgtcttagacgagttagctcgctgtttgcaaggttcattttcaatactaaaccattttctttcaagtttagaagacttgccatatgaagaatcaacataaagcttactctctcatttttcctctgcttcaggcttgagaaagatatccgcttcaactatttctggacacgatgcacaaaactcatttcggtaagtctcaaaaacagaggaattctcatttcttttcatctataaatgctactagcttacaagttacaacgtatacttttatatatcaggtgacactgtttgcagtacattgtgctggatgcttcgcctacctcattgcagatcaatatcatgatccaacaaaaacatggattggagctgtctacccaaatttcaaggagacaagcgtatggagtagatatgttactgctctttactggtctattacgacattaacaacaacaggttatggagacttacatgctgagaacccaagagaaatgttgttctttgtgtttttcatgctcttcaacctcggtttcacatcttacctcataggaaatatgaccaaccttgtggttcactggactagccgcaccagaaactttgtaagttcaataacttttctttcgacttcacatcaatctcttataactataacctgcaaaaaaaaatatatatatatatatattcataggttaataagaaacctgattctttgaattaaacagagagatactgtaagagctgcttcagagtttgcatcaagaaaccaactcccaccaaacatacaagaccaaatgttatcacacatttgcttaaagtttaaaacagagggtctgaaacaacaagaagctttaaatggtttgccgaaagcaatccggtcaagcattgcaaactatctcttcttcccaatcgttcagaacgtctacctatttcacggagtttctcgcaacttcctatttcagttggtaaaacactcatttgttaactctttctttgtccatctctttctgttataatgttccataaagttaccaaccaactcgatatgctttttctgaccaaggtttcagatatagacgccgaatatttcccaccaagagaagatgtaatactacagaacgaagctcctactgacctctacatcctagtctcaggggcagtggtgagtgaatgaaatttaaaataaataattgtataggaatgttgaagttaccttctaacatgttttactcgctcatgtggtgattgtgcaggattttactgtctacgttggcgaagaagatcaggtatgtgaacaatatatatcaccaaaagaacttcactgtagaactcttagctgaaaaaagagaaatgactgtaatcctcacattcatgtaggttcaaggcaaggcggttgttggcgatgcatttggagagattggtgtgttatgctatacaccacaacctttcacagttaggacaacagaactatctcagatactacggataagcaaaaaatctctaatgagtgctatgcgagctcatgtcgaagatggacgagtcataatgaacaacctcttcatggtaagtaagaatgatataacatcctgggaactaattttatttcagagatgttttcacaatgatgttaatcaatacgaactcatttcatgatgatatatgtagaaacttagagggcaacaatcaatagcaattgatgatccaaattcagaaccagagtcacttctcaaggagtggcttgttggtggttcaaagacaggagaaggaaacgctagtgatcaaggacatgggcacaaatatttacaactgcatgattcagaaaatattgatatggggtcaactgaatggagagattcaagaagatctggttatggcgaaacgaaaagagttcgagaacatacgatagagatagaagaaggagaaaaaccaaataaagagtttgatggaaaaggttgctctgatgcagatcttacctcatttgaatttcattcacaggaagcatatccatattgcagatcaaacatccaaatcaaacaacatgaagctgcaaaaccaaaagataaaagagttaccatccacttgaagtcccgggacaaagatttgtcgaagctgataatccttcctgcttccatagaagagttgctaagacttgcaggtaagctcttttacttgttaattctctaagaaactactgaacataagaaggaagtaaagtaaactagaaaattatggtgcaggtgaaaaatttggatacagcttcacaaaggtcacgaatgcggaaaacgcagaaatagatgatgaagatgtgattagagatggtgatcatttgtatattctcatcaatgaaaactcttaacaagactttagtaaccactgttttctttccatagagtgtatatgtatatctgcaggcaatgtaatgttttttactagaaaaacatttgatcatcaaagaagatcctagagaacttataactggacaatgttaatccatcagaattctgaatttaacagagcatttcccgcgtaaacgtttacattcgagtttatatatattgggccttattgggcttagatgagtttaattactaataaatgagattaggcctagttaattataaaataaacattttttccccttaaaaaattgtatcaaagattttctcatgcgaggatttgattttgaagtctgtcgtgaatttttcatttcaatcgaatttgatcggagatatgggtgctcagaagaaacccgcggcggctaaggttcgtgaggattcagaggatctaagtcgtcaacgattacaagccattcttctagccgacagcttcaccactcaattccgttccataaccctagaacgaccaaaggtactattgccgatagtgaacatcccgatgattgattacactttagcatggctcgaatcagctgggatcgaagaggtttttgtgttctgttgtgctcattcgtcgcagatcatcgattacctgaagaaatcggaatggtacacacgcccaaacccaaacttgttggtgagaacgatagtgtctcacaattccaccagtgttggagatgctctgcgttatatctatgaacaacagacagagacgtcgcagattcaaggtgattttgttcttgttagtggtgatactgttagtaatatgccacttgctgatttgattcaacaacatagagataggaagaagaaagatgagaaagctatcatgactatggtttttaagaagcagtctagactaggaataggatctgatcaactctttgttgcagtagatcctttaacgaaacagcttcttcattacgaggaatgtaattcgagaggcggggacttttgcttagataagtccttgttggatagtactgttttatgcagtgatatgcaggattgttacattgacatttgttctcctgaggtgcttagtctctttgaggataactttgattatcagcatatgcgccgtcattttgttaatggtttgcttgttgatgatattatgggttacaagattttcactcatgagattcagtcgagttgttatgctgcaaggatcgacaatttacggagctatgacactgttagcaaggatataatccagaggtggacatacccgtacgtacctaatatcgatttcagcgggaatcgccctgtaaagctcgggagacgggggatataccgggcttctgatgcagttcaatcacacactgcagatgttggagcttccactgtcattggatatggcaccaaaattggtaatggaggtaaaatctataactctgttattgggaacggatgttgtattggatcaaatgtggtgatacaaggctcatacatatggaacaatgttacgattgaagatgggtgtgagataaggaacgctattgtctgtgatggtgtgaaagtcagagcaggagctgttctgcagcctggtgttgttttgtctttcagtgttgtagttgggcgggactttgttgtacctgcatattcaaaggtctctttacttcaacagccaactacagaagacagcgatgaagagctggaatatgctgatagtagcagcgggactgcagatcattcgtcaggcctaaataatttgcaaattgagtccaaagcatctgagcttggtcctgatggagcaggttacatctgggaaatatgtgacagcgctcatgatgaggagtggaaacattctgttgtaccaatccccatggataaacttgccgatatcactggggccatggacgatgatgacatagaggatgacattgttgtcccaccttctggagagttgaaatctgatactgatattattaacactgatgcaaatgattcctatggcgactttgagagagaggttgaagaagaattcttaagtgccgttgaaaaggataacaaagcggacattgtaattcctttgattaactcacaccggttggcgtacaacatggactctgcagattgtgctggagcagtattctactctatgatgagactggcagtaaagagtccacataattctgctactgaattgtacagaaacgcgatgggtgtcataactaaatggaagggagttcttgggttctatttaaagcaaactgatgcacagatagaagtgataatgaaattcgaagagatgtgtcaggaatctgaagagttgagccctttgtttgctaaacttctgccttttctgtatgacaaagacgtggtgcaagaagatgcgatcttgagatggggggaagagaaagcaggagcagacgattgtgacaaagtttatctgaataaatgtgagtcattcataaagtggctcaaggaagcatctgaggaggaagaagaagatagttagattggtaagcgtgactttcgataggttgcaatgtgatttcattatacagtctattttgtaaagtgataatttacatttaagatagtagtactctgttatttaactggcatcatcaacaatcttttgttaggtttgttgttgaatgagatatttcccataaatctatccatcaagggtttgttgtatacttgcatgtgcaagagatatgttgactaggctattaaaagaattcatacgaaacgttttgtagatagagtaaagttgatttaaatgtgagtctcaaacgaaacttaacttgtgacggtgttattccaaatttcccaattcaacctttacttttgtgtccttacgtcttgaaaacattattaccgtctttggtaacttcataacatggacttagggtacgcggaaaaagaagagaaagtgtaacaaacttaaaaattgacggctatgatcaagttaaaaagaagcttagttacttaatatagaattacttggaaatatggtggctggagagttcgtcaccatggtgatattgactaatgagatagaaaacacgaaatcataatcacattttgttttctattttgttgttaattttagtggattgtgtgtgttaatgtatttctgacgaaaatattcgttttagtatactagcctgacttttaacttaaagctatggttcagtttttctataaaacttgtattctcttcattcgatcttcccacaccacacattattatatttctcaaacgaaatttctctcttcaaacaagaaatactaaaagactgctcgatctcttcaaaatgtatctaaacaaacttccctctcttccattcttttctctaatagtttgtgctctgatcactatgattcctctcacaatttagttatattcttcctatcattccattaactcgtttcttgtaatgagttttttttgaaaatgtagctagcaaaatattttcttccattttgtcgtaactaatatatagtttctgctatcatctcattttttggaaggattttgagaacatctttaaaaaaaatttaattatctcccattttttatttgttaattcttatagtttatgctgtcatctcacttgtctcaaatttgtttctcttgcagggattcgtgtgaaaatttgcctcaagatctcttcaaaagatctacagatttgcttaaccttaacgttgccgaagcatacttgaaggaggtttcaagaggaaaggccttggttgttgtaccgtgaaaggggatccggacaggcccgtttctacgaccctgtgagagagaggctacacaataggaggtatgaccaaaatcttgaagaggcaagattcttgggatcaacattgggttgggttgttatgtccgactccattgtcggaatcccacgcgaagaccaccaaactttcctatacaaccctttcacttcacaacggtacgaactaccccctctcactattgaagacccacatctcaagagtgtgctccgttacggtgttctcaccggagatccacgtgaagacaacacttatgcttgtctcgtcgccgatagccttcacgctaatcttatggcgatagggaatacgcatcctcctagtctacatttatattatgtagccaagaggaacggagaatgggatcagaactggtcagtgactcgtatccctacccataaccttccagttgttggttcgacaatagattccatctccccatctgcggacaaaatatcaattataggatggggccatagttttgacttcaccttccaaagccaagattggaatgtcacaaatatcaattataccatggaatggaatcctttccacggccaatcttttgatcagatcaaacatcgacttcagatagatccacaaactctagacatcatcggcactaaaactgatcgcgaaagagtgaaaaaccgcatttggtttgttataaaccaaatcatttcccacattgacggagtttgggttgaggttcgcgcttagcctgatgttctacctcttgactcttaagttatttttctgtgatttgtttcgttatctatcttttatttgtgtggtttaagatttgtagtattaatttctatttattgtgttgcaaactctactcattgtggtttcgttagaaactctactttggtttgtttataaaaatgctgatcttttattgtttatttttacgttaaacttaatagacaaacaaagaactcttaattcggtgtacagctctacgttaatatatgtaaaacatcgatctaagacaagtatattaactaacatatcgtgcaaataaattaatcaacgtgtatgcagcaatttgaatttataataattaaacatgtccatgtaatagacaacaaaagacgcttgagattaagaaaacagtactgaattcttgattttattcgataaaagtatatccacctggtcgtcacatggtacttgacaaatcgtgtgaaagtctttcctatctttaaatatggatattaagcattgcatgctagtggtggtcctactcttaccttaaaactatatgattttgccatataaagaagtcgaatttttcattagtgtcaattcttctttgaactgtttttattagaggcagctgtaattagaaaacgtccaaaaagggaggttcaaatttttttaaaaatgtttgtttagcaaatagtaaaatgaaaaattatacaagagatgtattttctattttttttaactaaaagagttattgtattgttacaaggttcaaatcatttctcattagctgtaaatgtattgttacacccagtattatactctatcaagttgaagtaaaaagaatatttacaagtataaaactatatactcaaatatccctctctcaagtcgaattcttcaagcggaattcttcaagaagaagatagttaaattggtaaacgtaagtttagatgtgttgcattgtaatatcattatacagcctattttgtaagttgatgatttacatttaagagattgtactctgttatttaactggcatcatcaacaatcttttgtttgttttgttggagattgcgacatttcccatcaatcaatctatcaagggtttgttgtatacttgtatgtacaagagatatgtttgactaggctatcagaagaattcatacgaaacgttttgtagattagatagagtaaagcagatttaaatgtgagtgtcaaacgaaacttaacttgtgacggtgttattccaaatttcccaattcaacctttacttttgtgtccttacgtctgcaaaacattattatcatctttggtaacttcataacatggacttagggtacgcggaaaaagaagagaaagtgtaacaaacttaaaaattgacggctatgatcaagtcttaaaaaagcttaagtacttaatataagattgcttggaaatatggtggctggagagcgcgtcaccatggtgataatgactaatgagattgaaagcacgaaatcataatcatattttgttatctattttgttgttaattttagtggattgtgtgtgttaatgtatttctgacgaaaatattcgttttagtatactagcctgacttttaacttaaagctatggttcagtttttctataaaacttgtattctcttcattcgatcttccaacgccacacattattatatttctcaaacgaaatttctctcttcaaacaagaaatacttaaagactgctcgatctcttcaaaatgtatctaaacaaacttcccactcacaatttaatatattcttgctatcattccataaacagattaactcatttcttgcaatgatttttgtttttgaaaatgtagctagcaacaaaacttcttccattttttcgtaactcatatatatagcttctgccttctgctatcagatttcatttctctcaaaattatttttcttggtttcatctcattttttggagggatttttgagaacatctttaaaaaaaaaataatcttccagttcttatttgttaattcttatagtttatgctctcatctcacttctctcaaatttgtttctctcgcagggattcatggggaagtttgcctcaagatctcctcagaagttctacaaatttgcttaaccctaactttaccgaaggtggggcactaagaggtgtcaacactcattggaggaacacatttctttctttccgtgaaggaggtttcgtagaggaaaggccgtggttgttgtaccgtgaaaggggatcccgagttgcccatttctatgaccctgtgagagaggagctacatcatgggaaagacccatatcttgaaggggccaaattcttaggatcaacattgggttgggttgttatgtccaactccagtgccatacaccgacgtcaagaccaccaagctttcttatacaacccgttcacttcacaacggtaccaactaccccttctcaccactgataacccatgtgtgatccgttacggtgtgctcaccggagatccccgtcaagacaacacttatgcttgtctcctagccgatagctttcacgaaaataatcatatggtgatagcgcatatgcatgctcctagtcgacaaatatattatgtagccaagagtaacggagactgggatcagaactggtcagtgactcgtatccctaccttcaaccatccaatttgtggttcgactatagattccctctccccatctgtggacaaaatatcaattattttatggggccatactcttgacttcaccttccgaacccaaaattggaatgtctcaaatactcaagagaatgataccatcgaatggaatcctttccacggccaatcttttgatcagatcaaacatcgacttcagatatttccacaaactctagacattatcggcactaaaactgatcgcgagagagtgaaaaaccgcacttggggtgctaacaaccaaatcgtttcttacactgacggagtttgggttgaggttcgcgcttagcctaatgttctaccacttgactctttaagttatttctctgtgattgttttcgttatctatcttttatttgtgtggtttaagatttttagtattaatttctatttattgtgttgcaaactctactcattgtggtttcgttagaaactctactttggtttgtttataaaaatgctgatcttttattgtttatttttacgttaaacttaatagacaaacaaagaactcttaattcggtgtacatctcttcgttaatatatgtaaaacatattttttttaaaaaaattgtttagcaaagagtaaaatgaaaaattctacaaaagatgttctcttatttggctcctctacaaaaaaaactcaactccgattacaaattcgagtttaaatttacaggttttcaatattgggccgtattgggtgctaatggttttactaataataagaatgggcctagttaatcataaggcaatgaaaaaaaggtttacaaaaccctacattttttaccttccacgtgtaaacttcttccccaatcttacaaatctttaactgtcatcgagcgagctcaacatttttcggacaacaaagtgtaagagactgattaaacaaaatcgagactttatagtactcaggtttgtcggaatcgactgagtatcgaaattattgtggtgttttgtgaacagaaaccaaggtatgcatgaaatcgttttgtatataaaccctaatatcgatttcagaattttcattgatctcgttgttttagcaggattaaagatggttcaatctgtgttaatttcgcgtaacaagggtttggcggagcaagatctaactaagcttgatgtaacaaagttacatcctctgtttcctgaagtcatttctcgccaagcaaccataaatatcggtaaattacactctgcttttgccagctcctctaggtctatagtataacttgatgtcaaagaaaccaatactgtgctaaatatatctcaggaaccattggtcatgtcgctcacggtaaatcgactatagtgaaagctatctctggtgttcagactgtgcgttttaagaatgaattagagcgtaacattaccattaagcttggttatgcaaatgcaaagatttacaagtgtgaggatgacaagtgccctagaccaatgtgctacaagtgagtcataatcttctttttgatataataaggctaagtgttattatgtgtagcagcagctaatctgttaattttaggtcatatgggagtggaaaagaagacaacccaacttgtgatgtccccggatttgagaattgcaagatgacactacggagacatgtctcatgtgtcgattgtccggtattaatgagtttaatttacactttgtctctcaaaactagaaccattggctatatgtaactgagttgttttttattcatcagggacatgatattcttatggcgacaatgctcaatggagcagcaatcgtggatggtgctttacttctaattgctgctaacgagagttgtccacaaccacaaaccgctgaacatcttgcttctgttgatatgatgcgccttaagcatatcataatccttcagaacaagattgatctcattaatgagaaagccgccactgaacagcacgaggctattcagaaatttataacggtttgatcaattttcttatctctctgttgttaaatctttcatgacttcatcagtttggttctcatattttctgtcacatatataatgttgcagaacacgaatgctgaggatgcacctatagttcctgtctcagcacaactgaaatacaacattgatgttgtgagtgaatacattgtcaagaagattccaatccctgtgagagactttgtgtcaccaccaaagatgattgtgattcgttctttcgatgtcaataaacctggctcggcgggtcatgaaatgaaaggtggtgttgctggtggaagtatcctccaggtatgtttttatctctctgtttctcctctgttcttacctgactgtgaaacaatttagtattaatatgtgtctctctttgtttgggtgttttgaaagtgaaccaactgattgaaattagacctggtatcactggcaaagatgagcatggaaactcaaaatgcactccaatttactcgcgtataacttcactatacgcggaacagaacgagcttcagtttgctgtaccgggaggtctaatcggagttggaacaaccatggaccctacgcttacgcgtgctgataggttggttggtcaagtccttggtgaaatgggtactctccctgacgtctttgttgagcttgaagtaagttaccagcttctgactcgtctcattggagtgaggacaaaggaaaaagagaagcaaatgaaagtgtcaaagctaaccaaagaagagatattgatggtgaacatcgggtctatgtctacgggagctaaggttattggagtcaagaaagatatggtgaaactccaactgacgtctccggtgtgtaccaccataggagagaaggttgctttaagccgacgtgtcgataggcattggcgtctaattggtaagggtcagattatggctggaaccaccatcgatgttcctcctcctcctttctaatgaagtagtgatgagttttttatattgtttgcattcaaaaataattaacatgtgcctttgtatgtttaatcactttctttcgactacaatataaaactatattcatatttaacacaacattgacgaaaatttaaaaaacaaattcataatttcattaatgatattacttatcactaattaggaattatataattctaattccctcctcgttctgagcttttgtttcatctttacgctctctcttactctcagccaaaaccctatactctctttcaatcccaatggaagatttggttttgatgaaacagagtcttctaaaaagcttcatcgtctctcttattctcactctcgtcttcctcatctcaccatcatcatcatcttcgaatcaagaaacaagagtatcatcaacacaaaaaacggaagcttatctcaacggttacgaatcaccgcaccaactcgtctacatcaagaaaacgacaccgtttatcttgaaccagcggttgcaacgagacaaccaccgtcgtcgtcgttacaatcaccaatactactactactatcgacatactcttcgtcatcgccgtggtcttcatcatcgtgctggctacttcaagatgatggccaagaagaataacggtttaaaccgtccggttcgacaggatactttctcggttatgcttcccaaaggattcgtacctccttccggttcatctccatgccataaccagaaccctaattccgctactactctcttttgcgatctttctacacaaccctagatatcgttgccgatacgtcgtacgtgaaacgattttgttcctctcgtcgcacttttgtatttttcatcttttaaagatttttttttcttttttgttcggaatgaccggtgcattgatcagtgcatttttgacggtcaagtgtatgaaaataatttgcatactaatgtttgattgttcgtgtcctttgatttttcagaaagtacttatttttccttacgtgcagctgaattattttattctataaaactaaacttgactgatcggtaaaataatatatggagagaaaaaagcatatgtgtctatgttttcaaggtcaaaacgcatcgtttgtggcaagaacaagggagtatattgagccgatataattggaaatgagcatgtgaatttgcatcgtgagcataagctcttgtttcatggcttttttttcttagcttcagttccaattcttcgtaccgtccactccaatgcatatgtttgcattctaatatctatattatataactagctagggattgtatttaaaatatccaacaacatatacaaatgaattaagctatgccatatttcttgaattagagggaaaaaaatatatggttgattctaaaccgctactggttatcgattatatgccttttggtcaaagttactacttactcaaaccttttcatatacgacaagtttttcttaaaaagtaaactttgtttctttattatatatgtcaattacttgttaacgacaacaataaatttagaattttcactattgaccgacttcatttgaatgttgaattgaatataaattatatttatcaagcttataattaaattgtttacataaatatcctaaacaatcgcgttattatattgtcaataacttttcctctaaaatagtctcaacattacaacttgaaccatcgccaatatcaaaattgtccaatactccaagctcctctttgcctgaaagaagaagaaaacagagaattaattcattttgcacatctagtcctttcacaaacttattctcgtcgtggccccaataattccaaattctaacaaaattcaccacataatactaatcgtaccttagtggcagaggatgaataagtgacagattctgaatttgccgtcgttgtcgacattgtagagaatcccaaattgtaagctaatgatccatctggttggaatataccgtagtttttctccgaagtaggacctggtttcatatcttcattgaacaacgcaaatatataaacatcgagtcttgcattccgtctcgctggagttccttctccggcgaattgcctcatcataagattccggttatacgtggcagcattcacaggagacgctccaatctctccgacatctccttttgaaggccaccctgtttccgcaaccctaacttctatgttacggtaccctagtttcgcagccgcgaaagcaactgcgtcaacttgagcatacatcatgttgtcgtagtgtagtcttgtgttgggatcggtcatgccgatgttacggttgaatagaacgtaatcgactgggatttcttgtgggttatctttgtaggcaaagtaagggtaagcatttatccaaaaaggagatttcgtggcttccaagaaatctagaagttgttgcatcacggaggaaacctccggcttgaaacttccggcagatggaggataagattcaccgaggacggcaagagagcttggagacgagacttgaatgtatctatctaaacctaattggaccaaggctttgtggatgttgattatcgccggcatcatgtatctattaccaaaaagaggagagaatatagtcaaaattagcaattattggacaaaaactattacactcatttcttattgaaattcaaagtggagtttaataaatataatatttttttcgaaggagttcgttacatttgaccaagtggtagtcaagaaaatgtgaaatcagttaatgaaaaaaaactaattctgtgatcatgtaacaaattagactaatattcaacgattagtacttaccctattaaactagagtcgtcgtcggtgaaaagctcgtttccgaccataattccggtaatcctagtggccggaacatagggtttaatgtgagaatctacccattgggtagcttgttgaggatcttgtagtaatggtaaaacctgattttcgatggtgacgatgatctcgatgtttgaatttgcaaaggcactaaggatttgagggttagtgtcgtaaattcttgtttttgtgatccttaaagatctcaagaggttaatgactttatccggtgaaggcaaattgttcccaacttgtccgtaattgatgccaagagacgttactgtttgtagtatattccctatatttccaaacaaagaatcgaacttttagaaaacaatgccaaaaatctttaatattccattaaacaaacattgaaaaaatgaattctagacttattatcgatccgttatttcactatgttaaaatcttacacgttgaggttttaaggcggcaacgtaaagcataacttaagtgttaagaatttggttttaaaatttcagaatgaaaaagaaaataacctgagaaaacgagagaaagcaggagaaaaacatgaatgagactggaatgtcttgtgaatgttcttgatgtcatgttgaggaagagagagggagggaaagagattgtgaaggttttgggttttaagagaagtgtttaatggaatatttatagacatacacaataagccaaccaaggtgaagaatacttttcttcgcttgtttgttttttttccgtgttttttgttgtgaaaaggtttagtgttgaagtttatgttttttaaaaaaagtgtttttaaattgtttagctttgcctccctatattgcttttctcatttatgccttttttatccactgacggctttctataaaccacaacgaaggatttcttattaaagaaaattattaggttttaaaatatttgtatgtagttatttatcatatagctagattaatgcagactctatgacaagacaatttgcatgcacatgtatggaaggaaatacgttgtttgtgtgtttcgtttaattacatgtactatacaagtggtgttaactgttgggttggtaaaaaaagtgagcaatgttattaaattaagaagagattgggatacacataagtggacgtgtatagaatattgaagaagtttcataaagcaccggaaaatattaaaatattcgtttcaattaagtaggtgagtcgtgacttaaaacaaacttgtactatacaccaaaagtttattctacgataatcatggagaaaaagacgtggtataaaaattaatattaacacaatgaaattttaatagataatcatgtcttgtagaataatcatgaaaggtaaaatatcaaattttcagctaaaacttcatgacaaaagaaattttataatgggttattagtcccacaaaaatggtctttatttttcttattaacttttactactattaatattattatctaatttatctgaatcattgattttactaatcacgtgttaattatgattaatttaatgctaattcaaattcgaagaataatgattacattttcgcatgaatcttgaccgcaagtgtatcctagcctaattaatatgacaaacaaaccttactatatttctttagacaaaagctaattggagatccgatttgacttgacgtgtcaaaggattcaatagtacactgaggaagcctcctccgtttctcctttaaagtttaatattttcaaatctcccgggaaatataatacatacaaataaacatatatcacatatttattttctttttgtaatccgaggcttttggacggaaattcatacaagtcctcgaaagttatcaagaacgggatatccaaaattgtattcgtgaaagatatataagtcgtaatataatttgccattaattgtcaagaaaaaatctcaaatatattgttattcggattaagatgatagagaagggatatacttactttcctttagacaaaaggatcatgcttaattttgaggcacttgtaaaataaaacaagacaaatatgataatgtataaattgacaaataactaaaagcattagcataacaaaagtaaaataaaatggtcaattgggataatgttgctaatatgctttcgaggggaattagacaagttggcggggcagtgtcacacacttggagccgtcggtcaatttcaaccatcggttgttttttaatcacctgacataataaaccccaacaaaacttatttaagaaatagtaagtgctttcgcttggttggctattgatttgttaatcaattaatttctacttactatatttttaaatggtaaaatataaagggttaaacttgatcacgtagacgatagtcaattcgttttctcgaaaggttggctagccagaaaattacattaatttaaagtggaacttttggctgtattgatctaatccaaaataccctagtgtcttcttttcgattctataatattaaatcttctctctttttcacgacaccaagagccattttatttgaacacatgtatacaacttataagaaatatacccgtctcaagctattgaacttgttgcaattaaaaatgtaatcgttcgatgttggaattaaatatgtggaaaggagtcaaaatcagtcaattattcagagtggcctgtttatagttggctgaaaacttttagttcgtcgtttaaaagtttgatttcgtggcttaggattgaccaccggtcgacttatggcagttccatatagattaatttgataatgacgtaactatataccatacacggccgaacagattgttttatataggcctatatgtgtaaagttaaagataatttgatttattatcgagtatatgacacaagttttaatttatttctaatgtttaaatttaatgattctggtttagttcttcatgaatatgatctagtttgttaattatttactgaatggacatatttttggttgcagaatatttcaagtttacgttatctgtggatattttaatgtccaaatcagaaagatcatataattgtccagcaagtttgaaacagcagacagaaaaagagaatgattttgttttagctcggattgaaagaatatgccatttaatctgcaatttatttacaatatcgaatatgcaaataaaatgacatgaaagctttttaaagcaacacaagtactcaacgatatcaatgtttttgaacaaaggttaagtttcttcaaagaaagggtttaacccttttaacgcatgaaaaatagagtatatatagggtttacttgattcggatttccatgttggacatttgcaaatgtatgatgcatcacacccaactgtgggaatttgatagtgataggtaactaaattggttaaccatttccaacttggaccatgtgcgaattggtttgaaggtggtaatattaaggtacctttgaattctcccgcatgaatgattcgggaagtgttatagcgggtttcttaaagagaacagtgtagataagggagaagattgcaaaatcaaaaaaaaacaaaaaaaaaaaaagattgcaaattttacctactgtttaacaaatggatcaggccaaaccatcattaaacatgcttgacaggtctaggttgggttggaccgacatgtttttttttttacttaacaatatatagttcaccagatcaaaaattcaaattatatctgcataaaagatactaagctgcaccaaagtgaacatatagttaaataatgagcctataacgtatctaaaaattctttttgacgtcatacacttgtattttatatttgaactgaactctatatacatatattaccaagattcacatactgtacttagtttggattcattagacaaaataagatatttgacgtcatattaaaatacagatatcgtgggccatttcgaatagtggatatatataatacttataatcgagtcaaaatggtgtaaagcattatttcataaagctgcctacaaaattgaatttttggtggataatggataaggattaagcggcaagatttatgaagaagaaaaacaagctttatgatcatataggagaggaaagttaatgtcttatccaacaacgataatgctttctcgataaccagtaaacatcgtgcatgcatggctaaaagcttttacgtgtgctttttttttctttatagtagttaaaatttaaatgttcttatactaatcaaagtgtttttcatttatgacgcgcatacgtaaaaagggccttaaatctatgtgtatgtttctctttttactccatcttttttggttaacgacaagaaaatgagaatttcgaaatattttataaaaagtatgtaaatttgggtgcgacattaaaggataagacacgtaatattttagaaatttatattgaaagttcaaatttttatattattaggggacagcttatcgttggttttagttgtattttgttttgtcaacttgtctgatgtcatgagcttttaggcattttcgattctagaattttagttttgcatgtatcagagaattgtatttaaacaaattagacacatattcaatgattattacttaccctattacaatgacaaataaaaaaacggagacgagtctaaaatgataaatccaacgtgtagtctagtcatacatcgttgttcagttgttaaaagattataaattatacagctttatttcacagtaccgaacgagatcgatgtcacttactctgtaacttcataatatctacgcctttgtatatatacagatatatgttggcctttcgtgtatagggttgtgtatatatttctttaatttagtcacttcttagaaccatctttctctttattgtcatccaagggatactctagtattatttaacttttcttcaacatttcaatcgcttttttttggcacatggcttgacatgtaaaagggtgattgtatgcgtgtgtggattcacgtttttaaatatatgcatatattatatgtgacgattcgtatcaagaatcacaaaaggaaatcccccaaaagaaaatacttttcttatttccgccaaaacacttaaagaacgacgacattttttgccgacgtttagtaagaaaaaaaagagagcagttaaaagtaaatgtaaaaaacccacatagaacaaattcttttgttgatttccaactcaaaacaatagtagaaactaattaagtgaaaagatacacatatgaattaaggtgtcttggtatccatttaaattgtgtttcctcaaacttctctttttccacaattcgcaaaaactactatttatttggtcgtctacaattcaaacagatgcattactatatattgatattgaattcaatcacaaacgatatctgaattcgaaatatctccgtacggaaaaaccagaaaagattaaaacctaaataaatataaaccaaaaaagatgaaaatatataacttaaaagaaaaaaaaaactataacctacaaacaatactaatgtaaaaatttgtaaaaattccaaggaaatgtatattgccggcgaccaaatatcagtagactaatattgggtcgaaaccccaaaaaatattgggcccaaacccaaaagaagaacataccaacaacatactttccagtaggagaaagcacaaaactaaactttattgcagcgtactagacaaaacattaaacacaaacatagatttcaatttaattaaacaccctcagctgggtcaccaactagaccatgtaacagcaacatcatatgatgatatgggttgcctaccgagagattttgcttaggtacaacagctgaagcctgaagcaatcaagagagcaaattaatgtctcttctaagtttgacgtagttgactactggacagatgtactactgcatatgctggcctcatttcgcatcaaaatgaggtttgaaaacattagaggcgtatgagaatgtgaaaaataagaaataaaggctattgaacccatccactatcctttgatgcgctatggggataattaacacaatatgagggagggttaagcagttgataaatatggatagtcttggttcgggccgggtttggacgtttcctttttttgttgggtttagaaaaagtaaacaagtttaaatgaattaagattttggtttgttttagaaatagatcattttgggttttagaaataaatacttttcgggctgtgaagctgctaacaacacacctaaatactaattgagagtatgtaattaagttaatatcatactttttaatcttccgttagctaatttggcccatatagagactttaattgaaatatatgatccatcgaaaacaaataatcttatgccgtaatgggttcaacatggatggacctcatcatggccttctctcagatatttgtaggtttttgcttgcttttgtcacttactacaaaaatttaactttttaacaagtattatataagaactaataattttattataagtgatatattgatattatcgtcattgctaacatattttcaaataatttgcatatatatgtagtgttgtagaagataaaaataataatataatagtcacttgaatagtctagattttttaagataatatacaagcttataaatgaaaatatcaaatttctatcatagtttaattatttatatacagtcattaactatattttcgaattaaactaattcaatatatatttaaaaataatcattacaggtacttttgtttcattttagtttatttaaccattattttatcaatttaaatttttaattttgggaaacgttaaaactaattttaacaaatatctgtccaaaatgcagattccctctcaaagtataaagctcaatttatttgcgtgaaggcacacataaaatcccaagatatatacccgatttggaaatttaggatctaagtcaatgataatggttttgagccaaacctttttgagttttgagttgtaagatggaatgttttttcgtcataaatcacttgtagcatgaacattctttgtttttcttacttaaaatagagataatttattgtttttttcgtgcattggcaaaacttctttccgtaagcacttagttgatacgaaagaaacacgacttatatattcaactatatcgatcaacgagaaaaaaacgaccacattcattggacctgttattttctaattaggcttcaaaaaattctttaatttcattgaaatcaggaaataaagcgtttgaaaactatataacaagttcaacattacaacaacgtgccttttgaacattaaatctatacagtagcagtattatatacacacagtatataaatgtaacgtaaggaccaaaaaaagagaaattttttatatcgaatgagcaacgaaatgatacaaggaattagtatatatatatgaggaaattggataatatagatacatataaatatatgcatacaaattatatgtatatacaaagattaaggatccggcccctctgactctgtttgactaaggacaaagattacttataaatatcttctttgtttcaagaaagagtatctgaatgtaatttttgtagaagcatttgacgttcattccgacaaagtctaaatcaccatttttttataatcaaatacgaataacaagttcctatattctttctttctatgttacacaggtcatatagttctagaaatatacattgtcattatgagaagaaacaaaaccatccatgatcttcattttaagttttataatggtattcacattgtcattttgagtaggggttactattgcgtataattcaagcgatagactattgaagattaatatttgtaatgtttttctaatagaacctaactaaataaagaatatggatcacagtttcatgatttaattatattttatactattagttagtagggtccccttcatgtctggaaaagttttctttttgttgaggtcggtggatatttcaaaccatcaattctcaaatatctttcgcctttctaatgaatatacgtgtgatatctttaaatttttattaccatcatgatattttctcaaatgttttaagaatgttcttaaattagagaaaaatgatagtcaatgttatacttagttaaaagaaactatatattctcatcaaaagtttaacctatttataaatatcttacttgttcatgttggaacgaaaatgtgcattgaaagaaaagaagattaatctctcttttttttgtacaaaaagagattaatctctttcatgcattgtactcaacaaaggtataattataaatagatgatcatgaaaagagactgcaaagtattacaactcctacaggaccactattagaatgctaaattgctaacatgcatatatcacatgattgtgttgacatcaaattttggtctgataggtccgcatcggttagttttgtacaaagatgaaggtttattcgtcccgttgcaaatttaataaatttgcaattgttttcgaaatgtattaatttttcatagagaaaaacaaatagatgtattgttaatatatagatgaagatctcaaagtcgtcatttctgaaacaaatattgcaaacaggaaagttgttatatttaacaagtttttttttaacaagcttatttcttgctaccatgaaaaagtatttagtatttattgacgaatccggtgataaataaaagttgtaaatcgacaaataaaacgattcaatggatttctcaaattaatcagtgcttaatatatatatatatatatatataagctttattaaataaaaattttactttttttagtggtctttgaattgtgcgagtgtgaatgggttggtcattgacgtaaaagaatggtcatgatcaaatgttgataatggctaggatggtcaacatatttttatttcttgatttgcttgtatcttacctgccttagttctattattaaccactctcgaatttgttttcgatcttaccaatcaaaatactttgtactcatctttatctcataggtagatagcaaagtctaaatattgacaggttaaaataacattacttttcttggcataaccaaattcattatttaattcatagaaatgaccacctcaacgtgtttaaaatacctgtttatttaagattttggacacgtactaacaattggatctagctagcagcaagcattcaaaaactttcgacgactagattagcaatcgtcatgtttctgcctaatttgaatcgcttttattgcagttttctagtcgaattcgattatggactacggttttagagttgcaagatttttcctaacaataataaattgacactaaaaatctttcgatagtaaatatatattcaatacttgcaaccattcgagaaaaatgaacatagtctaaaatacatgatcaactctcatcaaatataacatattacattattactatattagattacgacgttataaaaacaattggattagcatcatatttagtagcattcatataaaattattgtgacataaattttcatgcaatatttgtatagaataattccaatattatattgtcatacatttagctaaactattgtcggggtaaataattgattctaggctttggtcctaggtttatctacaaatatattaatactactaaattaaaaaattcagttagtgtatttagtctggtgtgatgggtacatcagtctcagcattttcatgtgcattgaatgtgaacacccttacatcaaatcttgacttctttttcccgctttttgggattgtaatcagatgtcaatatttagtatttacacaaaaacatttgatttgtgtaacaaagaagaacatgaatgaactatatcaaagcaaggcccaaaaatatgaagcctaaatattaaaattatttaacaaattcccatatctatgtctacatatgtggtagaatttaaacgtaatatttgtttggctgtcaaaaaaaaaaaaaaaaaaacgtaatatttgtttggaactgtttgtatttcttttttttcttaacgtttgtatgtctatctcatttataactccgaaagttgatcgcagtaactaatgataggtatttttcgaaactgctgaccatatttcactgttgatggcgtcatggtccgtatgtcaacaaaatctagtattatgtacgtactacatttagttatgttattttcttgagttcacgtgttggcttggttgataatacacggggtatcctcgtccacgcattatgaggtagagttcctcctgcttcattctcacttcattcttccctcgaaatattcaaattaatttattacaaatctcttcgtgtttttaatttttgacgaagtttcttgaaagtttaggatatttatatttaggtttttaattcgttaacgaatttcttagatctgaaacttttacagatttccaagagcaagtttcttatctatagtcatcctttatttatccttagaatatgaagttatcaaatgaaatatttctatctactattttaattggatttataatatatatagtgacgaatgtacaattatatcaattaatctcaattttccgaataatatttgctaactaatatacatcatgttttagctagtcaaaatttcacctgggattttatatgttacaattttggtaaaacatttactgactatcatttctaaaacatgaactgtggtcatttggaggattattcttaaacctaaactttgatttatgagtatataaatctaaattaaatcacccttatatcaattaatgaatcattaatatatatgatatatccattacccaaagatatttgtatctttcgcttactttaaaatgttgaagctataaaattttacatatttgaaaaatgagttattagtatttcatcaacaaaatgcattctactgtatattggattccaacgcaaacaataacatagctacaaagctatcacaaagcactatcattagtttattacactaaaatttcgaatattttcatgtacgacttcaaatatttttcattttctgccgcattctcatgtcattagtcatcattactccctctctcgcgtacccaactctatataagatttctccttcttctttttctcttctcatcgaactttcctctttcttctctcatctcctctctttcactcttcacaccagaagatacaaaaaacaatcactgtctcaagcctctctataccgaagataagaaaacaaaagccatggtttctcttcttacaatgccgatgagtggtggtattaaaacatggcctcaagcccaaattgatttgggttttaggcccattaaaagacaaccgaaggttattaaatgcacggtgcagatcgacgtaacggaattaaccaaaaaacgccaattatttacacccagaaccaccgctactccgccgcagcataatcctctccggctaaacatcttccagaaagcggcggcgattgcgatcgacgcggctgagcgtgcattaatctcacacgagcaagattctccacttcccaaaaccgctgatccacgtgttcagattgccgggaattattccccggtaccggaatcttccgtccggcgaaacctcaccgtcgaaggaacaatccctgactgcattgacggtgtttatatccgtaacggcgcgaatccgatgtttgagccaacagctgggcaccatttattcgacggagacggaatggttcacgcagttaaaataaccaacggttcagctagctacgcatgccggtttacaaaaaccgagagattggttcaggaaaaacgattgggtcgaccagttttcccgaaagcaatcggcgagcttcacggtcactcgggaatcgcacgtttgatgctgttttacgcacgtgggctttgtggtctgatcaacaaccaaaacggcgtcggagtagcaaacgccggtttggtttactttaataaccggcttttagctatgtcagaagacgatttaccgtaccaattaaaaattactcaaaccggcgatctccaaaccgttggacgttacgatttcgacggtcagttaaaatccgcaatgatagctcacccgaaactggacccggttacgaaggagcttcacgcgttaagctacgacgtcgttaagaaaccttacctgaaatacttcagattctcgccagacggcgttaaatcgccggaattggagatcccgctcgaaactccgacgatgattcacgatttcgctataacggagaattttgtggtgattcctgatcaacaagtcgtgttcaagctcggcgagatgatttccggtaaatctccggttgttttcgacggagaaaaggtttcccgattggggataatgcccaaggacgcgacag

SEQ ID NO: 593 - DNA, 110102 bp, Arabidopsis thaliana
gaattcgattatggactacggttttagagttgcaagatttttcctaacaataataaattgacactaaaaatctttcgatagtaaatatatattcaatacttgcaaccattcgagaaaaatgaacatagtctaaaatacatgatcaactctcatcaaatataacatattacattattactatattagattacgacgttataaaaacaattggattagcatcatatttagtagcattcatataaaattattgtgacataaattttcatgcaatatttgtatagaataattccaatattatattgtcatacatttagctaaactattgtcggggtaaataattgattctaggctttggtcctaggtttatctacaaatatattaatactactaaattaaaaaattcagttagtgtatttagtctggtgtgatgggtacatcagtctcagcattttcatgtgcattgaatgtgaacacccttacatcaaatcttgacttctttttcccgctttttgggattgtaatcagatgtcaatatttagtatttacacaaaaacatttgatttgtgtaacaaagaagaacatgaatgaactatatcaaagcaaggcccaaaaatatgaagcctaaatattaaaattatttaacaaattcccatatctatgtctacatatgtggtagaatttaaacgtaatatttgtttggctgtcaaaaaaaaaaaaaaaaaaacgtaatatttgtttggaactgtttgtatttcttttttttcttaacgtttgtatgtctatctcatttataactccgaaagttgatcgcagtaactaatgataggtatttttcgaaactgctgaccatatttcactgttgatggcgtcatggtccgtatgtcaacaaaatctagtattatgtacgtactacatttagttatgttattttcttgagttcacgtgttggcttggttgataatacacggggtatcctcgtccacgcattatgaggtagagttcctcctgcttcattctcacttcattcttccctcgaaatattcaaattaatttattacaaatctcttcgtgtttttaatttttgacgaagtttcttgaaagtttaggatatttatatttaggtttttaattcgttaacgaatttcttagatctgaaacttttacagatttccaagagcaagtttcttatctatagtcatcctttatttatccttagaatatgaagttatcaaatgaaatatttctatctactattttaattggatttataatatatatagtgacgaatgtacaattatatcaattaatctcaattttccgaataatatttgctaactaatatacatcatgttttagctagtcaaaatttcacctgggattttatatgttacaattttggtaaaacatttactgactatcatttctaaaacatgaactgtggtcatttggaggattattcttaaacctaaactttgatttatgagtatataaatctaaattaaatcacccttatatcaattaatgaatcattaatatatatgatatatccattacccaaagatatttgtatctttcgcttactttaaaatgttgaagctataaaattttacatatttgaaaaatgagttattagtatttcatcaacaaaatgcattctactgtatattggattccaacgcaaacaataacatagctacaaagctatcacaaagcactatcattagtttattacactaaaatttcgaatattttcatgtacgacttcaaatatttttcattttctgccgcattctcatgtcattagtcatcattactccctctctcgcgtacccaactctatataagatttctccttcttctttttctcttctcatcgaactttcctctttcttctctcatctcctctctttcactcttcacaccagaagatacaaaaaacaatcactgtctcaagcctctctataccgaagataagaaaacaaaagccatggtttctcttcttacaatgccgatgagtggtggtattaaaacatggcctcaagcccaaattgatttgggttttaggcccattaaaagacaaccgaaggttattaaatgcacggtgcagatcgacgtaacggaattaaccaaaaaacgccaattatttacacccagaaccaccgctactccgccgcagcataatcctctccggctaaacatcttccagaaagcggcggcgattgcgatcgacgcggctgagcgtgcattaatctcacacgagcaagattctccacttcccaaaaccgctgatccacgtgttcagattgccgggaattattccccggtaccggaatcttccgtccggcgaaacctcaccgtcgaaggaacaatccctgactgcattgacggtgtttatatccgtaacggcgcgaatccgatgtttgagccaacagctgggcaccatttattcgacggagacggaatggttcacgcagttaaaataaccaacggttcagctagctacgcatgccggtttacaaaaaccgagagattggttcaggaaaaacgattgggtcgaccagttttcccgaaagcaatcggcgagcttcacggtcactcgggaatcgcacgtttgatgctgttttacgcacgtgggctttgtggtctgatcaacaaccaaaacggcgtcggagtagcaaacgccggtttggtttactttaataaccggcttttagctatgtcagaagacgatttaccgtaccaattaaaaattactcaaaccggcgatctccaaaccgttggacgttacgatttcgacggtcagttaaaatccgcaatgatagctcacccgaaactggacccggttacgaaggagcttcacgcgttaagctacgacgtcgttaagaaaccttacctgaaatacttcagattctcgccagacggcgttaaatcgccggaattggagatcccgctcgaaactccgacgatgattcacgatttcgctataacggagaattttgtggtgattcctgatcaacaagtcgtgttcaagctcggcgagatgatttccggtaaatctccggttgttttcgacggagaaaaggtttcccgattggggataatgcccaaggacgcgacagaagcttctcagataatctgggtgaactctccggagacgttctgttttcatctctggaatgcatgggaatcgccggagacggaggagattgtggtgatcggatcgtgtatgtcgccggcggattcaatcttcaacgagagagacgagagcttgagaagcgttttgtcggagatcaggataaacctcagaacacgtaaaaccacgcgtcgttcgttgttggttaacgaggatgtaaatttagagattggtatggttaaccggaaccggttaggaagaaaaacccggttcgcgtttttggctattgcttatccttggccaaaagtttccggtttcgctaaggtcgatctttgcaccggtgagatgaaaaaatatatttacggcggtgagaaatatggcggcgaaccgtttttcttgcccggcaactccggtaacggcgaagaaaatgaagatgacggttatatattttgtcacgttcatgacgaagaaacaaagacatcagagcttcagattattaacgctgttaatttaaagcttgaagctacgattaaactaccgtctagagtaccgtatgggtttcatggcacatttgtggattcgaatgaactcgttgatcaattataataattattgtactttttaatgatttgataaatttagaaaaatagataggtttacaaagttgcgattgttttaacgattaatgaagaatggttagatacttggattataatttcgctttctttggacgttcatggttgaaagacatatcataacacatagctcggaaataacatttgtatgcaaattccaatccataatctccctcagaatccgtataaaaaaaaagacttggagatgttaagaaaaaagagtaaaataaattcagttgcatcttcatcatacaaacactggttaataacttacatgacttaattattatgcgattatgttgttttcttttacttcacgtaattgtgtaacacttgattattatgctattttaattacggagatgaaaattaaagttcttaaaagtaatacctatatgaactaagatcctgattattatacggataaatcagataatgttgtttcacaaaaagattaaaggaaataaactaactcaataacaatgttaagtaatatagatatatgtggattctgattaggattatttgcgttcatgcattgactctggatagcattatagaaacttagctgtatactatagaagatgactattgcaatgacgaaacagtagcaatgatgatgagaaaatcaaatgtagatttctcgtacgtacgtatatatagaaaacagaaacccgcaaaaaaaaaactgttgaatattcccatagatttcaaaattatcgatcaatttacaaatgatgggcaacaatttgtgatattagtgaagccacgtatactataatgtatagctagttaatacaatatagttactatattgtaaaagcgtatatagtggccatagagtcaatatgtaaatatgtctagaattatggacacaatcggtgggattgtcagatgaatgtatgatgatgatgtcatggacctcatggtatttacaaacgttgcatggttaatgcaacacgtacgttgtaaccatttcatttcaaatttccatccaaattatttggaccaaactcttatcgaaaaaaggaaaaaatattggaccaaacttgttatctttgatatggtcgtcatccaaaacgaatagttctatacagtgaaggtagccatgtatttcatcggttctgttccaaatagtctcgaaactacgtaaagttatttaaaatttaaaaacaattccaatttatacagaaagtcaaagtcaattttttatttggaaaaaatgaatttgcattcggatagtaagtagtgactgttgaactaactatattggggttgaaggaagcaattcattgttattaatattctgaagtcaatgaaaataatcatgtttgggttgatggatcaatttgtttctagctagtataatatgtcaaacatttttgctagtaaagatccgctgaattttttttaagttcgaacactataatattttttcgtacttttttttggtcaaaagaatctatactattttttgtaacagaaatgttttgagtaaaaatctcacattattcccacatataaaagattaatatattgttaccatttaactacatctacaaaacgaaagtattcgattatatagttggatgggaatactttattggatcacaaattcaaacatccatctatcttttcatctctctgatgagtggtgactcttaaattgaagaagtgaataagattccctacagcttggccgagaggtaatgaggagtgtcccaatcagtcttgatgtgggttcggctgatctctctcagtgaacggcaaccacttagtgccattgtaagctcaaactcgtctcttagcatttgtagcatcttcctaactcccgcttctccatccgctgcaagcgagaacaagctcggcctcccgacctaacggaacaagtaattaatcacatgtcctttggatatttatatgatcagtgataatactcatatgcagcaacgggacacacatttgtttcattgtttggcttcatttcgacaaattaaaaacaacttaataaaacagaggatatatttgggtttgttttgaaaatttagaagtttggtgcaaaatgttaacaatttgtaaaaatcaagaagagataatcaaggttattgcaatgaaactgaaaatgaaaggagcgatttgaaaaccgtgagagaaaacaggggaaatgacaagagctaagtgtatatgatgaatgaacttacaaagacacctgaagcgccaagagccaatgccttaaagacatcggttccacggcgaaccccaccgtcaagaaaaaccggaatccgaccctccacggctttaaccacctgcgatttgtgtttgcttgattaatcaatgaagaaagctgaaactttttgttttaacagttttaaatcttgatccatttaaaagtttacctcttctaaggccactatagttgcaggaacataatctagctgacgagctccgtggttagagactattatccctgcagctccatattcaacagcaattcttgctgccaaaaatttgaatgatcatagaaattatcttaaaacataatgaaaacttcaagcaaaaggttgatgcatattctcattcttagtatatttgttttaccatcctcagctgtaataacacccttgacaagaattggcaagcttgtgatagattggagccattttatatcctgtaagaagaaaacaaacagcgaaaagaagcgagtttactatgtttctgaatcttggtatgcaaaaacaaagaattgatcatgttacattttctgaccttccagctaagtgattgatcaacttgaccagcaacatatgaagctagccctgagtcattcgtctgcaattatccaccaaaaaaggttagttaactattgagcttttaggtcaattgaagactttgttatatgtcttttgaccttgtctattttcccaagatccaacccttcgaagttcttcaacgttagacctcgaggaagcgcgaatctgcaagagaataactatcaagaaaaccaaaagatctaacaatctggtttatgtgatggtggagtagtttcatatcacctgtttttgatgtcagattctctgcgtccaagccttggagtatctacagtaagagcaatagctttgaatccagcttcttcagctcgtttcacaagctgtataaccacatttctatccttataaacctgaatcaagagagcaaatagtcaacacagagccaaaaaatcaataagaaacaagtaaatcttctgaaacatacataaagttggaaaaaacgaatccctggtccggttgaagcaacttcctcaacactacaagtagcccatgaagataaagtctgaaaacatcaaacaatacagataatgaaaacacaacaataagagaatatccaatcaagtaaaagagacagagagaatgaatcaaaaccatgattgttccagcagcagaagtagctctcgcggttgcaagctcgcctacaacaataacaaaaacattctccatagtgaaactaaagttttcttcttgacaagaaacctcaagattgtgttttggttacactgatcattacataacactaaagacttaccatcaggatgagccattttctgcattgcagtaggagcaatcataattggcatagaaatattaaaccctaaaaccgttgtgctcacatcaatcttgcttacatcgataagaatccgaggcctaaatctgtttccagctcataacacaagcacatcaataaaaagacagagaaaggataaaaacacattttgagtccttgttgtgaatagtttcacttacagaatcctagagaaagcgtttcgattctcttgaagagtccattgatcttcagcaccagatgcatagtaatcataaaccatctttggtaatttctcctttgcgatcttctcatattccatcacgtttgttatctccatttttatttactcaacactcaaaaaaattcctgtgacagataaatacacattttcatcatcaaaatcactttttaaaacccttgaattcaagaatgaagaatcaggaacaaaaaacgacactgacactaaaaaaagtcaattagcagactaataaaatctgccccggctcagattctataatcacaggatcgtcactcgttgagtttgatattgatgaaaatctaacaatcagataaacaagcatcgacgagaaaagtaacagagagcttcttacctagaggcctagagagacttggtcttctcgggaaggtggcgaagaataagaatataagaacaaaacaaaatgttgatcgagtactcttaatataatatagacactcataactaagtcacaaagaaacatacgtctctgtgactgtgtaaataattgtcagtgattgtcacgtgatggatcacgtgaaacacaagctcaccagacaccagggcttttcatttgttacaacaacatgcatagtttaagacccattattctcaaataagatggaccagattagtcatttgtgatttggctccaattttatgatttataaaagagttgggagtccacaaaatattggttatattgtgagtgggtaatggatgttgttcagaggatcaggtagttagtactctgctgttttaaaatccaatagactttggttaacaaattgtttaaatcacaaaaccatttacggttcgaccgaaagaaccgaattttattctctctgccttatcacctctgagtggaaaaaattgagtgagcgccattgtaggagagcttcgggaaagaagaagaagaagaagaagccatgaccatggctcttgcttcttctaaagctttttcctcaatcttcaatactttatcaccaatcaatcagtcgaaatttgtgttagcttgctctggttcaaatcatgtagacgtcattgatcggagaagaagaatcatgatctttggctcgagtttggctctcacgtcgtctctgcttggttccaatcaacagagacttccgatggaatccgcaatcgcattggagcaattcaaagaaaaagaagaagagcttgaggaagaagaagagagaaatgtcaatctcttccaggttttgctctttgcaaagctttttgttttctctggtaacaaaaaaaaagaatccaatttttttgtcttttgcagaaaacttcgccgtctgttgtttacattgaagctattgagcttcccaaaacgtcttctggtgatatactcactgatgaggaaaatggaaagatcgaagggacaggttcaggcttcgtttgggataagcttggtcacattgtaagcaaagatccttcttcatctgttatgtttctgtgttctgagtcctggaaaagctgaaagtttgtttctttgtacaatgtaggttacaaattatcatgttattgctaagttagctactgatcagtttggattacaacgttgtaaggtctccatcttctttaatccaattgtagctaaaaattacagagtcaagtaacttaagagcaatcacagtttggttgtttgtgtaggtgtctctagttgatgctaagggaacaagatttagcaaggaagggaaaattgtgggtcttgatccagataatgatctagctgtgttgaaggtatatatctaagagtctaagacaaatgatgttgaacaaacacttgtttagttcttttaactactgttatgtgcagattgaaactgagggacgtgaactaaatcctgttgttctcggtacctccaatgatctacgcgtaggtcaaagttgctttgcgattgggaatccatatggatatgaaaacaccttgacaataggggtaagagtagttagatcctgagttttgtgttcatatatacgttgaagtctaaacattttcacttgaaatggatttgttatcatgaggatttgtaggtagtaagtgggttgggaagagagataccttcacctaatgggaagagtatttcagaagctatacaaaccgatgctgatattaactcaggtatgtaagttaattttacatgaaccctaagatctttaaacatctaggttaatcacataatagaatcattaggaggtttatcggtttacctctctttattgccgtagagatgtcttcatgaataggtttctgaagtattgatctttagtttaggattaggtttctctcaccttgcaaatatgttaaataataacattattccaatagaaaacggataattacaagaccatataataggggagaaattacaaggtaattcacaaacatattaatcagtttttgtcatcccattcagttttatgaaaatcaatctttctcgctatgttgatataggcaattctggagggccattgcttgattcttatggccataccataggtgtgaacactgccacattcacccgaaaaggtgatatttgatcttttaccatatctaagaacataaccataactctgttctttgattctctaataagatgctgaagatataactttttgcgttgcagggagtggtatgtcttctggtgttaactttgccattcccattgacacagttgtccgaacagttccgtacctcattgtgtatggaacagcttatagagacagattctgaagtaaaccaaacatcttctttgcattttgtctatcactttgtctattgtttgttgataatacaattcgaaaagtttcagacttgtctctctaaatgtaaatacaaaaagttcaaaaacagtttccaatgtatacatatatcttcacaaaaacatgtgaatcattgaccatacaaagacatggaataaaattttgattttggccatgatgaagagactaaatccatgacaagacctattattggttacaacattgatgaaacttggaaagattctctcatgaagtcttaaaagaagctctactctttcagctgaatcaacgaaagctgttcatcgatagagcaatcaacatggcaagatgtcctgcaagaggaagggattaggatcataccaagacaacgctgttcagtaggcgaaggagatgatcttcgtatgctacgatactccacagtgtcttggagaatgatgtttccttgtttgtcaatgcaatggaaatttccaaggaagaatctgccgtctttgattcccacaagcatttggcggaacaagagcttcctcaatcgagatatcggatcaaaatccgacccttcagaggtggatgcaacaatggttgaactcctctctgcagcttgttccattcccacaacaggctttttattcttgtatatgttttacaccagaacaagcttaaacatcaataacacaactttgaatcttatagatgcaataactaaagttctaaaaaccattctctgaaagtcttggatgcatctagttcttggcttaataattcaaatagggctaattccggaatctaaaagtttatatagttaacacacatgaaccaaaagctaattttccctggagaaatcctaatttcacaacttcgaatctagcgatgctaatagaagtggggcaaaaaagattcgacattcataaagtaaattcaaaacgaagctgagggtaaccaaaaattctcaatgccctacacaagtttcagttggagattggaaatcaaaccttagggctttcttcagtttcgattacagagttttgctttcttttttaatcacaaagagaagaaactcaaagggctttgtataaacaatttcagtatgggccttgtattcttaaatgtttttgtttttatcctttttgatttttatgttaattttacacccatgttggtaatattcaagtgttgcaagatgaataaattttgaaatttacccaaaacagtctatgattagttgtagtatcactttttcacaatcattaataccaacatataagtacaactttgcaccaaatagggtcttattggtcagttttgaagtaatgaaaccaatcacaaaaaattaaaaagtccaggttggtcttcacgaaccgaggagttcaaaggtcccttattagttcatcttctcttccgtcatcatcttccgaagagctttctccgaccgatctcatcattgtttcaaagttgttccttaaacctcagagaatctctgtatgaatctctcccattgtcttactaaccttttttagatactttcgcatgtcttgtttcctatgttctatctccaaactctcatgacattcaaaattgaacacatttgtcacttagattttctctaatttcacccaatttcattaactctctcatacttgattagtcttaatcttaactgtttttaaaaaagtttgctcccttacgttattataatcagctttcaatctcaatctgtttccaggttctaaattctgtatacttaacaatggtagaacgcaagaaacggaaacagattcagagaaacaacagtgagagcaacaggaatcaaaagagacgaatttcacatgataagattaatagagatgagcttgtagtttacagaatcttatgtcctattgatgttgttggaggtgttataggtaaaagtggtaaagtcatcaacgccattaggcataacacaaaagccaagatcaaagtatttgatcagttacatggttgcagccaaagagtcataacaatctattgctctgttaaagagaaacaagaagaaatcggttttacgaagagcgaaaacgagcctctttgttgtgcacaagatgctcttcttaaagtctatgatgcaattgtagctagtgatgaagagaacaacactaagactaatgtagatagagatgataacaaggaatgccgtcttttagttccgtttagtcaatcttctagtttgattggtaaggctggtgagaacattaagaggataagacgtagaactagagctagtgttaaggttgtttcgaaagatgtttcggatccttcacatgtttgtgccatggaatatgacaatgtagttgtggttagtatctgaaatagcgtctttatttgcctgttctttgttgctttctattgatgtttttcggtcttttgatcgaatagatatctggtgagcctgaatccgtgaagcaagcgctttttgctgtttctgcaatcatgtacaagatcaatcctcgtgaaaatattcctctagattcaaccagccaagatgttccagcagctagtgttatagttccatcagatctttctaattctgtctatcctcaaacgggattttactcgaatcaagatcatattcttcagcaaggggcgggtgttccgtcatatttcaatgcactatctgtatctgactttcaaggttacgcagaaaccgctgcgaatccagtgcctgtttttgcttcttctctcccagtgactcatggttttggtgggtcttccagatcagaagagctggtttttaaagtcttgtgccctttgtgcaatattatgcgtgtaatcgggaaaggaggatcaaccattaaaagaataagagaagcaagcggttcttgtattgaggttaatgactcgagaacaaagtgtggtgatgatgagtgtgttatcattgtcactgctacagaggtttggttctgctttttaactttattttatagttatgaagatattgttttgttgtttgagtactcctttcgtttttatgcagtctcctgatgatatgaagtctatggctgttgaagctgttcttcttctgcaagagtatatcaacgatgaggatgcggaaaatgttaagatgcaacttcttgtttcttctaaggttattggatgcgttatagggaagagtggctcagtcataaacgaaatcaggaaaagaaccaatgctaatatctgtatctcgaaagggaaaaaggatgaccttgttgaggttataatccttcttttttcttctgttgcttttgtattctgtttgaaatataatattttctatccattaggtatcaggtgaagtcagtagtgtgagagacgctctcattcagatcgttctaagacttcgagaggatgttttaggagacaaagatagtgttgctactaggaaacctcctgcaagaactgataactgtagtttcttatcgggtagtagtaatgccggttatacacttccatcgttcatgtcttcaatggcttctacaagcggattccatggttatggaagctttccggtaaaaagttgcatattggatttccactgaatctcttgtagtcaattccaaagtcatgacttaggctttttctatatacaggcaggagataatgttttgggatcaaccggtccatactcatatggacggtaaacttgcaaacttggcttctttgttatcattaagactctttttctctgtaaatgatctttctttatctatagtttgccttcatcttctgctctggagattctaatcccggcgcatgcaatgagtaaagttatgggaaaaggaggaggcaatttggaaaacataagaagggtttgtttctgaaatcttttgataatctttatttcggttttcttcttcttcttcttttttcttgatttggtgattacctctatctacttcagatatcgggagcgatgatagaaatatctgcttccaaaacgtcacatggtgatcacattgctctcttatccggcacacttgaacagatgcgttgtgcagagaacttggtccaagcttttgttatgtccacttgaaaaaaaatagttagggatcattaggccgagatgaattttttttccttttatctctctgtctctagctttttggtgagtttcatcacttctgcttatcgtttgttttagcgagctgttagcacgattaaatgtactatatctataacttatggtgcctttgttagtttcaagcttttgcttaatcctctgagcttaaaccggctctgttctgcagctttaatcatagtttgagtcttgcgactccttcttttgctatgtcatttggtttggttcggttcaacacttcaacggttatgtttgtaggctctctttaggagttaggaataaagaccctctcttattatgagtaacgtaactaacatacatctatgcaaaaagtacgtgaagtcgtaaacgagaatccaaaagtacatttgtaaataataatattattagacaaatcgtgataataagttaacgtaattacgtaaatatgtatatgtttgtgttcatcacatgtacactgatatacggactacggaggaatacaaacatatcatatgattggttggttttcccattttataataaataaatgtgtacgatcataacaataaaactaaataattatgagaaataatagttagatagatgatctggaaatcgtgttactaatatatttagctggattttgattaaattattctcttgaattatgatgcaagagtgtgttatttaggacggaagaatcttggatgtttcataatcttttgtttctatttttttcaactgatgttgctgcgtttgcatttaatagtcacatgtttttctctgttgtactccattatttttcatcatattctatattggaattatcgtaatttttttatataattttcccaccaagattttacatcttttcttacaacaatttaaagctctcatttaaaccccctataaaaatattcacttgttatattatgaacttcagtacttttactatgtgatattgtacatggtttcaagaacaatgaaatccaaatgtaagagttacacaatttaagagaatatatattgtacggaggcacgatgtggcgtttttacgtcgatgatcaaaggtgagaaaaggcgggacgtgcaaactaagaatggactcatgacaggatgtgcatgtgacaccaatatctgcggctttttttttttacttacttgctaagtctcttcccttattgattcagatctaaatcaatgctatgtactgtgtcatttcagaattaacacatgacttgtccaaaacattttcacatcttttgttttttcgtccaactatatatcatcttaaatatattgaggttgattgtagtaacgcttaattaacaaattgtactaagaatgtattattggttatagtcggcaaaactcttcttcgcaatttcctattgtacgtaattctatttttaataaaagaagaagactttgataagtaaatcttaaatgaaagaaatgagaaatatcaaatttaagaactgacttgtctcttctcatattcaaaatataagtaattttattagaaaacattgcaagaaaaaaaattatgcatctgatcatttatcttttgctacaaacctcaaacgcaatagttaatccaatgaatggattctcgttgaaacgattttctaacagaattctaaaaaactaatcgaaactccaaatttattagagaaacaaatgatgtcttcattgctaacacattcattcaattttgttttacccaaatggtgttgcactccaaagacgtagattgaccgtctgctagcaatattgaaacatcattccacactgattttaaagtatgagaatagatggtaatattgttcacttacaaaattgtaatatttccctcatagtaatagaattagttcttttgcgcattcacgttattctaaatccaccattgataactgtgaattgacaagttttaatgtccaaaacaatatcagtatcaatacccaagtatcatttctcaacatatatttatttcgttttagattaggttgtcgtgtagatctttttcatgagtactaagaaaatattctaaagaattttgttttattcctaattaatatattgtttttttgatgtcatcaataaataaatttaaagaatagaaataaaattaaaaaatctttcaaatatttgcattgaaaacaaaaaagaaaaactaatttaaaataaagattaacttttaaaactacaactaattcaaacgaaggaaatatgtgagaaatttcaattttttaaaatggtgtctaaactaaagttgttaaaattgaaaaaatatataaaatacatgaaagtatgccaacatatgtaatggagtttgtgtttctggccaatcctatgattggaatccaaatttccatttcatcgcctagtaaatcgaattatcgaacttataaagaacaaaagaaatgtcctaagaatagactagagcattaggcaaatccaattcattctcaacaaatgacctaacgacttatcatgtggtacagctaagtcgaaaatcttttattgaatccactataataatacaactctatatatctcatgcgaatgaataataaaatcatctttgtataaaataataatacactctacaattatgtgtataatatattatgagtccaaagactaaataattacataattttaaaattaggaagaaaaaaaaaaaactaagaggatctatttatcttcttcctccttccatttattttaaatcatctctccttctttagattcctttctatcttcttctcttctcaaagatctgattctctcaagtctcaccaatggcgataattctccgttcatcagatccactcctctcacgaatccatccggaaccacaagaaatcgaccacttcgataacctcccagactcaatcctcctcctcatcttcaacaacatcggcgacgtcaaagccttaggtcgttgctccgtcgtctccaaaagattccattccttaatccctcaagtcgaaaatgtcttcgttcgtgtcgattgcgttatctccgacgacgattcttcctctctcctctccgataaacctcgatccgcctccgccgcttctcctttctccgccattttccgtctcgtcttcaagccgttacaagctttgggacagttccttaaacgctcaggttcttcttctcttccttcaggatcatctccttcttcgttgttgattagtggtggtgatgatggagagattgaacaaggaggtgtaacgcatcattcaccgactcaggttttgaaaaacttcgatgagattaagtttcttaaaatcgagcttcctagtggtgaattagggattgatgatggtgttttattgaaatggagagctgaatttggttctactctcgagaattgtgtgatcctcggtgcttcctctgtgattccgccgacgaattcggataagacggaagcgagttcggctcccgtcgcggcggtggaagataatggaagtataccggaatcgttttatacaaacggagggcttaagctacgtgttgtatggactataagctctttgattgctgcttccgctagacattacttgttgcaaccgattatagcagagcataagacgcttgatagtttagtgcttactgatgttgatggtcaaggagttttgtgtatgaatcgagatcagttagaggaattgagagtgaaaccattgtcagcttcttcagcttctaagaggactcttgtacctgctttgaatatgagactttggtatgctccttctttggaattgcctgatgggactgtgttgaagggagctacgcttgtggcgattaggccgagtgagtcgaagaaggaggtgtgtgatgtgtcttgggtttcttctgcgtttgatgagccttatggggtagctgctaagatgttggttaagagaaggacttattgtcttgaaatgaattcgttctaaagcttgacgatttcgctaagtcggatctgaggtattaaaatactctgtttttaaagtaattttgagtatctattgtgagactaaggaactagtattggtttattgattctaggaattagaacgaattcattataaatttgactttgaagattgtaaattttatgttttggacaagtttcattgtcacaaaccttattcttggttctttcttgtttgataggtgaatgaatcacaaaggctaaccaggttttgaaagagagagactacaatgcataagatcagttttgtatgcagtgtgactaatcttagattcaccaatggagctcaattctatgtgttattggtctattggaaggttcgaattccgtctgcttggtcatcggaaaccgcattcgctggctgttttttgttttagctggcaaagcaatcatgtaagagcaagttttaatcttataaaatcttccatgtagcaagttttctttcattatttatgtgaatattgtttgtaggtaagagatacagttgctttgcttctccttgtcttttgtatacttgtcccaagttgtttaaaaaataatattgagcaatgtaaagtactttattactttttaccacatcaggtaatttcgtttgccacctacttgttcgtaattcctctaaatttcgtattttttggcattatttttcttttaaagtttttcattcaataccaaaggcaaagagtggttcaggagactcagggacctgtaccaccattggattctggttcggtcctaaagctaaactaaaactacagtatattttataaaaagaaagcaaaagtttcgacgtatgttatctaatatttacatattaatctactcaacctattatctaccatgttaactacatatggaatttgaactcatttttgaaccaatgatttttttgcaatttatgtgttgatcaaatcattgaaaacccaatgaaatgcaacttggtctaaaactagcgacgttgttaaaatatgtattggtggacttggacgcaagcaatgtgtgtgcctaaattgttttaaagatattctcaaaaaatttaaaaaattccgctttacattgattacatatgcatatcacatgacaagaagtattatatatgttgatatgcttagtctgtttgaaagatattggatacttcaagaagaaagagcccacttgtttactttcgggcaggcaaaaagtttgtgattgggatgaaattattgtaccctttttgacaacaaaattaatatgattacttacggaaattttagtggacattgagtaatgatgataatgtagaatatatgtcacaattgtcattatttaagatcaaataaatattttttccgtaataattctgatgaaatcactatttcgctcagatacgttcacacaccactttttaccataaaaatataatttacataaaacaaaatgatatgcttttgttatctatgtgagtttaatccttgtaaatttttttgtaaaaaaagcgacattttaatttgcatcagaacgtgttcgagttttactttgtccctgcaatgatcaaatgatctggtgacgagtgaaagttgtgattattaagtaagtatacaattgtattttcagtaaacaaagattaagaacatgtgtagctctaaccaaacttaattttttcgtttcagctcaatggggacattttatggttcaagcattgcttaagcttagggttaggcattgcttaactctcaaacaaaacaaccatttatcgttgcaaacgattcatctaattttctttgctttaactttaataaacatactaacatatacatagcaacttctattgtaagaaaagaaagataaacattatcttcctctcttaatcagctttattattatattcatgaataaatctgattgacgtaatttaatctataaccaaagagacttttattttcgaaaagaacaaaatcacggacttctcattgtgcatgtaaaggctttggaggaaaaaaagaaagaaatggatggttaaaggcttcccgaacattaaggctttttcccccaaaagaagtaaagaacatattatgtcgaatatattatacacaaatgtagaaaatgacctctccactcttcagagcctaaagaaaaactgtttaattaattcaaaaatgaagtaaagtttaactaaaagaaatagtttagttaagatatctgaataaaaatattggttagatctatgatctatcaaacggatcagtacatgtacatcctatatgaagaacctccgatgcttaatttgtatctaattttagtttgaatcatcaactatctattttttgtatgtttttcacttttactttttgtttttaaaaagccatggtctgtaattttatccaccagtttgtggtaaaagtcttgagacttgctaatatgtagaccgtagacgtacagtcacagtttgtttcgaaaaatctaaagttggttctaattgattgacaatgtaaacttattaagaatattccctttggagaaataactttctgaaagagaaggttcgggattataaggccttcttctttccggcccactggagtccaatcttcgtcgaaagaaaccgcaagagcaaaaaaagtgaagcaactcttttagaaaacaaaactcatgtaaaagaaaacttctaatgggtcgataaaccttgaaacaaagtcaatgttctaagcccaatataaacttaaccagataaagaaaagaaaaaatcatatacacaagtgttgatacaaacttatatattatgaattcataattactgtatatagaagtcaatataagtataataataataaaatataaactatataaaatcaataatatattgcaattgttgaaaacagtatcaataaacatttgccaattgcgatgttacataattatattcaaaaattatatttattaaaaacctacaaaattatgtgttttcataataaaatggttatctccaaacacttttgtgttatttaaaatattttgtaatgtctattgtttctaatgttttaggccaatataatattgggactcccaatcaaaggttttttaagatattattatctttctcacttttggaaattacttgaaagtacctaagcctcaaacacacatgaatcacaagtaaaacaactttactctaaatcccaaaaccacacaaaagttgaaagttttctaataaacaactaaaagaatgaatttaataatactttgtctagtaccctaaaagatgggttagccatgtgggtgcagaagatcaagtagcccatgaaagaaaaagttaaaaaaacttataataatataaacagatcataagaaataaaatcatgaaaatttgggaatagccattgttgaagacaacagctgtcaaatgaagaagatatattcataagatagatagattataaaaacaatacatatggagagagatgatgctaaggaagaagggaaccaaacatagagcacaacaggagacaattcattttgattttcactctcttcaatgcataatggccttaccctcaatttttcagttttgtctatcaaaattatttatttccctgattattatgtatattttctttctttctatttttatttacaagtttttttttgtctcttcacttaatttctgtattttttatttttttgggaaaattcttaatttctgtatttaattcttctgagtatttgatttgattcaatctagtaccttaaaaggatcgccctattgccttgacctaccatttgttcatgaataccaagaaacagtatcttcgtactataaacaatttactaaagaaaaaaaaaatgctaactataccaattacatggcaaaaataacattcaaaaattcaattataaactcacaaacaaaatgctattatcacaaatacaacattacaagcacaatgcaaaaagatttccaaagaccctcaatacataaaacaaaaccctaacacacatcagacaacgaaagagattaacatttgttttgaaataaaccaaagataaacatacaaaatgagcatttgaacaaaaccaaagatgcaataattaatatcatcagttcttgcctttacccttatgttctgatgagtttctgcatccattttcatagtaaagctgaaactggtgattgtggtggtgattctctgcaggcagtgcaccgaataagaactgtggacctcctccactttctgatgttggaaacctctgtagattagcgaggaatgactgatgctgatttgttgaattggactgaagggtccccctgttgaaaccactgaagccaccacctgatgcggcggagacggcagctccggcgccggagggtgttgacatattaaaatcaagattgaatgctccgccgttggattctgccggtgatatcaaatggtcgggaacgaatgaaaactcttgatgctgatgatgaggatgatgatgatgatgatcggagattgatgagaaaggatgagaatttgttgaaatagggaaatgggtttgttgacccgacccgagaattaaacccgaactgaaatactccattggagatgaagaaggagctgaagccatccattgccggtttgagttaaccggatctgaaccggaatttaacaaatccgtaaacgaagtgtggttatgatctctttccttggtctctttagctgttctctctctagccctctctctagctttatctctaagctccgatcttgataaagacaaaccagaagagttcttgctcgtgtctgaattgctactacaagcagatttagacaaggaattagcagcaactgttgttaatgtctgattctggtgattctcgtcatcggtcggaaaatgagtgttgttgagtgaaggaagctcagagattgaatcttcagcagctttgattaaccattcaacagctttgctaggttgatcataacctaaccgatcttgaagatcatagaattgaagagcggtggagactgataaccggacacgacggtcacgtggtcctttagaagtcaagactttgctgtgtcgatctttaccaccggaagctcgtgaaaccctaattatccgggaagaattgtgatgccaccggcttaaccggttgttcacttcgttatccacaacgtcgccattgttgttattcttcattagatctccaatcatttcatcatcaccaataatctcatcactaaagaaaaaaaattagggttttgtttttttttggttacccccaaaattaaaaatcaaaactttagggttggtttgggatttaaagaaggagaaaaaaatgggtttttgtttttgttttgtttacccactgtactttgtaagcattgatgatgaataccctcagaggaaaaaccaaaagaagaaaaaaaatgtgtttttttttaaaattaatttagggtttttgatatttcaccatcaaagtcagtagatacagcttcgtataagctttgtctgcagctgctgttgtttgttgcagagagtcatcaaaagcactgtgtctgaaatgatttttaaccacaagcctgcaataacaaaaacaaagaaacaatctcataagaacaaatctttacacatatatatatacataaatgcttatatatatatatatatatgttacatccttatcgactttttctacagatgactttcattcatatatacacataattaagatatcagttattctgattcgaatttatgctctactcattgtagatctgacatatcacaacaattgataaaacgggtttaaagttaatgatcgtgattaaagaagaaggagctagaagaagaatcagaagctatgataaataattaagctgaatcaactgctttcggctgaagcgattatcaatggagggctttaaagagtaagaagacaaaaaatgcagaaatcgagttttaagcttttcttctctatataaagattttggtgtttctaattatgaaagaaaaagagttgtttcatagtaaccaacaagaagattaaatcaatttaaaaattcttaaaaaggaatcattattgatgtgttctggattctatgcagatcacaggtgtcaagctcttggctttgagattatatgaaaccaaaattttaaagcaaattaaaggaacaaatacacttctttctacagtgaaattctcatcaagaaataaaaatcttagatctagaattgtttttttggaatcagaattaagtataaacacgaaattcagattctttctatgaaaaagattggtttttgtttgtttctcggaaaattcgatgagataaattgagacttacagaagaaacagaggagcttgagcttggagttagtagtagtaggtgacgaagaaagagggctatagggttttagggatttgtatataagaaataaaaatccgagaaaattggaatttctttgatggtgattttaaaggagtgatcatcagatggggagagagatattgggcataaactttgattttatttccatttttgcccttcattacattacttattcacggaattgccacggtcctctacaaaatatctgtattaaattatcatcctcagtaatttgatttcaggtgagaaaaattatttgatattttcgtttgtttttggcaataaaaacacaagaaaatatttaaagaagttttttttggcagctattatatcaagaagttgtgaacataaatgctatagaaatgttagaaacaaatcaatgcgtgaatatgagaaatcatattatctcatgtcacatgtatatttatgtaggagaggagaacaaacaaaaaaacaattcactttgtccaagtgtccttaggattttagtttgttcatagaaatagaattcgattaatactcaataatctactctatgatatgtttcgatcataaaaaatgctacatgttttatgttttcaaaataggtttggtctatcattctttacatgtaaagctcatggttttccaccaattccttcggaacatagatttagatagataaaagattcataccgcaatataaacatatctctcattctcaagctagttttccaagtttttatctacttgctttaaaaaaggaactctcgcggtctcgcctacactcttagtctttttgttctccgacatgattaatattgtatattcagaacattttgcagagtaaactcgaccctctctcttgagcataaagctcgaatccttcctctgtttttttattatctatttggtttgaggtcttttaattttagatatgtgagtaaattatttatattttgtttatgtgtttaaagtttgcttatgttaatgaaatttttttataaaaaaatgctacatggaaatatatatactgtccgtatcataacaatgttaattgttatttaccaaaaaaatatctttattacgataaaaacttatactatgaatcttagaaattagaaaaattgtaactattatgtgtgaatttcaaaaattaatcaaatgaaaaatatgtcgtcaacgacctttttaactaaattatcgtataggtcttagtcagccattgctcgggttcaaatttgaaaagtttgggattttatatagaacaaaaaaaataaaaattttatatgagaaaatgtctaaatttagcagtttttatgatatttttctatttttaaccataacatgtactagcctaataaaaatataaaaacaaattttattttggagacaatgcaaaacaattatcaaagtaagcacataatccaagcaaatatctaaaaattaaacaaactattttaaagtagaaataactaaatttccgggataatgatatttaaggaagaatgaaaactattttaaaacctatacatttcttttccacctaacaaatcatattgataaagaaatccaaacccctattttaataacttacactatgtcaatcccacatcacatcactagaacttcatggaaaaaacacgcacaatttaattcaagaattagtacaaatcgtttgcaattttaataatctagtagtatttttttagtcaagtggtattacaccatactctattaactttaataagtacagattagttattagttaatgtggtttgtggaattcaataactgcgattaagaacaaatgacgaaaaagggaaagaagtagagcaagtggttcacgacggtctcgagagcacgtgtcgctgtcttaacggacacttgctcacttctcgatcactgttgcctttaccagaccactgcacgtgtctgcttcttggtcacccaaatttctgcttacttattttctcatgcttattttttttttaattttctgcttctgctcatccaagtcctctaaatgattattttttatttttttgacaatcagtcctctaaatgaatttcaatcactaaaatagacaacaacgaaaaaaaaccacaacaaaaaactaaaattaagaaccctgattcttatatatatgttgcttgttaatatcaaccttattaattataattggccttggagatttctatattttgtagttatacatttcttcttttctcatcatagtattcatgttacttgtttagttaggaaaatagtagttatgtttatgttcctgaatagtagtcaatactgaatatcaagattcagaatacccatgtatatgtttgctcgtaatgtaagatttgtaaataaccaatcgtcaaataaccaaattatatacggtcagtaaagtttatatctctttcaatagtatcagtctatcacgtaggcatattatgagtttaagtattatgcgtttaatgtgttacattcaaaaatttaattagagtatccgtattttaaatattttaaaaccaaactatcaaaaataattagaaaataaaaacaatgtatggatctgaatctttactagattcgtattgtagtgcgtactgttttgaccacagtgagtgatgtgatgttatgattttataaacagcctttttattgcacatgtactattttctggtcattgcaactatgtactattactgccttgcacaaaaataatatatccatagaatttttttgtgttgttaaatctaactatttgaaacaccaaaaatggacgatgaagttaacaaatcgtatgcattgtaatattgtataggttgggtaaaattattcaatttaaagatgggctaactgcgagagtcatgtatcatttttttctttacaaacaaaaaaagataaaatcactaatacaaatcggaagtttttcaccgatttaatgagttaaattatatttttatgtttaaattggttttagagcaaaataattttatacgaagacttgcgttcacatgcttctcttattttactatttcatacagtttttatttatttatttgtggtatctagaaaaccagagtaagtaaaatcaaacgaattaaacaattcaaacaacaaaattgaaatataatttttgtttactgtataaacataagaaaagaaaagaaatccgacacgaaattatttcttaatctattgtgtcaagtgttttgattaagagagtacattaaaatacaagtgaagttgatgtccttttaaaatggaccattaatgaatctagtgggggcatgactcatgattaattttgtctattaagcttcttacatgctctatatatggaataaaccctaattgtgatttgaaatataggtccacctagaggtatatacctttctattattagattaactctaattaatttattattacccatttcatgtaaatcaattcagactagtctatgaactaaacttggttaatttatctctcgtcaatcatcgaaggaccacaacatacatacatatatttgttgcaacatctaaataatatagataaatatatatgttatagcatattatataaattatagcatagtcaaagtgagttcaacgtcatgtttccatcaagccccaaaactatgattaaagcagacgaaataaaatgtgttaccaccaaggaacttacaaaatttatatgtaaaattaattttccaaaataataatttggacaatattatatactttagttaaggcccagtgtatacttcacggcccatgttaagtttcggtttataactttggtttgtttggtttaaatgttcagactagtttcctttatatgtggtttaaaagtggaaagtctccaaaaaattgaaggcctttccgatagttcaggctaaatagaaggaatcaccggtcgtctaaaacaagggaagatatttaaactcatcagactctcccaccatttaaagactactacgaatatggagacaaggtttccaaatgttgcaaaaatcaccctacatctttatctccgacgacaatgatcagaataatctccagtacacgagcttgaaagacgtgatctcaagttccgatggatttggttcgttgttttgtcacccacaatacagtgttccttcacaagatggttttctcttgtcagagatggattcttctaacatcgccattagcaacgagctcgtgaaaagagcagcctcgatgtatgttcaatcttctatgattgtcattgctcctgacacgaattggttccagagattctgtttgaaggctaagcatcaggcggttgctgcgattgattgtcttagaccggtttgccggattttcgctcggtctagttaagagatgtctttagaaagggtgattctaattcttcttagtaattgtgtaaatattgtatataattttagattatcaaataaaatttctcaatcattcaacagttttttttttacttcacctgaagcataagaactcatttatgaacatcatacctacgtagattaagcatcacgcccaagtcttttccttttaacgtttcttcttagctcgtttggaagaagacctcaacgtctcttttctcagatcttccgtagcttttgtgtccaggaacggctgcaaaataagagcaaaatctcaaacaagttaacacatgaaaagccgggttcatcaactttcactgtttaggttccaagtctaacaatttcaatcccaacatcaaagaaccctttggattttatgcccttggtagttctttgcgtttaagctacttcttggtccgacctcgtagtccattataagagtctgatccttagattaattcattggtttcatgctttgatttgtatatctatagagtcgataagcaactaatatgatatataaatcaagactctattaagatagataacaatgggttcattctacatctaaatattgctacaagttcaaacaaacaatgaagtagataggaaatggatttctaacctcgtcctttctcttttggagctccagaagctctcggcaaagagcaagacactcaacgtggtaagcagcagctaaatccttaatcaaagctttccttttgatgatcccaatcactttcaaaagaaccaattcaaagcatttggttagagaaatcacactgcagagatattgaaagaagtaaaaatagcaagctggtgaatcatgatcagagcaaaaacataagtatgatcttaaacatcaatgtttcatcttaaagataatccttcatagctatctatacagttgctttaagaatgcagattgagaatcactaaacttccatgaatcttcttcatttgatttttttatgaaactaagaaacagaatcaatgttcacaatcagttttaactataatctctcactcagcaaagtaaagagaagctctttctctacacttagtcaaattagtgattatgcaggaccaaggattttcgattagaactacaaaaaatgcgagctttgggtacgattaaaaagatcattctaattgaagggagataatagaaaaacccagaaagcaaaaccctagaaatcaatttgatgttgcagaagaaaaggggaaagtaagatattacttcgactaggatcgaatgtagccggaggagtagacgtttccggtgggggatgttcgggttgggatgaagattccggcggagaaggaagaggaggttccggtgaagttcgcttctcttcttccgccattgaagaagtttcaagaaatttttttcccacagagatttttattttattaaagtcagctgaagtaaatacaaaatctccttattgctattttccactgtgatttatttatttccgttttgttaaaaaagttttaaaagctctttataatgtcattttatcaaatagtgatactattatattttaatttctttcatataatttatcattgtttatttcgctgagggaaaaaaaactataaagtcgtttaaaaaaaaacaaatccaactatattttgtaaaaccacctataaatagtacaattaatcgataaacggtctatttccccatgggaactatcgcatctggctagatgaagcccgatctttgacctcttgctatttacccatgaaatgaaagttaaacgtctatttccccaccaaataaaagttgaagagcttaatgtccccgaaataaaacttcgagagcttaatgtccatagaactggattaagtcggtttactgtatgcgaaaccgatgacttaaccaactaaacctatttagaaccagaataaacctaatttaaaccaaaattatgacccgtaacccgactctcgaacctaaaaaaaaaaatccccaaattctctcccgacgaaccctaatttcactcccgacgaatcctcaaatccagtttttccaaaccctagaactttgatcgatcgatgtcgggatgtcgttaatccatcacgaccccgatcttgttggtgatgtcgatcccgaagctgaagacagagataactttcacctggaagaaatgctaaacgagtggaccgacgaaccaccaattcgccacgacgtgtacccggagagcgatggtgaaggagccgacgacagttccgacatacatgtgaggcgtggtgatgggtttttgtaccacaagcagagtttcttcagtggagttgcgttcaaagaggcggttatagattatgctctgagaactggacataatctgaagcaatacaggtatgataaagataaaattgggttcatctgtgttggttgcgatggtaaagagggtggtgctaagtgtgagtggaaagtttatgcggctatactcccgagtgataatatgtggaagattaggaagtttattgacacacatagctgtatccctaatggagaatgtgagatgtttaaggtgccgcatatagctagattgtttgttgataaaattagggatagtcctgaattttacttgccggcaaagattgaagaaatcattttagaacagtggaagatcagtgtcactaggaatcaatgtcagtctgcaagaaagaaggctttgcaatggattgaaaaggagtatgatgatcagttttcaagactaagggactatgcggctgagattcttgaatcaaacaaggattcacacgttgaggttgaatgtttggtcagcgatgaaggtaaagacatgttcaataggttctatgtatgttttgacagccttagaagaacttggaaggagtcttgtaggcctcttataggcatagatggttgttttctaaagaacaaagttaagggacaattacttgtagccttaggtagggatgcaaacaatcgcatatatcctatagcttggggggttgttaaggtagagaacacagataattgggtgtagtttatgaagctgctgaaagaggatttcgatttaagtgatggtgagggcttcatcatgatatcagataggcaaaaggtagcttaccttgtcttgtatatgttttattgtcatttgaatttgtttaatgttatctaatgtttgtttcattgtttcagggtttaatcaaagcggttcagcttgagttacccaagatagagcatcgaatgtgtgtgcaacacatctatgggaatttgaagaagacttatggcagtaaaacaatgataaaaccattgctttggaatttggcttggtcttataatgagaccgagtacaagcagcatttggagaagatacggtgctatgacactaaagtctatgagtctgtgatgaagacaaatccaaggagttgggttagggcatttcaaaagataggcagcttctgtgaggacgttgacaacaactcagtggagtctttcaatggatctctgaacaaggcaagagagaagcaatttgttgcgatgttagagacaatcagaagaatggctatggtgaggattgccaaacggtctgtggaatctcatactcacacaggttagctactctatatagcctttttattcaatgtttcttaacctgatgatttaatgcatatatttctcttactttgcaggtgtctgtacaccttatgtgatgaagttcttagctggtgagcacaaggtcgcttctactgccaaggtggctcccggtactaatgggatgtatgaagtcagacatggtggagatactcaccgtgtagacttggctgcttacacttgtacctgcataaagtggcagatttgtggaatcccgtgtgagcatgcatatggcgtcatcctccacaagaagcttcaaccagaggactttgtatgtcaatggtttaggacagcaatgtggaagaagaattacacggatggcctctttccacaaaggggtcctaagttctggcccgagagtaatggtccgagagtgtttgcggctgagccaccagaaggagaagaagacaagaagatgacaaaggctgagaagaaaaggaaaaagggtgtgaatgagtctcctactaagaagcagccaaaagctaagaaaagaatcatgcattgtggagtttgtggggcagctgatcataattcaagacaccataagaatgacaaggtttgtgtttagataatttatgacattttggttcactcttgttggattatactaacacttggtcttcttttgcaggtttcttcttcgcagctttctcagcttgaaccaagtcaaggttcactcactcaagcttgatcgagttttagaactagggaacttattttgtcgttgtcactaggtcttttgcttctttgtttttctcggattattgtacttgaacgaatgaaatgaagccattaggtcttttgagtatttgtttcatttgttttcacgggttattgttctttctaacacaagtcatttctaacataaacacaaacaatagtagtcaaaggtacaaacacaaacaagagtacaataactaagcattcatcctacaagtttggtaaacccaatcatgatcatacaccctaacaccatgacaatcattagcttcttattgcttgctttcgcttcagacaaagcttcttcaactttctcaagtacctccttctctatcttcatttcaaccttctcggaaaccatcttttcaaactccaatttctctattgtaagctctttcagcttttgctcaaattcaccattttttgctgccaatgtctctatctcattgagcaaggcatcatcaacccatttaaaagtgtgttcatcattccttagctacatatgaacaatgatctttcaaaattagaagaatctaaacatcaaaacagaagaattacattcattataggattaacattaccctatttagtgcagctaaaccacaacgatagtatcgtcggcaaggattcgaatccgatttcgaaatgagaacaacgactgcttccccacaccaacatctctttggcactccaaccactcttcctcgaccacgaggtcctgtagatcccgacgaacttgatgacagattgctcatctttcaactgaaaatcaaaaaattgggaatcgatttagggttcttgagttttgagtttggggttttagattttggatttgggattcgacaatggatcgggtttttaaaaggaatccgggtttttttggtttggttttgaccgataatatggtttcgtctcgggtttacgtatcaaaccgaagtaaccacgatttggggacattaagctcttgaacttttaattggtggggaattagacgtttaactttcatttcatgggtaaatagcaagaggtcaaagatcgggcttcatctagccagatgcgatagttcccatggggaaatagaccgtttctccacaattaatttattcgggtatcttttatcaactgttttttttcttactttctagaacctctaaagttagcacaagaattaaattaagaaattaccatgtcgttatcttgatattttcgataattacataaccttataaagtcttctaatctttctctatagtctatataaagtccttcctttgttcccaaccattaatttaagaaacaatcaaatctttcatacataacaccttaatcttccttcctctgcccattgcaagaaaacaaaacaagactcttaaaacgcatcaatggcgaatgatatgaggtttattcaaacatggggagaggtcacaccttcactatctcatcggattcagcagagacgattatcgaggagcatctcgcagcctaaattggaaacgattttcgaagaaggatgtgatagttttgcagtcaatgcgcctaaacggattgtgatatttcttccccttctactctcgatgattttgtactttgtcttgtacaagactatcaaatactattgattgcttcttcaatttgtaatatggatgtcttgttaataacaaaatctatccatgattttaggtaaatataaagagctaggatttgaaagagccgagcttatttctactagaaaatgtgtgtttgcatatgtaacaacccgttctaaccatgttcagaagagttatatgggccaaagatctagaattaatcgtcatatatagtttgttctcaaaatttgatagcaagtacctattttttgttgaattaataaggggtgtttttgcatatgaattcatttgtcaaaagttcttattggtaaaagccagaactatgagcataaaacacatgttatagatatttgtgaatcaaattaacactatgaataacataagcttatagaaaactcttctccttactcatagttacatttgaaatacttatgcatatttgtatatatgttcaagaaaatcgaacaacacgatcctgtctatacaacaaaacacaagatacggctgatatgatcgccggaacaagaagaaacaaacgatttctttgtcccacgacgacagtgtgataacgatcttgatgacaaaaatcatcggatctttcttcaaaaatggtctcaagtgtcggagacattgaacaactccggcgagaaatcaccggcgccggcgccatttcagctcctaataagaatcttattcttcctaattctgatctaaccatgacctcaatcttttttagtttatttattttttctcgttcttgaaaatgttttaagagaaagctgtgaaagtattcagattgtaatgagtttcaatggtgaattcttggtctgtatatatagagtttgatgcaaggcgacaaaaataaaaaacacggtttcaatttgttgagaaaaagttttaagaaaaaaagacacagatgtattaacggttgtctttggtccaaattgactgaatggtctgtattactacacacgtacgtactaattttgatataacaaaattagatattgtagatgtaacgacaaagttttctctctatgatttgttgatgcatagaaacaaaacaaaaaaaaaaaatcgaactgtctcaagaatatctttgggatattttttaatcaagatcttttaccatacgtattgctgtgcaatatgtttttgcttaaatattgatgttcagtctaattaaaccgactgtaccaagccaaaatcatgcacaaaagatgattaaaagtggaaccaaaagataaatatattaattcagttttaacctatagtagtttgtgttagaaccattgatatgtcactcggattgaagttcacataatgcatgatcataattctatatgaatgatctatgtagtcaattaattatagtttccatcactgatacctttcaagtttgatcgtatacaagtttgaattttaaaaattattaataaatgtaaagaaaataaagcctgtaaagattaaaataatcccacgagtcacaacttgaaagtcggagaatatgttgtgagaagaagaaataaaaaaatatgggagaactatgacagtattatcgagcccacatttcgctttacaagtcttgtttggttagctgtagttatctctacgtgtaccaaagagactcacagatgagagattcatttttaaaagtttgtcaacgttcaatatcttttacaacgtctagaagctaatcttctttttatcattctatttctaaacaaataactccttttactctaaaagcacaaatagcttttaattagcaaccaaaactttttgctcatataaaaatatattatttatccacttttgcttaattttacaagttgtctcactatagtttcacaaatacaaatattcagcaataatatctacaagaacaagaagaagaagaaccatctttttaaattgaagaaacctaacctatgaacatctctagcgataatctctcaacaaacttaaacacatgtgtgacaactgacaatccatacagattcttattgaccttaatcggagctattattggaatcacaataaaacctaaacgcaaccgcaagtttttcactgtgatataccaaaaacttctcctttgcacttctctccacataaatattgaatatctgtttcagtcaccggaacatatccaactctgttcaaacactttctaagctcatcaagctttctataaatctctttgttgctactcagacgagttcttgtgaactttccctcagcaagaaccacttctcatattgatgcattccacatcaaacgacattttctccatcgcttcagttcacatcattcatatataccagtgtaatgtttcttgtgtcccgtttaacacgaaaccgagattcttccacgggtctcaaaaaagtgtttcccctccaatacaagtcctacatagtttcatgcacagaggacggcgctcgctagagtaatattgtttggcgaatttcattaaggaagcagcttcaccatgtaatgtaacgaaactgttcctgaaatagccgggaataagcgtcactatttaatttctggttctgtgatctttgcaaaccgaattaaaccgggaataaagtattgtgttaaaagctaatttaagtattaaaaaatggaactatgatcaccaattcgagcccagttaaagtggttatctctctatatgtggcttatggaggagattccatcagggttcgagcggcgtattggtacgaatggagaaggaaagttggtttctctccatctacttaattgatccttcgatgtcaatctataaggtaatctaaattactttttttttggcttttacttcgagaaattttccaaaaaaataaataatatacatgaatattttttgtttcctaaataagatgttgttaggtaaaaatcatgtatttattaaaagacgttggaagccaacaatttgttaaatgtgaattgatacatagaaagctgaaatactaagagagataaactcggtataattgatgatatataatcgaaactacatttaaaccagagagtacagaaagagcagcttgaagcaagtggcaatgctagaagggcattccactatcacggaactattaccccaaggcacaccttgtcgcagttgcttactttcttcgactattctgtacctctctcgattaaagacattcgggaggagctattcaactattatcagctattgagtctctgagtggatttcctctcatcctcatagatctctcagttgttaaacctgccatcgataatctctactaagtttatatgattttggtagtagtcactctttcaagagaacattaaagaaagaatcttaaaccactttttgtcaaataaaaagaaaagaatgttggaccacaagttacatagatagagatcattttaacaaacatcaatatgaatcctcacgcgtcgagtgagacctgaacgttatagcaaaacacaaccgcaagtttttcaatgtagtaatacaacaaaagcttctcttttgcacttctctccacataatgaagatccgtttcagtcactacatccaactctgttcaagcactctctgatctcatcaagctctctgttataaatctctttgctcctcgaattagttctatctccgacaacaaaccgtgtgtaactaaactctgtctttaacctcaatccaactaactcctgaagtttttttttttttttgtaactcttgcatgcttttttattaacttgatactctctctcattaacctccttaacttcactatttcctcacacattctcgcatatatccactaaaagcatgcgtgttcctgaattttctcaggctcaagtacatttttttttataatcaaaaatatttatatttaaccaacccaaaacggccttggaccaagacctatttacataaataatccagttacagaaacagtttaaaatcgccagagtttctctgaaaaaaacgatccttgctgatggtcggaagcagagtggccagagccttaaatccgacgaactcaagaaacaaaattaacagctttgtagccacttgaaaactgagaagtgtaaacagaagaattcggttttgtatcatgcatgaaacaaagaatccacattttaccatatatatatatatatatatatataatttttttaaaaatataaaatcttaatattttcgacaatctaaaacacaataagatgaaaatgaatcttcttttcaagaaacagaaacattggagaaacaaaataagatcatggagagatgatcatttgttcacagctaagttaaaactttgcaaagaagaagagaagaataggaatcaaaacgttgcgagtggaaattaaacttaatgggctcaatctactgggttcttgtgggctttgttaaatctttaaatgttcgtataatgagttaaatacaaataaagtagaacctttatcaccaattcggccttagcaaagtggttgagtctcagctgagctcagttcccaccagggttcgatctatattggtaccacgttaggcttcttccgagcaatcagtctcgaggatgcttctttccgccggacggatgtctcggtgcgcttctacttccccttgtggaatgtagcaatcttcccagtgctatctggagtcaagttcccagttctatctggagaaatatctccgaggtcctatcctcgtggatgtcgtcctgtcttccaccatcattgtggttaagacccaaatgaggtaatctaaattacctctctttttgtataatttctttttaggttgttgcaattatgaaaactgttattagtgaaatatgaattagaagataatttcttttgaacaggataaacgattttgagaagtctttgtattgagtactcaattcaaatcttgttcagaactttcggcgaacagtttgtgggcttaaagtgaaatcaaaactcaaatatttccccataaaatttcaagagacctttcacaaaacgaagagtaaacgaatacccacaagaacgaggaacagaaaaaagtaaccgaaccaaataagttaagatcgagattcgaatttcagatgattaatctttacatttccggaatgtgtatcaaagaatctgaaaatcattctaagaatcgaatgttaccataatctaaattacctttattttttgaataaagtccaaaacagtaatttttaaagttttttgtaacatttttgaatgggcttatagtttttttaacatttttttattaaacgagatattatttaagttaacttttttttttggaaaatttccaaaacagtaatttttaaacttacagttttttgatgatttttattcaacgaggtattatttggaaaacggttcatgtattttttttgtccacaagaaaaaagaagacgtatttgtttttggatatttccggataaaactcattgtcatacaagtaatattaatacatattcaccataaatagttcacatggtttttggaacagtctatttcaagagatcatcaaaaaagaatgttgaaccacaagttatatataaaaaacaaccttacaaataataataacatattgatattaaaaaaaaacagcatattgatatcatttactagaaagtggaaaaccaatcccattgcgtgttgtaggaaatgttgcaaacaacatactagaaaacacccctacgcctaccggcaaagctgtaagaacttccaatgcttctgctgacggtgatggaaagaaacaatttaccgcatttcgatcgaataaaaccaccgcaccaaacacgaataacgacatgaaagcatgaacaaaatctataaatcttagcttatatctcttagataactcttgaggaagagttgtggatccatcaatgatccaaaacccatggattgttgcaagtccatagcaaatagtaccgtttttgtctttgtaagaatctgtgaagctaagtatgaagcaagagaatccacatattgctaccagtgtcgatgtcattatcttgctcactaaatcgcattgaccgccatttgagaaaattggcgatagaagctgaaacgcgagaacggttcctgttggtaagagattagctaaatgagcagtggtttgaaatgtttgacctattgccttttgtatccatgtcgttctttctatatccgggaagtctttgtcttcttcaagaagtggccttgtaatgtcttctttagtacctttttgatgaccttcgtcaactttgatctccatatctttgaagttgtttcctttgtccctctgtttttctctgattttaggaattgatttgatgtaagaaggaatgatgatgattgatgaaatctaaagtagaggtatatataatagagcgaggcgagagaaaagaggctttacacatttcttatgccttgcaagtaacctttgagaccaaaccaaagtctttgtttaagtgaagcatgttctttgcacactcttctttatttaagagaggattataaatattattatattttacgtctctattttgatacgttttagaatcctcttttctttcaaggtttctataaagtttcgtgacatttctgagtcgttaccaaatcttttaatttttgtttttatttttgttttgatggtttatttttatttgttcatatacctaaatcaatgtcgtaaatgttatcaatatcctagtgggattattcttgagaccgtgtcatttgtcaatgacaaagagggtcgtataacatcagctataaatcgaccctttcaatttaataacttggatcttgaattctcgatcatattttctcacttttaaagtggatattaagaatcttttgattatctcgttaatttttaaatatgactaatccatccattgtggaggtcaagtaacgtctaacaaatagataattaatttttggataaacatatatgtttaacgtaaagtgcttagtcaaccaaccacgaattttcgtttctttcacctttatgcatggttcctttttaaggaatttttgtgtagttattagttggcattattttaagttaactaacgttagttaatacgaatcctcacacgttacacattttgctataatatatccaaaaaatattttcaaagagtcttacaatcaagagatttaaagaggtgtttcactatttgacgcaattcttaatttttgaagtagttaaaattttgaatctccggtttcgtattcacatgatgcttagtttttctattttgctgcattgttctcatttcttcagtactaaaaagtaaaaatgatcataattcatgatttagtttataagaaatataataatattcgcatgaataattatgatgattgtcaagtgtacgaaacaataaacatccttagacttggaaggaaaggtgttctcataatttggacggtggacctaacttgcttccgtgtggaataagttatacatatcttcctcttcttctctttggtttttggtaaattatttcaattatttctaaagtttggtaagttaattttttttttgttacgtttaatttcctttttatatatattgatgcgatatgtttactaatagatattttaaacatgtacctgcgctggttcgaactcaaaaaccctaagaaaaaaactagccgatgctatttagttgtatagaaaagctattttcttggacgctaataatctttcgattagatacgataaaatgttcatatcataattcacattactaataagtttatcagattctcgctttgttagcaccagacttttggtatcgattcaagtcggctactcatgtcctaaagagaaatcataactaaatcttacaccaaaagctaagattatggttgtttgatagttccctttttgggatcatatatgtttgatcagttcggtattagtaaactatcttattaaccggaccaagtcttgttcaattcaatacaattcttcggtttgtattataaaacaaaccggtctcataaccttaaaatgaagcccccaaaaatagtccaatacaacaaaaccaaagccaaagccttcttccaaaaagacagtttacaaaaacaaaaacaataatctcaacctgagcaacaaccagaagatttaacagcagtaacatcatccttatttccgatatcaatggtttgtcctttaggtaaagacatcggatctccagtaccatcaagagctttacggctcattacacgatagatttgagtcaagacatgagtgaaagcttgttcgacatttgtagcatccaaagcagaagtctccatgaaaaacatgttttctctttcagagaatgatctagcttcttctgtgggaactgcacgaaggtgacgaagatcggctttgtttccaacaagcatgattacaacgttggcatcggtatggtcacgaagctccttgagccatctttcaacgttttcgaacgttatgtgtcgagttatgtcgtatactagaagtgcccccactgctcctctgtagtatgcactcgtgattgctctgtatctgtataacaaataagtcgctattactcaaaaacagagcatatagagaagaaagagagcataggagtgggagatcggtttacggttggttagtttcggctattgattatatcggttaatagaaattaaaaccaaataaaataatttgtaatctggtttattttccaatttgttcttgatttgaattaagttatatttggttccttttagcaaaaaaaactttttaccaagaaagttatatttggttaatctatagaaattgattattaaaataaaatcattatctagtcaaatattatatcagtgcaatatacttattccaattttccatacatatacataattaaaagtatattatatttataaaaaaaatcgaaattgataattgaaataaatcatgatctagttaatattatattaatgtaacataactatttcaatttaatttccatagagatacataatcaaaagtagaggatttctaaaaaaatgcggtttatttggttacactaaatcagtttatattggtttcaaaatagtaaaacaaacaaatttgtaaaattatccagtttgatttttgttcaaccatttcggtttggtttggttcaaagaatgaaacaaaacagaacatatagagataaaacagtgaaatttcgaggatttattacctttcttgaccagcggtgtcccaaagctgagctttgatgattttttcgtcgacatgaacacttcttgtggcgaactcgacaccgatggttgactttgactcgatgctgaattcgtttctggtgaagcgagacaaaagattggattttccgacgccggaatctccaatcaagactagtttgaagagataatcgtagtcgtcgtcggctctgtaggctcccattattaaggtatttgatagaagttacaaaatcgtaaagaagaattcagagagatgttgcaatatgatctaatgaaatgaatgatgtgttgttgtgttttgtaatgaaatgaaattatgggtagtgggtaacgacgaaagggcttattggttttggtagtgttataaaaataagaataatattaggattcaatcatttgttattattatatgcatgacttagcatatgtatatgttttgaaagtcgttggaaagattagagaacaaacatgtttgacgaaatcttcgggtttatggccgccatgaacttggtaaacgcagaacaatatacacttgcaggaaaaaacaatattattatgtcttcaattcaataattcaatttatagcttttctcaaataaaatcacagggaaatttgttcataaataaaattatagcaatgtgtaggaagatatctaggtaaaagattttttatggtatattgtcatgaaattttccatttctatttttaacttctaaggattttttttatatgacactaaatatagtgtagagttgagattattgttggacacatgtactagacttttagtaatagatcaagtctaaaggaaactagtaagtttgtttttgagatagatcttatattatttattttagacctaaaaggctaaaacatttgtgttcatgtaaatgttagcaataaatagaagaattacttaaagctcttaattgacaaacaacattttaacattattatttctcagttttgtttctgtggacaatttatttgactactatatgcatatatatttgctagattttgatacctacataacacttggttataaagaaaaacaaaaaccactcaaattgaatttcaacttgagaactctttattatttgacaccaatgtgtatatgacctattttattacaataatttgtattggttcgagaatcattgaccacagcttatagctcaagacttagataaaacacagacactcaaagaggaaacataacacaacaatggtacaagatttttcttaacattttaaacgacgacttgcaagtcaccgacctataaattgtctctgttttccaccaatttcgaaaagaataccataataaaagaggacaatctatcaccactttgatcatcatcaatgtcccaagtgcagagcttcatccacggccagtgccaatgcagcagcagcaccaacatatgtgtgtggagttagctccagaagttggtcttttgcttctgaaggcaattccaaacctttgataaacgttcttatggtttcttcattcacagcttttcctcttgttagctccttcagcttctcatacggctcagggacaccgtatctcctcatcacctttatttgataccataatacttctgtggattagagatacatcaaatatcttgattgatatagaagattagaaactcgagaaatttacagtttgtattggttcagcaaggacttcccaattatcatccaaatcttcttttaaccgagcttcattaacctatatcaagaacattcttagtttgtgacaagtggaaacatttcttagggctacggtaataatacctgaagcttcccgattccctgtatcgcactcttgtaagcgagaagagagtgtcctaaagctccacccatgtttctcaagacagttgaatcagttaaatcacgctgcagattgtacatttttcaggcttagtttacttccatcactctagctgagatacatagaatatggagaaatgttaaaacctgcatgcgtgaaatgggaagcttcatgctgagaaaagtaagctctgcgtttgctttccctagattcccttcgctgttctcaaagtcaataggattcactttgtgaggcattgtcgacgatccaatttcacccgctttagttgtctgcaaaatctcaaacaatgagacgattttcccattcagattcaaatgatttgacatctttttttttcctttcttatattaacacttgcctgcttaaagtaccctagagatatgtagctccatatatctctgtcaaaatcaattaaaatagtgttgaactggctgatattattaaaaagtctagccatatagtcatgaggttcaatctgcaaaaaaaatacacacagaacaatcaatcagcgatgatctttatgaatttgaataggattgtttgatcaatataaactatattacctgagtcacgtatgggttgaatgttaatccaagagaagtaacaaactcctcggaaacatgaggccagtcaatattcgaatatgcggaaatatgggcgttgtagttcccaacagcacctgcaaatttccccttaatcttagtttctgaaagatatctcctttcttcgcttaacctcacagcaaaattcgccatttctttccccaaagttgttggcgtagctggctgcattacaattcatagtaaacaaaatcattagtaaagagatagatacagataaatagggaaaggtaaaatggtgaaggtcttctctttggacattacctgcccatgagttcgtgaaagcatggggacataagcaaagttcttagctatcagagagattgacttgatcagctcatccatggtaggaagtataaccgaactaagtgcttcttgaagcatcaaagcatgggaaagattgttgatgtcctcagacgtgcaagcgaaatggaaaaactcaagaacctaactcagtaaaaagacatccaaaattttagttacagggcatcaaagcatccaaaccctaagaacttataagtgagagaaaagaacctaaaccttagcaatctctggttgtgattcacacttttgtttcaagaaatactccactgctttcacatcatgatttgttactctctcaatcttcttaatttccaatgcatcgtctatgctaaatccatcgattatgccttgcaagaaactctgagcttctttgctaaagcttggaacttcagtgacttcaggaatattcgaaagcttaagaagccatttgatctaacaaatatataaaaatatcaaagtttaggcaaatgagtacactagaccagacaactaaactactcgtacaaagagatatagcatgacataactagtacaatcttctcaatcaatcaaccaatcagatcataacccttcacttacctcgacaaaaactcggaaatagatcaatccaaactcgctcaaagaagaagccaagtccttaactttactccaataacgtccatccaaaggcgataacgccgttaaattcgacatctccaagtctctagagctcactccatccattgccgtcacctaaagcatatcaatttatcgccaattcttatcgaaaacatccaaacaacacatcatttcagcaaaacccacaaataaaaaacttacctttgttgaagtcactagcttgggagaatcagtagtagtagaaacagagcatgaaactctcggaagccgatgatgtgaagccaaacacactgattttgatgggtttaggaatattccggtgggtgtaaaaccgaaagaagggattttggggtgtgttatagccattgaagagaaattgagctccatttttgatatagtgtgatctcaaaggtctaaactttaaacctagattccagaatcaaagcacgatgtgagtgagtcactggaagctttgcgtaactgtaccgccgatatatagggttttaggagattccgattaaaaaaaaacacatgtgcattttttttctttcttccatatttacccttgatgtccctacttattacgcttattggaggaggattatttgttacttatcaccttatcctttattttgaacacgtttattaatagtttcaaatatatggattaaaaatgccttcaaaataatttggagggaaactttaataatttataaatcgtcgtattgtgaatcaaaaatgtttggacaatgacaaaacaatactcatgtgttttatgtgtagatttatatctcactaagagtttgtcatatactgatataactgaaatgaaccaaaaactgtttattaataccatttgaggttagttagtacaattatatgtcatgtataagattagaaatgggttaacaagcggcggtctcaatggtggcgttaaatgactaaatgtaaacattttactatttagatatgatgataagtagattcacaaaaaaaaattacggtgttaattttttgttagttttctctgttatgtctaaacgatattagtttactgtacactacgatgtcgttttatcgattgaaaatagacaaaattcctaaatcgaaactcatttagcttttagagattgaatgagatcaaggtggataaagtagcttaaccttgatcccaaaactctatagcgtcgatggctggctttatttctaattgtatcgccgtttatctctttggcgattataggctaacttttgttccggtttgatgaactgcaacttgaaaattgaaaagttgtctattgaaaaagaaaatgaaaaaaaattacaaatttaaattaagtgaaattattctcatcaagctaaatagtttttttgggcgaagattgagatctaccgtctgcattagttttctgacgatttcaacctgaattgaagctctctagtgttagaagattctaccagtgacggaaactccatctccttcaatttcccacgtgtcaacccaacatgtttcccaattaccacatatcccttgtgatatatacaacaactttctcttcagacaaagttctttaaactggctgttgggcctttgcccatgtatgttttatatttggcatgttaaattggcgttgtagtatgtagtatgaataaaaacacacttgtgacagaaaaatagattaacgtttttttttgtgaaaaatgtaaaataaataaataatcttgacatataattatacaatatatacatgtctatatatgtatacctatcaaattagcaacggtagttttcaatgtatttctgtcaaaaagaagataataacgtctccaaataatcacttcccaaatcctcaaactcaaacaaaccaaacacatcacatactgtctcttctccagtaaccgtcttctgcatttcaacttcttgacacatagaatcttcattactccttcgtctctttcttaaatcgaaccaagtttcttcactcccacgcaaaccacgagtctccgagtgctccttagttgaacaatagctaagggcacaatggttttcaaccatcccatcaacgacttcatcataagccttaaccgcctcttttcctgttctcaatccgattttgcggctgcttcttaatggatcggacgtatttgagttgttcatccggtagtagtttgggttgcaatccatttccatagcttttataactgtttcgagctgaaaatttgtgtgagctttttgagtacctctaattctaaccgcggctttatcgtaagccatagctgcttcctctgcagtttggaacgttccgagccaaaccctaacaccgtttctcgtcgaatccctgatttcggctgcaaatttcccccacggacgcttccgtactcccctgtattttcttgttttgcaagaaacccgagaagacaaagaacatgaatcaatggtagggttggttaatggatcatgattggttttgtttgggaaagaagcaatagcatcgagaatctctgtccattcctggtcctccgtcgacatatctaggctttgaagcatttctctagaaccttctggtatgtcatcaagggtaggcaacgcttcccaagttctagaaacttctggaacttgaattgatcttgtatcggtttgtggtgttccgatgtaattcgcccaaacgttctttaggatctcgccgtctagttcttggatattgccaaaagccattgttgaatcagagaggagtatgtgttggtgagatttagggcattttaaagagattgttgctttgggggttttgtgtgtacgttgaatgggaaatctgcggcaggataattgggaagtacagttggtgaaacttgtgttctaaggtactgaccgcatttcatggagggttttaggttccacataaaatcaggggttttctgtgtatacacacacacacgtaccattatgtgaatagatcatcttaagtcaacttcaataaattaatttaataatgttacctcagtttgaagtataaagattgtgtactattttcattaaaaaagtgcagattgtgtactcttgaaaaggactagatgcagagtattaattcacttttgtataataaacatattaatcttcagtttaacgcttcatgagaatctatgacgtgttcccaccagaggcacaaatccgttttggagaattgtgattattaaatcaaacataagtttattgttttaatgtttcgttccacgctcgtcgcattttaaaaaactttttaactatttttttggttataaaaagaaatatagcttctaaatgacttgtttctactgttagattgatgaaccttaatactgatttagcttttcatacatcgataaagaattcttcggtgtttagttaagtttgttagaagttattattttaccatacgatcacagtttaacgcatattgcctagagaatataatataatgataactaaacgctatcaaaatgtgaaacgaaataagaaaaaacatgtaagggctaagtcatcactaactttttatccaagtattatttgtatgagatcattttccgtaagtccaaagatttgaaacaatgatgagaggtgaatagaatatataaattccacacgctttgaaacatagcttacaattgaaaaaaaatgaaaaagagattaatatctctattcaatgtattatagagaatgagctagagatactttatatggtaggttcaagtcacctcaagtacgtatcagctaatattaaaaaactatctgctaatttttatatcaatcgtttaagattcattcattcgttctccactacgagagtttcttgctttggcacatatatagttcaagaaagtctcgtgttggagagactccaagcgtgctagagcgtttcgattagaaaggtgttttgttcgagcattaaagattgttgcaatggttctatcttaaggtagtcatttgttaaattttggtattcaatctcgagagcttcataagtctagcgagcttcataaacacactacaagtcatgtgtataaaatttccaattctgtaatcacaagtctaaacttaatctgaatccaaatcacaaaaagcattttcaaaattgattaaaaaaaaaactacaatatagaaaagattttaattgatgcttggaacggaactaacattacctgttatgatttcgggcctgaaagtattctgagttttgattcagaaccactcggtattaaagaaaaagaagacttactacaaaaaaaaaattatatatatttttatgaattattataaccaactaatattgtctctattggttctaagttcaaacttctaaccttcgagggccgggttcaaattccagtaagtgatttattttttgctaacaattctcttatggcgggaaaattgacttctgtcgagaattagggtttctacaaatctttctccgttctaatttcggattaagatttcaatctctccttctcgttttcttctttggtgctgctgagaagaaattagtgaaattgtgaaagagaagatgtcgaaagagacgaagggtaataacaatacaagcagagtgatgagtggctatggcggtagcttggaagctaacaccttggctatgattgattccaccggagctaaagacagtcgcgacgctaacgaagatcgtacgtttcctcaattttcaatcttcgtctttgtttttgttaattgtattgatcctttgaatgaaaaaccttaggtttgcagtatctggaagctgttcgtgctgcttcacttgtacccgaaaatggaattcctccaaccaagtaaaaaataaaaaactctgtttttctaagaaatttgaagtttttacctctaaaagagtactgattttgatttgggttttgtttaattttgaagcaaaatgtaccaagcgattttcaggatattgagatttggtaaaacattggaacttatcacagcaagtttccagcttttgactcaattacatcaggtacttgttgcaagattttggtagtgtaatttgtccaataacttttatgaggtttcagtgttttgcttattatgattatgttttgtttcagcggtttccttgggtttatgtatctgattcagctgatcagttggacatcgttgacgaggtacttgttacaaaagttttgatgtgtttttgttcattctttgttatggtggggatggttgatttcatgtgtttgtttatggttttgttttgcaggcttggtcaccgtttaatttcgggtctgatgttgattctgatgaaaaggatttatcagtgagaagcttatgtaaggacgtttgtcttctctttttgagttagctttttgttggttcttgctaaatatgattttttgtttgttttatgatttcagttttgcaacagctgattcagaacatgaacaaaagagttaatgagtctgaggaatcagatttaaaggttgatttatttgttatgttgcagataagctttaaaaattggtagactttcacacaacttgttgttatttgattcttttgtttggatttctgcagatccttggaaatatgtttctgttcaagtatcttgctcatgttcttaagctagatttcacaccccgaaatcaagtgtatgaaggtatagattatgtcttcatagttttaagatttctctttatcttgttaagtttggggaaattcttagaactttttgtgtccttttgtgctccagaaactatgaactggagtctcttaaaggaatcttttctgaatctacttctggtacatcccacaatcaatggctcagaaactagtatagtaatttatttgtgatttttaatgttatggttctgcttgtaggcttcaagaaaagtgaatttcaaacttctaatgaaagattatctatcaacaatgtgtgcatccattgatgctgatgaaaagtctatcagtttggtagaattgcacaaggacatgcttactgctatgaaagaacttctagtaatggtaagttttcggttaccagagtattagtgtttcaattttcggagctttttgctcttacgtttctgttccttgtttagatcatggagcttgatacatcaaagaagaaagctgacttagaagggattacctctagaggagatggcgtaaggtaatgagtttctgcctcacttttgaattgtgttttctccatgtttgtgatccaatttgatgcaggacccctgcaatggagatcattctcgacgagctgacttatgatggatacttgctgtcaaaatttcttcaggtaagagacaaaccacttctgaaactcactgtggtctgtaaaattcttctctctgtggttcttgagtgaaaatttcttaatcaggttttcgatgatcctaaatggaagctagagattgttctccaataccttactaaatacattcctaaggtttgttgttaattctctgatctctcgctctctgattatcttctccaacaaatgatgtacaatatatagttatttctctgatttctctctctgaccaaatttctttcatgttgtagcctgttgtacgtacccgaagaacaactgttcctcaagcagaggattcgaaaacactaaatgggatcttgaagacgttttcaaatggcacaaatccaaagaacatcactaaaaagataggacctgacattgttcagatcctcatcggccatgcctttctggtaacacaataatacctttgtttcttctttcacgttctcagagctttttttggcctcctaatgtatttaactattcgtcaggctcggcttacattctctgaccctcacgaaggagactctatttcagagatatgcagtagtatcatctctgcatttactagtctaaagcgagtagatcagtaagctgcagtttctttcactctcagttttttttctctttgtgcaatcgagatactataccgctttcctttgtccaaccgaaagtttaatggttgttataggaaaatcgagattctaccgtttgggaaagaagtgttgtttactgcaggaatggtactcaaggcaaaagcttaaagcatctaggaatcaagattttaacaaatctagagacttcaattggattagaagcaaagaagttacaatgtaatgtaggaattaagagttacagatcaatgaattatgaatttatatattctatagttttgccaatacaaaatgagtgatcttatgattctgttgatgcctttttctcacttatggaacatatcaagacttgctttagtaacaaatccatgcctgataagtttatgcaaaacaatcttggcttacttggtggattgaggtgagtcgagctgcatcgtgaccggaccatcgtttacaagattgacctttgaatatgattagagaacatgttttaatcacacaagatactaatcaaaccttgctattgaaaggagttatctccttacctgcatcatagctccaaacacaccatctgtattttaaaaaagagaaccaatttagtcaagaagactagagaaaatgagaagttttgattaagaaaagatcaatgagagtgtgttttgacctttgacagcatcaggattatatgctttctggaatttctcaactaaagaggcgtaaaaaggtttcgctttatcaggtggcattgcgacatgaaaatctggtttgttacctttcaagaatccgtataatgtgaattgactaactgtattaacacacatgatccaaagaccagggcaagcaaagaaaacaaacctcagtacataaaccacaagctaaacctttctctaatcaaatggtatatgaataataaagagatgcatcattaccaagtaaaactccataattcctctgcattacctgcaacaaacagcatcaaaatttccattttttcaaataacttgaaaaacaaattcattgaaacaaaacttacattttggtcccatcctttgccagtggtttcattagagaataatctcatgtttaaaacttttcgacatctataaacatgtttcaacttcagaatctgcaaactttataatgaaaatttaaatggaagcattcatcattttgtacaagcatacatgtaatcagcgtcagactcggtatctgattcatggattccaattagtaccaagagaccaggaccaatctccgatacgattcgaccatccaccgtaacagaggaagatgagactctttggattacagctctcattgctctgatctgacaattccgacggtgaagtcgttgactttggtggcgtagattacggcggaggagaaaaggtgagagcttgttatggagtggtggagtagtgtgggaagaagaagcaagacgatacattttcttttaattattaaataatcccaaggaatggtgaacatataaccgatatcaaaccgaaccaaattgatttttttaaattgaaccgaaatcatttaaaccaaatgcctaaaatttagacccgaacctgttaatcgccggcaaccgtgtcgccatcggcgttaacaacgaaaagcacataagagagaaaaagccttctcataaactgaaataactgaagaaggcaaagctcttgggcgaagaaaagatggcgttttggaaaccagggaccgagaaacctcgtttcgaagaggatggagaaggaggcatagtgttcatgtccaacaatctcgcatcctcttcttcttctaggtatgctaatttctctttctctttgatcttacttgttcagcagatgattgttattgtaacttagtcgaaattgtagctatgggtatgcgaatatagagaagcaaagacagagattgccagtgtacaagtacagaactgagattctgtatttggtggagaatcacgctaccaccattatcgttggcgagacgggtagtggtaaaactactcagattcctcaggtttcttcttcattctttgctcttcgttaatatttttggggaaagcacctagctttgctaatttcaaggttcttagaccagtaggcaaattttgataggagtcaaaggttgcgacttgcgaatttggattgtgatagtaacttgctgatatatttgcaatgtagctagagagaggcataaaagttactcaaaatcttgcaaaatcatgcaatatttagctcaatagctgttggggaagttggagaattggagaaaactacaattcgatcaatagcaaggtcttcttgtttagctcaatagctttgtttattatattttgtagtacctgaaagaagctgggtgggctgaaggaggccgagttattgcttgcacacagccaagacgtttagctgtccaggtttgttttctctccctaaacaaaatcttacaactcaagtttgaactttgaagagtgatatctcagctcaagtttttatatttgatcacatatatgctttgttttgtaatttgcttaggcggtttctgcgagagtggccgaggaaatgggagtgaatcttggggaggaagttggctacactattcgatttgaagatcatacaacttccgtcagactctttccttaacgctcttctactttttcttatgtatggagtattctgatgatgcttacaagatcttttgcttggttacaacagggtgtgactagtgtaaaatttctcacagatggggtactaattcgagagatgatggaggatcccctcttgacaaagtataggtaatgattttgttgcactgtataatctgttcagattatgagtaaatcgtgttggtaaaaccttttcttatttgtcattgtgcagtgttattatgatagatgaagctcatgagagatctatttcaactgacattttactcggtctcttaaaaaaggtatctcagtcaaacacagtcttaattgttagtgtactttcagcaacatctatttattattgattttcagatacaacgtcgtcgtcctgagctacgcctgattatatcttcagccacaatcgaagcaaaaaccatgtccaatttcttcaattccaggttctgatcttaccgaatggttatagttctttttcctgaagtttagggctcttggaatcactagtacgatataatcttatacattatgttaaattatgtagcaaaaaacgccatgcgccagaaggtagtacccctggaccaaagttggaacctgcaatcttatctgttgaggtatattgtgactctcttgcgtaagatcattctctgataacctattttcctatgtgatatttaaatatttttgttttcttggtcaaaatttcttagggcagaggcttcagtgtgaaaattcactatgtcgaggagcctgtatcagattatatccgatcagttgtttcaacgatactgttgattaatgaacgggtactttaagttgatgttcttataaccattcaatgtgttcaaacttagtatattattttccaggtatgttcttgtatttaaattgtctcttcttatgttcaggagccacctggggatgttcttgtatttcttactggtcaagaggatattgaaactgctattaaacttcttgaagaagaagctcatagcaatcaaaagaattcttcaggtataatatatacacataaataagatcatgtcgatcaactttagcatttgccttcagtttttaagcaccataatgcaattcatatctttttcaggactgctacctcttccattatattcaggactttctcgatcagaacaggttaattttgttgcaaggctctagacaatctaaaccatacttttgagagtatttgaataactgaaacggcgaaatgttgttttctccttttttatattaggaattgatctttactccaactcccagaggaaagagaaaagttatactatcaacaaatattgcagaaacttcattgactctagaggcaaggattcttctttactgtctttttgttgcaaaatcccatggaacgaacagatgtatttctcatacagatattgctgatacatcattgagagtaactttctgtgtcgtttctttattcagggcgttgtctatgtgattgatagtggtttctcgaagcagaagttctataacccagtaagtccatctccatttcttttgtttatatatttttagttccatcttttgtaatatgttggacatttctaaagcaacttacatttcttaccctcacagatttcagatatcgaaagtcttgtggtggctccaatatcaaaagcatctgcaaggcaaaggtctggtagggctgggcgagttcggcctgggaagtgttacaggtaactctcaatccgtttattaaagtacagaatttcgtctgatatagttgtttagtgctcattaatcctcttcctgatatttttatggtaactaggctttacaccgaagattattttctcaaccaaatgcctggagaaggcataccggagatgcagaggtcgaatcttgtttctactgtaatacaggtactagacttgctcaactcttgtcatttagtttttttttataagaactcaaaagttgggaggcgttacgcaaaaccacacaagttttttcttttcaccttttctattaagtaattaatatccagatgagaggaagctcttgcttctagatttctcaaactctgttgatctttttggtattttcagctaaaagctttgggcatagataatatcttgggtttcgattggcctgcacctccatcgtctgaagcaatgattcgagcacttgaagtactttattcacttcagatcctcgatgatgatgctaaactcacttcgccaacaggattccaagttgcagaacttccactggtactttttcttcctgaccatgagctattatatatctaaaatgtaatgttcatttgcagtttgttctgcatattacatgtctcatgctcgtcattttttgctaggacccaatgatatcaaaaatgattttggcttcaagtgagcttggttgttcacatgagatcattacaatcgctgcagttctctctgtccaagtaaaagctctttacccctttttcctttgcttaaagtttcttctctttatttacataaggaacaaccgaacatattgcaaatttgtgattatttgctttcgacttgaactatgggatttgaaacttaacagatgcaatcttgaatatgtttctatgcagtctgtttggatcattgcccggggagtacagaaagaacaagatgaagcaaaactgagatttgcagccgcagaggtatgtattgatatataactttgagctaactatatctctgaaaatctttttttgactgagtaaaatcattgttcttgtctatatagggtgaccatgtcacattcctgaatgtatacaaagggtttcttgagtcgaaaaagcctacacagtggtgttacaagaatttcctcaactaccaatccatggtgcgtataataacagaacaggcaagtagtccttatcttcccttctccaatttaatttgtttttgtttcctttcacagaaaaaagtagttgaaatcagagatcaactcaaacggattgctcggagattaggcatcaccttgaaatcatgtgacggagacatggaggtaagaaactgtagcactttgcttcatttgaaaaaaggttgcatgtttctaacgttacactgtttcaggctgtgagaaaagctgtgactgcaggtttttttgccaatgcatgccgtttagaagtaagtgacccatttcagttctctttttctgcacatcctttcagccctataaagaaatctgattttcatcatcttaattcttttcgatgttttagccacacagcaatggagtatacaagaccattagaggctctgaagaagtttatattcatccgtcatctgtattattcaggttagtagtatatcttgttgctatggatttagcaaaaacctcaataacatctaaaagttgaagattttttcttttgaacgtgaaagcttatttggtatatatactctttatacaatcttcagggtgaatccaaaatgggtggtttaccaatccattgtctcaactgagcgtcaatacatgcggaatgtcgtcaccatcaatccttcttggctgacagaagttgctccacacttttaccagaaccggcaaaacgctatgtccttctaatcaataagttatcacctgcgtttcaagatatagtaacagttgatcctgacaacgttttctgatagctttatagccataatcaatgcaggaatgtttgtatgtagttacacaaatataaacagagttctattgagtctatgatttgaagtttgaacaactcaacttaatgaataaagcatagactctatattcaatcagatttgcctgtttatagttttggttcttctcaccgtttacagagtagaaaaagttaaagaaaaatgatcacagaatcgaatctcctattcagctgaaaatctcggcgaacttctcggaaactagaactcctgaatcaatagattccagtggatctttcctcagacggtgccttaagcagttagggataacggttgcaacatcatctggagttactcgatcttttcctttgagagctgcaagtgcttttgctgctctgttagtcactatgtctcctctcaacccatcaacattgagctctgaacaaactctagagatcttcaccttcaattccctatcaatctgaaccgaggaaaggtttgccctagcagttgaaatctggtcttgaagcttgtcctgctcggttttgtaagtgtcacggaaatcctttgggttactatcgaaacgagctctctcttcaacaatcttgacccgtaaatcagcatctctaaccgtccctacttgtgcatgcataccaaaccgatcaagaagctgtggcctaagctctccttcttccggatttcctgaaccgatcaagataaacctcgccgggtgagaaatcgaaatcccttctctctcaaccgtattccaaccagaagcagctgaatccaaaagaacatcaaccaaatgatcatccaagagattaacttcatcaacataaagaatccctctattagctttagccaacaaaccaggctcaaaggcttttacaccttctgtcaaagccttttcgatatcgatggttccacaaactctatcttctgttgcacccaaaggaagatcaaccatattaatcttagtcgcaataacaggaacttgctctcctttctcaactctctctcttacttcaacacccataaactcaggatctatcggatccgagttatacgggtcacctgcaactacattaatctcaggtaacagatcaactaatgatctaacagttgtagattttccagttcctctatctcccataatcataacaccaccaatctttggatcaataacattcaacaaaagacataacttcatctcatcttgccctactatagctgcaaatggataaaccggtctcgcactcttctttgaatcaaacttccctactacctacaacccaaaaccaccattacataaaaaaccaacaacaatcatgttcctaacttcaaaatcaagcaaagtctgaaactttcagtgaacatcatcaaaaaatgcttacttgttcagtagagttgatttcagtggctacattcataaccgaaacatggtaacgagacctgttcttctttggccttatttggattcctgcatttaacttgcttccaaacaattttcctgtatacaaaaattcaattcaccatgatttcgaattgagaaaaaacagtaagattttaaggtttggagagactggtttacctggcctgaagcaaatgggggaggaggaaggttttgaggaaggagaagagagtgaaggagaagcccagattgcagaagaagatgttccaagaagagacgccatttttgtgtgagcttagagtttactcagcttctgattggcttttttcaccttagaatttttttgtttccattggcttatgtttgtttctgtggtcaggataaggagatagatttcctcctctatctcctccttttttttatttataaatcaaaaatgatatagaaaataaaatagccgtaccaaaaaaaaaggcgagcttctatatatatataccaaacataagaatataaaggcccaagtcaaatcattcggagcccagctaatttcaaaatctccccccttcgagttccgtcggcgattttctctccggtgtcgtcgtcttgttgccgttgaacgtttatcgttagcgcctactacatatacaactgcaaagcgattcaatcggtaagaatttaccctcgttgctcgtcgattgagtagaatctcactgtcaggcgttgttttagcttcggtttgctaaggttcgacgattgacgatcggttgatcataatcgatgaacatttctgtgttagaggtgacgtttatgcgtagatttgagtaagaaatgttcgatcaatgctaagatgcactttctcctaaacttagtttcgtgctgctcgttgtccctgaaatttagtctcgagtggcgtctccttgcttaaaatcgacgaaccgcctggttattttttataatttggtgttgaatctcataatttgattcctgctactgttcttcttcgtttagattggttctcggataatcacattgtttgatctgttatgtttctcagtctctccgataatcatacctacgtacgttatgcgtcatatcgccttagaaatagttttagaagagtgttaatggaactgatgatttgtctatgctagttgagtttgtgacgtagtaggatgatttttttgttggttgccttgtgattatcataacataacagataagtgttttcgtgagtgagtgctagaatgattatgatggtagttttttctttgcagttggttttcaagagtgatactgaacagatattgccatgtctgcacctgctaaaagaagttctacagatactcaggacaaagatctaatgctcggtatggttcaaatgttcatgtgatatgattcataactaacatggcattgctagtggaatgtctttaagccgcttgcggcgaaaattccattgaagaaaaggaatccccaagtagactgccttaataacttgatgctataggcaaaaagatcatgcacactatcttttattcttctttatctccttattgttctatttctcaattttggccagcttttaattttttgggcgtagatagaaaccataagatgtagttcccattgttaaaatgggtgattcaaaggttcgttgtcttttaatttccatggttagctgcagataaagacatggaaaaggatacatggaacttcaagtcaatgacagatgatgatccaatggattttggctttggctcaccagcaaaaaataagaagaatgccttcaagttgtgagtgtaaccaatatgataagtttcttaaaccatgtttgcacctaaataaatgtagttcaatcgtgaaatttttcctcctttatcatgattactactataagtttctgttgcttggcaacaaggcctagtgtctcatatagttctgtttctttgtctctttctcagggatatgggtttcgatctggatggagattttggatcatcatttaaaatggacatgccagactttgatttctcaagcccagccaagaaaaccacaaaaacgaaagagacctctgatgataaacctagtggaaattcaaaacagaaaaagaatccatttgccttctcttacgactttgatgcgtatgaatccttcagtaaatcaatttccttttagaattatctatgtcatctaaaattgcttaacgccatgttatgtttttctgcaagcaggttagacgactttgatcttggttcaagccccccgaagaagggaagcaagactacgaccaagagcatggactgtgaagaaatttgtgcaagtagtaagagtgataagtcagacgatttggactttggtctagacttaccaataactagacaagttccctccaaggcaaacacagatgttcaggcaaaagcttcagctgaaaaagagagccaaaattacaagactacagatactctggttgttaataagagcaaaaactcgaatcaagctgcattagagagcatgggagattttgaggcggtggaatcacctcagggttcaagaaaaaaagcctcacaaactcatacaatgtgtgtgcaacctcaatccgtagatacttcaccattgaagacatcatgttcaaaggttgaagaaaagaatgaaccatgtccttcaaatgagaccatagcaccctcgccattacatgcttctgagattgcacatattgcagtaaacagagaaaccagtccagatatccatgaactctgcaggtctggtacaaaagaagactgtcctatagatccagaaaatgccaacaagaaaatgattaccaccatggaatcaagttatgagaagatagaacagacttcaccaagcatctcatctcatttatgttcagacaagatagaacatcaacaggaagaaatgggtacagacactcaggcagaaatacaggataacactaaaggagcactgtataactcagatgctggacattctctaacaaccctctcaggcaaaatatcaccaggcactcgtacaagccaaactgccaaggtacaagatttgagtgaaaagctaccactggatccgtcccacaggttagaaactttatgagtactttgtcattctgccagtaatttttgaagatgaaatatatatctaactgcagtatactgtaaactgagtgcagcatggcagggctcgataatttgagggccatgcaaaacaaagatttaggacttatcagatccagattttttaagaagccagaaaaacctgaatcccatgtgcttgagtcttctccaattgaaacagagattcagccagttatccgagaaaacattgggtcaagtttgaaccctacaaatgatacgaggtagtatttcttttcttcttcacctgtgtaaatatatcttttcactctttcctttatcttcaacatgcagacatgatattaaagacgcgttaccaggattaaagactagatcatgtccaattgagcttgtcaatacggattccgccaaaaatacagcaaatgttaatactagaaggtagtgttatgggcttttatgctcaaacataagaacaagcttctctctttctttgaagatgatatatataagcttaggaacaaatcccattatttttaccagcagttctcatgaaaagatcatccacaaggaccattcaaatggcaagactgtagaaaatgtggctggacagatggatcatttaaagctgcaagctaaaaatacaactagagagaagtccatcttgcagatcaatataaggtgagaaattcgttttaatacctgtttgctatctcttgccatgctcttgattccttaaacaggctattaccccatgtgcactcattgtgtataaattactaggaagttttattagaatgtcatgcattaagcttccttgcttttggatttctgtcacagctcaaaacttgatgcttctagcttgactcagaaactaagcaatcatttgagttccggagtcgaatctttgcagaagcccaagttgaattctctgggaaggcctaaacttggaaatattatggctgatctgcgtgcagtgaaaactcaaaggtacaaaaggaacatacagcagtttctggtatgggatctcgcgataatatcttaattcaaattcgctaatctcttccactataggaccattggaggaaataaagaccaaccgagttctgcagtgcaaccagaatttagctcttccataagcaaggagagaaatactgaagcaccagtaaaaaagagctctgagattcatcatttggctcctagggacaaaacacaaaccctgcactgcccatcttctttaaagcggaaagctcttgatgaggtttattcttcaactcacagtttcgatattattatttcatgaacatatttggagctagaaaaaaagtttgttgttccacaggatgcagatagatcactgaagccacagcttaaacgcctttccatgtctccaagagaaaacaggtctctaattgttgttatctaaaccatatctataactttgctttattagttctgatatatgacacgcctgagattgcacaggaacgttgaggagctcacacatagagctgtgcaaggaaaggttagattcaccaacagatccgtgattcttattgttactaggagaaaaagctttctgtggttaatttacctaacacttgtcacacatttgagtttttagttctcaagccaagagagtagaatagatactaagacgaccaaggagcctgtcaaggaaagtccacagactaagtctcattaccagaacataaacatggcaaatctggaaatcccaatcacggagaatgctgacaacatagagaaagctgaagcatatacaaaagaactcgagaatgtaaacagagccctcttctcgatcatgaacattctcaatatagtagaacaattgtaaactgtttctaactaatgcctttttgttccatttgcagatttgcaacatcctgaagaagaaacatgaggaagcaaaagagttacttgtccgtgctgtagtagacaacaataagttactgatgctcaaccatcctttatatgaagaccagatatcctttttataaatttctattaatgccattgttagattttgtctatctatatatttctattaaatttgcatacacgaactgttttgtgtgtgtttccccttaataatcagaaacattcgtttggtccagaagttcgcagccaagttgactttaagggacacatgatgaacactcaaacaactgttgcttaagaggtaagaatcttgaccttttcttttctcagaaactatctcaagatattttatctgaagagtatacactccgatcattcatttcctgacttggtagcattttcctataggttcagtggacttacaccaaagttatcgtcaaaagtccagaaatgttacgtcacattagtccaaggtactcgatccgatcgtctctttcactttgctggggtgttaacaaagaaaaaacgtaaaaaatttggaacatattaaactttaatactaaactgataaacaaattagagcttgtatcttttggattcaattccttctctcgacgattgataaattgaatactttggttagggtcatttcgaaatgaaatggatttgaattacgctcacacacgtaaacccaaaccaagtaatgtacatggctacattacaaacaaaaaccatatgtgctcaaaaaaataaagcccaataataattagtcttgttgggctcaattttataattgattttctagaccattttaaataacaaaacccggtggttcggttccctcttcttggcgcacatactaaaacaaatggcgcgtaaaaacctactctgcctggtctcaaagtcgaaagtcaaatcttcttttagtaaaaacaaaacaaaattttcgaaccaacatagaaacagagaatcttctttagttccctccacaacacagagcccttttttaagtttcagaattttagaaccattctcaaaatccctccacaacatgaaaacacaaaaaacatcaaaaaccaaatctcagatccgtcatttccaaatctgcttcaaagtccctcctattcacacacttcatatacatcttctcagttcctccttccatcctcaaatccatacatctctccctctctctctctctctctttctccctttctctatctactccatcaatggcggttctagattcaaagcctcaagaaaacaacaaagagaatgtctcaccctcagagatggtcacgattgctgtcaaatctctggattcctcatccattgataaaggcaaaacccaaatcagaataagaagaaaaaaatctaggaagcctcttcaagacatcaccaacctctttgtctcgtcatcaccattgtcctcttcgtttctgatccgtcacattccctcttcttcatctctatcacttgatcccaaatgcatgaagagaagatcttgtgtttccctcaagcctgctacttcttcaaccttctcttgtagaaatttcagatgatttttatattttggaaaatgttgtttccattttcgaattttgtatcccttttaattttattttaattatgggtatatatcaataccttgccattagcattcatataccacacaagatttatttctatgagtatactggtttctcaatagttctgattcttgccgattatttgttcaacgttggtatcattattatatctctgatttcaacgaatgggtctgaatattatatacagtttttaactataaatttgagatgaaaataaagttagtgattgcaatgacaatccagctacagaaattgtctttaggatcaaggcctgtccaataatagtgatggtccgaattgaaaatataaaatttggaccattttatctttctttcagataatattaactctaaacacacacaaaaccctcttgattattttcgacaactcctaataacttaaaaaaaaataaaaaaaaatcaagtttatccttttaacaagtgatagtcaaataacaagtttatctagaaatgggatttatatcgaaagtcatactgatgcaaaacagagaagaccgcaataaagagagtggcatttgacacatagaggataagagcattttcttcaatctccagaacaattaattctttcccaaacttatggtatctgatctcatataattgttcacagaaataaaaaaaacactgaatatcactttttatataaaaaaaagtatattccttttatatgtcaccactaaaatgcaccgtcaaaataaacgtaacatatatatgtattcactgatgtgttgcatgcatagttttttggataaacaaatttgctgacaccatttacaatgaaatacggatttggataagtactgcttcatcagttaaaacataattacagagtaagaagtgtgattgggtcgaaacttatccttttaaatatatcacttaacctcgacttagtggaatcttaaactacactactatccacacgttctgacaaaaggtattacagattataataccttttctcgatggttgaaacttttttgaatattcttcttgtaatgaaatctcctgatgagtcaaatgtgtaaatagaaaaagagtgaaaaccttcgactcaccaatactaaaccaatacaaaacccataagtgcactctgcctttgacttcatattttcatatttccttttctatcttattggactttcatgaatcaccctcctcgtccattatcattacctcgtattattaactctctcacacgacacacgtattataatattagtctatgcgcatacatatactaatatataatgtcactggatagggacggtcgagttataaatggtgtaaggtttggtattgaataattttgctttatcgacattacgacatatataattatgtgattataattagcacttgaagccgtctcttatctcgctctttttgacggtccaatgtaaatacgtatataagattcatatcttttttagttttgatgatgtactaacgtaaaacgatcgtatatgaatggatagaactttatccttcttgtttcggggataaatggatagaacaatccatatttcagggataaatcttatttacttttgatcgtgtaaatacttgtttcgagattagttgctttttatttcgtaatcgtggtgacctaacaaatcaccgagttttttaaatggatgattgcatgcatggctcaataagggtttgacaattactaacacacggtgacaaaagatcttctttcaaaaaagattcgattgggaacttttctatgttcaaaatgatataatctcagataaaatattcaatttactctatagatttacactggaaaatgcataataatcactgcaatatattcactaagtttttttttggggggggggggggggattagcataagatccatccaagagacaaggccacctaacaaatcaacgacaaatgtttaaaaatggaatgcacatgagtctaaaaaagggcttggccaatcctaggccctaacacaattcagaatatctatatattaagatgtcgatcgtattaaatatgtgtagtacaccgtaatgcggcgatctttatcattctttgtactattcaaagtaccaatttgcattttgcaagtcgcaagagtcacttgctcagctggttacagattaaatatgattattatagaagttttggtgatgaagaaaaatgtaggcaacgagaaaaaccgtccttggtgacaactcatgcttgcactcaagccttaagctagctaaacctatctcgcgcactactagaattcaaataaaactctataaatagaaaccctcatgagatctcttctttcctcatatacactcatacacaccacgtgaacaatctatctctctttctattgcttttctatatatacagaaactaattaattgtatctgtaatggctaagttaagcttcactttctgcttcttgttgtttcttctgttatcctcaatcgccgctggaagccgccctcttgagggggctcgggtcggggtgaaggtgagaggcctaagcccttctatcgaggctacgagtccgactgtagaggatgatcaagctgcgggtagccatgggaaatctccagagcggttaagcccaggaggacccgacccacaacatcactagttattttgtgtttttcaatttcttcgacatgtttattacttatcaataatttggttgcaacgaagctgtttttcttttttgtaataaatttgcgaatttacgtttgtcataatactacaaaattagttacagttttattgatacgttatcgtacgttaactaaatattctaaatttggtgattttacgtttcagattgtatcattattattcaccttttacttttgattattattttgaatttttactatacatataggctatagcaacgcggtacgtatgacgacgttgatttagatggtcttgcatgtacgtacacatgattctgttttacgatacatcgtgttttatatgccgattgtgacttgtatgttttaaacaaacaaatatgtataatttcgtgtgtcttcttaacggacaaaacagtagaatggaacgtacaatttagatgtggtcgatctagatacatggtcaattgcatacatatataagatttcgtcccataattacttgtgttttaaattgatcgttatcccgtatgacttattcagttatttggtcgtcgaaaccatgttacttcgtttttttttttttttttaggtaaagcattgtaaaatattgatatctatgaatcgatgcagtttacggtttacatatttaatcaaactgtgtaaacttgaaattttcaaaattcaacatgtctatgttgattatatgtatgcctacttaacttaaagcgtttgctccatcgatttttataagaaagagttgcaaaataatctatcagaaatctttaactaaatatgcttttacagtaaaccaaacacctaatagtactacgatcgtcccatggatgaaatgtcatgatgactcatgagtgagaaagacagattcagatgaaaatcatatgcatatcaaaagtaaactaattaaacaattgaacattatacacaaacacatataataagataacgaaaaaagcatcgacctaaaagttaaagaacgtgaagaccaaaatggaggattattcggctgtaaatggcatcatatatataataaaatcttttttatcgacgaacaaaagacggcaagcgtgaagcaatcttttttcgttaaaagcaaatcgtatttttatgagttacgccaaaacctaatgacttatcacacgaccaaaatggaccctcttctaaatgatagtagcttttccttttctgtttaatattgattaatatcatgcaaaagatattataagcatcgtgatcttcttatcattatagtacacatacgcacgatttggattttatataaatgcggcaatgaggtaatgaacaaaatatattgcttttcaagaactagcactttcatatattttttttatacaaaatattcctgatttaacaaaaaaaatgattgtccatagacgaagaaaatctttgccggataattaagagtttctaacccaaaaaccaattgacaaatattgaattatcttcaattccaatatgagataatattacaataatgacttattgtattgacggaaaacatgaaattttcgaaagatattttcaaatatattttttaagtgttttaaagaaattttatgaagttttataaaaatttaaaaactgatgtttcttacaaagcatattgtatacaaacatcattgtaagcataaccaaacgtgttttagattgtgaccatctttttttgaaactcgtttatttaggcaattttcaaaactaattttcacaaatttctatcgcaaagagaaaatgagaggaggttatcgagataaattaaattatttcaatgagttatctatcctaatttatttgtatataaatcttgagatttttttttttaaaattaacaccatatcaagtatataatatgatagtgttgacaccaatttgtttagctttagtttttaaacaaaaatcaaatatacatactactaagcataaagattagtaggcacctttatagtatatactttatagggtataaacttgtgtgtacaatcatactaaaaataaggcataacatataaaataaaatagtttacgcattttacatcattcaaaagacaaaatgttttctcactagaataaaacagtactatgaagaggcaggtagttgataatataaaattttcgtctattaaccagtatagatacgtatcgaaatagtcattaatcaacacaaattcaaagggtcttatccaggcacttaagattatctaagcattatataagatggaaagaataagctttaattacgatgagaatataaaaccatcaaaaggccataaacttggaagcagcaactcggttcattgtgccaaagtggggacctatagtgtgcattctgattcaagaaagagatgatcatgacctcaattgaaattgtaaatcatttttaaaaaaagtaaagggacttcatatagtctatatatagcatatttttatcattaaaaatgtttgtttaaagattcaacttagaaatttgattaaatactagtattacttaactagtgcgttcaaattattagtaaacaagatccaaccttacaaaaaaaaatcacactttattggcacctcaactgaatcttttattttagtcgtcaaagaaaaaaaatggattcattcaagctgtaaatggaaatgtgtcactaaggcccataaatctattttgaaaaagcccattaaaactaggttcttaagtcttaaattgaaatatatcaatctacttttttcttaatagatataattggtcatcattaaaattcttgcattggctaattgcaaagaagaaatattcgacatgaaatttgtacatttggtgctattgtggaacgcatcttttttttcataaactttatcatataagaaagaacttgaaaaaaaaagagattctaaagaagaaagatcaagatgtctccaagtaacaagttgcagaagattcaacagcttcatcgagctcaatatctccacaagtagagagaattgttgcaaatatataatcatcaacttcaaatccctctgcctccattctatacattagcttcaatgcttccctgcaaaacccattcctcgcataacccattatcatcgccttccatgaaaccaagttcttctcaggcatactgtcaaaaacccgaaaagcttccgagacaaatccacattttgcatacatgtgaatcaaagcacttcccacaaagacatttgatagagcatgattcttctttgcaatggaatggattgatctaccgataagaagagattctgaattcgcacaagcttttaaagccgaggagtatgtaaatgggtttggctctacaccttcttgaatcatctctttcaagaagtctagcgcttccgattcatgtcctaagctcgaacatccagagatcatagcggtccatgaaaccacatctctagatggcaattgctggagaacattgaaagcgtcacgagattctccgcatttacaatacagccacaccaaagtacttcctatatagacattcttttcgatcgaattcttgataatctgtgcatgaagttccttccccaacaataaagctccaacagatccacacgctctaagaatgcttactactgtcaaattgttagcaatcaaatgccgcctcttcattatccggaagaggctgatagcttcctcaccaaaaccttcccgagcatgagcagctataatcgaagtccatgtgaccgtgtttctattactcattccatcaaacacttttctgcaatcagaaatctccccacacttagcatacatgtccatcagcgaagttcccacaaaaacatctgtctttatcatcctcttaacaaccaagctgtgtacttgccttccgaatcttaacgctttctcctcactacaagccttcaaaatactgcacaccgtaaactcgttaggcaaaaaccagtgattcaacattccgataaacatgcctatagctttaattccatgcccttttctcgaacacgccgatataacagcagtccaagatatcacatctttctcctccatcatatcaaaagctcgtaacgcacttgtcaattcaccgcattgcgcataaaaataaacaagagaactctccacaatgagattccccactccaactttcaccatattaccatgaacttgtctccctaactcaaactctgctctcctactacacagattcaacaaacacacaaacatcctctcgttcgtaaaacgtattccatgcttcacataatcctcaaacagtgcaaaagcctcatcctcaagaccatacttcaaatacccatcaatcatagcagtccaagtaacagtatttttctcaggcatactgtcgaacactttacgtgcataaaccaaatcaccaagtctaacacaagaactaatcaaattgttcccaaaatagataacttgatcatcaaaacacttcaacgccatcgcatggatccttttaatgagtcgcatcccattagaagactgtagccactccgctaacagagcataatcaactctttcgctatcgaaagaagacgaatcatcctgattcacattctctcctttgaaaccactaaaacccgaatcgaaagatgctctctttccagaaactaatcgaaacccaggtaatctcacgtgtctctgttcctctcgcttagttcttgaatcgctactgtaacatatcgtcggagatttgtaggattgagtcaccggaatctctgaaatccggagacgcggttggattaacgataacgaaaacattgtcggcgatggagaaagagaagaagcttcacacagagatctcccgccggaaaaaaaatcagataaagttctcttttttatttattttggtaaagagaattaaaagtttataatctgatctggtaattatgacgacaacaaataatatctcggtcggtttcaaattcctaagcgagagacaaatatacagtacacacacgacttaatatcaaaaccaataaacgtaaaacacgtgtctcatcacttcccactttcctctctgcatttgttgtctctctctcctgaaaacccttgaattttgctacacgatctctgaaacgtgtctctttgactgacttcaatcttctttatcacttaccgtttctgggttttatgaagcaactgagctaataaaaagcttcttcttagactcggaagaagataaaaaacagaatctttattgtttaaagcttccaaattcgagaagagaatttgaaacgaccaagttcaggatattcgtttcttcgtctactttggtctcttcctcttctctttcgaaaagggtttattctgtcttaaaagaaacctttttgagagggtaaaaaaagcttcaattttcagagaaacacaaaaggcagaaacagagaaaaacaaatcatctaattcatgaaacaggtgagaatacatattttcttcttccttggtctcttctttttttattgatttcattcatatatccaatttttgtgtctattggctgtttaattgttgacgatgatgaattcagttagataattatgtgcatagtttaggaattttttagctatatcttcttctcatgtgtaaacatagaggaaaatctaaaaaaaatatctgtcaaattattgtcttttccaaattgtcctcattgtcctattgaatcaaataagattttttattactgatgattcaaatattgttaatagtttataaccttgctcagtgttcttctgatgtgtgatttaaaacctcttgtctctaggctctgatctatgttttcgtctcaaagtcttattatcaattctctaaattgcagggttcaatgaatagatcgtgtctctgtagtgtcttaatcaccactgctctgatttgtggtgcttacttcatttgcaatgcttatcttgctaaagactttaaagaggtaaacttctttgtatttggcatcacttaagatctatatgtgttctatgatactgtcattttggttaaattgttcagctgtctttttgtgtaatcagtagtgtttttttccgacatgtaaataacatgacattgttgaataattctggttttatagtcaacattagaacaataagtttagatttctgaatttgatgtataagattataaatctgcagaagttgctgaagtgggaaatcactgataagatgcataacagtactgataagatgcagaatgcaacaacaaccagtacatgcaaggtttgtctttgaaatattctttgaggtttgttttatgagattctttgatattaaacttacaaatatatatatctttcactagaatttcaataagccagtgggtactgaagcactaccgcaaggaattatcgagaaaacatcgaacctggaaacacaacatctatggaactacgatgacacaaaaaaggttatttagtagttacatgattcctcaaagatttggaaagtttcattgcttttttttcgtgtagcttaatcttttgctgtatatttctttcagagaaggcctaaccattcgatgagtttgttagccatggcggtcggtatcaagcaaaaggagctagttaacaaagttatccaaaaggttttgttttctcatttgattgtttctatcagcaagattttcgtcttttatttcgattagttatacaaattgctgtgacttcagtttcctcctcgagatttcgcggtcatgctttttcattatgatggtgttgtcgatgactggaagcagtatccatggaataatcatgcgattcatgtttccgtgatgaatcaaacaaaatggtccgttttcttgaacttcttgttattgttttcgtcaaccatcatatactctctaatacttgaatgttgttaatgtcacaaggtggttcgccaagcgattcttgcatcccgatatagttgcagagtacgagtatatatttctttgggacgaagatcttggtgttggtcatttcaatcctcaacggtaacacactaaatatagaatttgtgttcttttttatcttttttcatttctcattccaatcgttttactttagatatctatctattgtcaaagaagaggggcttgagatatcgcaacctgctcttgacacttcaaaatcagaagtgcatcatcctataaccgctcgtcgaaaaaaatcaaaagttcatagaagaatgtataaatacaaaggtagcgggcgatgtgatgaccatagcaccaatcctccttgcatcgggtaaacgcttttcgcatattccgtgaaatgttcttgaaactctctttctacctcattctccagttaacatgtaacttggatctgtaggtgggtggaaatgatggcacctgttttctctagagctgcatggagatgttcttggtatatgattcaggtaacatttgtgtagcattcgttttttgttccccgagtcgagaggattgggtttaatgctttcgtttgcgttgcagaatgatttgatccatgcttggggtctggatacgcagcttggttattgtgctcaagtttgtttcttcttctaacttgttttgataagcccttacttccttcattgtacggtttttactaacatgttcttggttgcggatagggtgaccgaaagaaaaatgtcggtgttgttgatgcggagtacataattcattatggtcttccaacgctcggtgtggttgaaaccgcttcaagcgctttgcggaatgagacagactcgaaatcaacggtatgtgctactagtgttttctatatgtttcttgaagcagttatgtgttatgattttgtatgaaataatttggttgagatttcacaggaatcattagagtctcgtgaagtggataatagaccagaagtgaggatgaaatcatttgtggagatgaagagattcaaggaacgttggaagaaagctgtgagggatgatacatgttgggttgatccgtattgaaatccgagcggtttaagtaaaccgaatcaaaccggattcttttccttgttgagtgtgctttgtggtccattgtataccattattttggtacatagattttgttttacttcgagaaaaattagtgtatttatgtgttttatggaccacagtgtagatttaacattttggagcattatacaaaagtgtttttgtgctagcaaatatttgaagattataataaatacataaatatacagaagtgtttttgtactatcttttattttagaaaccaataaagtttgttatgtgaaagtttgagacttctttgattctcctaatgggtaaatttataagaatctataagatttgatcaaacaaatatgaatggtaaagaagtgcaaaaatatagatgtcgaatagatagagcaatattttcattaaaactacaaagtcaggaattcaactaaagtctagaatataaactaaattaattttggaagttaacttaatatattatggttaacagtacactaaaatatcaccataatactgatcaaaatcttattttatgtatgttagtaattttcttatacttcaaatcaaaactattttaattattctatgtatagtagtattttgttttgaccataagttccataacatttaatagctcagatctcatgaattttgaattgatcaatcttgtatatagtatatatgatgagatctcactgttttgtttaaaatttggcgtcttcatagtttggctcaacacaatttaattcttttgggggtaagctaacaaactcataatcacatatgcatgaaaaggtcatatcttactaagtcatcacaactcttgataagattacatttattacgagaaatatcaaaattaaattttacatcattggtaaacaaacagccaaaaaagcaatttaagaatcccaaataggaccaaaagcaggaacaccagaagctttacaagcattaacaacatcacgacttccttcaggattgcttgtaacaatcacgacttgagctccaaacttcttggaagcttccacactcattttcgacacattaggtcgtcctagaatcgcagtatcgtgaactatgatcctgtcttgatgaggataatctttaatcctgttcacaacctccgacccgaaattatcatctaatcctttagccacccatatcaaatatacctcagccttactcggttgcataagaaacgataaaaatacgcaaatccccgaacccgtggcacaagtaatacctgtagtggaaaaaaaaatagtttagtaatactcatgatgtcaaaaacgacaaacatccaacaaactgctaaaatctgttactagtaaaaccctaagatttagagaattttatttaccttgtcatacaagttaacgagatagggtaagccagcgaagtgaaccgtacggacccataaatgcgttggaggttttgagactaaagactttgtaaagtcgccgacagcaccagccaacatcatgtgcgatgtcttcccatcggagattattccaaaagcatgccattccgataacggcgatggactgatccgacccaagatccctgatttcaggcctcctctgaattttatcaacgatgcgtggcccgagagagatgagacgtcaacaggaacacgtctcacggttaaccaagggagcaagatagcgattgtgatcaccagcgtaaaccaaaattcttgtgttttgatcagtttcgacccgagatcatctgtgtaagatcttgattttgggtcgtaggaaaccgttagaattacaaacgcccaaacaaggcctaaagcagtccaaccggcgaatcaatggacgcgttcgaagacattgtggtgtaaatggcgaacaagagggaacgccgcagcacaagtgaggcagaggagagagagaatcgtggacgcaactgctatgatcgctgttgaagtgttgtctctgtctttaagagtgagaaccaatgcgtagatgagccaagctaccgaggaaacaccgcagccgctgtggataccaccgaggctttgtaagagagctgtgacagcgatttttatgcggaggggtacaaaggagtgtccgagaagctttactgttaggtagaaaacgagtctcaagaaggcttcgcttctgcagagaattagggcaaggatattggcgattgaaaatagagctgctctgtttctagcgtaagcgaaatttccggtggccgcgagaaccagagctaggacgtttagagacaatgaaaggacaaagagatgtttgtaaacggtgaacagtccttgatcaagaagtatgattgatagtcttgaagggcgtttctttggaatcgggggttgctgcggtttctcactgtgtttgcttgcggaagaagcaagcattgctttttcctccgtctcattgtgttcttcatttccttccttgatcccaccttcttctaagtagaaaatatcatctttttcttcttcttcatcgtcattgtcgggatccaaatcgcagaaatggctgctggctcggctcatggagtgttcaatcgatgaagggacaacttttgaggcatttctcatgaaatcccatggaagtcgaaatctgctgctcgttccctcgcgttcagcgtttacgttgcggttctgatcagttgtaacaactgcgaaagggttagcattaggtttaatctcaaacgcaactcctcgacagctagaaaatctcacagtcgaagcgttttccattttgctatctcttttgttggttaagattaaggaggaaacaaatagaaaaaaaggatgacttaagacacaaggaaaaaatgagtttttggagctctgattgtttggtattagccttagggattgagcatgcctttttatatcaatttggtatcaccatattcaaattttcatcattgactcagagaaaaaaaccttcgttttcacgtcatttttgtttattaaggtaggaccgtcatcagaattctgttatgtacgtcttcgattgactctgacttagaactagctctgaatatgtcaaatatagaacccactgattagtgccttaaatatgattaacagaaacttgaccatgatatatattctacttatttgtattactgttgttgacagtgtgagttctatatataattgttttttactatttttctttcattttttccttgtccaagagacttgatataaatattgtttaatgtgataatgtcattacttatcatccataggtaaaattgcatgatagatgaagaataacaaatggaaaagaattaagtaacttgcctaaatttataattaagttttaaaaagtgactagtttgtaacttaacccaaaaattaacgatcgttctctaatatctctatcgtcatttaattcacgacgtgtgaaacagaaactacacgtgatatgaaactacatgtgatatgaaactacatgtgatgtgcaagtggacaaggatttttcaaactacttacacaaaagcgagtggcattgacatttattagccaaaatatttgattattgatttagtcatggatagtttgattataaaagaggtttggtcatagagtgactaagtcacagcaccattgatttacaaacatataatcattaaagtcttttaatcaaacgtaattgtagtctaactagtatagttgcagtagaacaaaaccttgattatctttttttctttctggttcatgtttacgtataaaaattattattatctaaaatacaacataattgtatagttttttttgttttttttaatcaattttttttgtcgagttgtaaacacagatgcaacataattgtacaactcacattatacgagttgttaaacattgatgcaattgggaactttttttttgtaacaaaaagaagaaactaacatgaatttcttgaaataaattaaatgtatcggattttatacattcaaaatattcaataagtattacaacgttatatagatttttttttaaattacagtttttccaaacatcaacaaaaattgacaaaagaaatcaaatctgcattccatatatcttatggtccaataacttctaagacccatcgtctagttggaccgtacttttgtttttacatgaggctcggaggtgatattggttatggttggttccaatcacatggtccatatgatatggacctatgagctaatgactactaatctctgtctaaattattttaagataatatggacgcatatagagaagtttgcttctgcaaaacacacacacaaaatatcaaaggaaaataccaattaactatcttcttagtcaggtggaaaataatatatatatcaaaaacacgtaaatcgcaataaagttatttagtacttcaaataaaattaggaataaaacacaatgtgactttcaaaattcaaaaggataaacaacaaatgatcaaattttgaagatcgagatcattgtgattaaaatcaaggttagttacacatgcttattacgcatgcggaactaaccttaattttaagaaaagaaaaacataaaaatgaatgctttgaagctagaaaaaataaaacagaacaaaaacatgcaacacaaaactatgcgcatacattcatttagccgtattgaataaattatcataaaatacaacgttaaatagataaaatagtatgtttccaaacatcaacacttgacaaagaaaaaatgaccaagaaatcagaaatccaaatcttcattatcatcaatctcatggtccactaactcccaagatccatcgtcttgttgggccatacctttgtttttaagaaccctccatttccctgggaccatacactcgtcttttaacccatccactgatttattgaccaatccgatggctctttccacatcgagtctgaataagtcagctttgttcgttccttgagtcccggcaacgccatgcaagtaaccctctaagcagtgaaaggttgcgaggtttccaggagatttcatgtatggtgactttcttgtgtctattggaaactcatctcctacctcggagtaacctatcggtggatagatcggaattacgtccggtagattccttgtccgtaacactcggatatcttccaatctgtttttatttcattatatgtcattttcaatttgaaatgatcgtattatatatagtatttatttggacgtacccggaaaagagtttcctaaagtctgaatccccaacacgaggactagcaaagacaaaggcagtaacaggacaagacttgtcaggacggctctttggtcggttataaccattagccacaatatcagtggcactaagcgtcgcgagtgcagctccaagactatgaccacatatagttatactaacttcttcgtccttatacttctccaacaatcttccaacctctcgcaatacctatattgttatctctcagatactttcgcaaacaataccaaaatggcaaaagtcttcattcaaaaagtcgtatataaacgaacctggtcacgagcattggtcttagtaaaaggtgatcgttcatcttgagacatgtagattgaataccaaccttgatgaatttgtacttgatcgtttctttcaccgaagatttttatggcgttgactaaaccaaactcgaagtcttcgacccattcaagtggttgcactgagcctctccaagaaaccacgatatctctccgaccaagaagtgccgtgccttggtcgtctgttaccgccacgtaacccatccaatttgattcctttgaccatccctcacgtgaaattgggaacaataagaatgactcaggcacgtggatatcggatgtcgcgtatataaacttcgtcactttgtactttgtgtacgggtgtgctatctctaaaccaacctgtgttttaagaatttacaaaaatgcgatttaggtttcttgctttacaagaaagtaccttctccctttagttttgctaagaaataaatatttattttacttcgattggtgacattacggaatactataatcttaaaagaaaagttgactgaatgaaatatagtatatgtgcttaatgaaatcataaattatcatttttgtgctctttttaattaaattatttcattccatcctcgatatatatttttgtattttttttttttacatttcaatattgcataaatgatttgatttttctataaaacataaattacttcagcaatgaccagaaaaacgtacagaattacaaaatcattcatgttgacaagaaaaaaatccatgtttctcggttctagagattatcaatcagaacgtttataagtattttttttttaatgttaccttggcgaagaagtcttttctagagtagatgctagcaccggcgaactgagattcggtgttgatattgaaagtatcgtaaccagcctgagccatctcaccataatgtatgatatattcccggagatcttgatccaacggctgtaacatccctttccaatggttttgaccgctcagatctcgccatctcttcgcgaattctctagtcactatcaacttctcctcctcctcctctttcttcttcctcttcatgattctcttgaagctaaaacacttcatcactttcttgtcttcttcctccataatctttaagatacctgtaatgaatgttttgtttaggttaattaggatcagagaagctccttggatcgaaaaattaaagatgaattttgttgaaaaatgaaaacaatagagtggtttgatgatataaatattcgttggcgtattgtaggcgtgttgcagaggaagtatcgttctcgatatggtattaaaatataaagtattttttatttgataaagtttcttaattgatccgaaaagatgttcttttaacgtttaaggaaagcaatagctcacctttgcatcaacatacacagtacaaacgattcctttctcttcttgtaatctttttttcactttttgccatgctgcaaatggtttaaccaaacctaaaagcggttcaatgtcaaatttactcaaatttgaagatatattttataaggaatcaacagtgaaactaattttgtaccgaaccttaccaaactaggattattttaaatttgattattcctatattttgttaaaccgtaaagtcaaaattcgaatgaaattacgaatcgagcatatgtactttaaaaatagtccatataaaaacattaatgtatattgctatgagattgaatcatcatgttacgtgaaagcattatagtgtggtcatgtcactaattgagtaattgtcaattgcttgtaaacgtggagcaagctatctaacgtaatactatatgtttggataggtcgatacagctttatcttctttggaataatatcatatattcgtttttgttatagaaaaccattaaaagtgatttgcaacaaaatttatacaaataatttaacattatctcagataatatagtcgataatgagccaggtatagctccgaaattgacggtcatgtcatttatgtgtttaccaactataaaacccacatattgatacattacatgatttcattttcagatcacaaatatagattattttgtttttaattagtattttcttagtagtggacgcttcgtaaccaatggaggtctactaattacaaccctgcatttattatatcacgttatgcatataaaagctgtgaaacaaatctagatgattaaatatagcggattagtgggtaaaattaaataataaattgttcgatacactaatctgcagatttacatattttattgggtactaaatcctttatgttcaaactaaaccatgaagataggcctttttacaaaatgggcttgaagagtacatctttcgtccatataggcctaatttctcatgtacttgttcatacgcctctcttacacaaagattagatgattctcaatttgaccgccacaatattcggtgaaatttttgataatttgttgtacatggtacatatgattgtacagctgcagaaatccaaatgtacaacagtacgtaataattgctaatgttaaagtatgaacattttagtgaaaatggtcctgagtccaatgcatggtggctacacgaggctccatttcactactgtctccacaaaaacgaacggtcacatacagagacgtgtaactgtagatgcacacagagattgtgtaataccttcaccgatagggtttgtcgaaatgactaatatataaaatatttaaaagctaaacgtttatctatagcaaacaacaacaaaaatagagttaaaaagtatagtccaaaacttgaaatgaagatttggctattagattaatagggttggtacattaatgactgatggcttatagatagatatggataccatttcattttatcgttctgcttagaacttagaagaataaacaaaacaaaagcatgtgggaagagaaagctccctttaacacctcaaatatggctaagagtccccaacacaaatcctattaataaattcacacatacaacaagtgttcatgacctaaccaacaaattcaatagagcccacttttttgagagacaaagatgcaatactcaaaataggaacaattctcttaatatgtctaattacatttttgttactagacaagtcagcatcaccaacttcaaaactaatgaaccttatttaatgtaccgaccaaaagtttaacaaaataaatagtaaatttgctagatttttatcttctgatccaatctaatccctattacgatggaatcaagttcaaaacaaaaacatgtcacaagggatcataatcggaaaagcaatctttatgtataagatatagttaggtatgtgtacacatgtgttaatgtgtataaatttgtgtatattttgtatgttacagcaaactatagaagagacaagatgttgattttttgtaaaaggaccaccttcaaaatattattattaagggttttattaattgaaacatatacatatatacacacatatgaatagatatattcacccccacaaggttatgtgacattcttttcaattctctgttctttccccttcttcgacgctgctcaacattaatttctcctttcactttcatagtaattagctaagtttttttcctcaataaatcaatctaagaaacctctaaatgactaaaccacgtatacgtttataccttctatttttttttttgtctaatacaaatttaacaataaaacattttatgttgacaaaaaaaaatacaatcaaaattttaataaagtgacccatattcgagtttcaatgatgactgcaatcaataagttgcattgtaattaaggttcattagattatcaatatctcacgtcattctacttcatcatcgatttgttttatagtttaattacaattactaaatgagagttgtagtgtcatttgtcaaacttttttatttttattatataaatagatgtgttaattaatttgtgtttgatcaaaacacaaatagaagtttaacacacctttttttcgtcaagaagtttaacacacatgaacacgcaaaagaagggggaaagcaatatgcatgatgagatgtgctgagaaagcaatgcgggaaaaagtcagcatcaaaacagctctttctctttccaattgttctatgagtttaaatactgatggtaaaacaacatatacaattacaaactgttaggctacatatcttagtccatatgtatatcacttgattaattaacattttatgtacgtatctaacaaactttaattttagatgtgcgagttttattacattattggcttaagtcttataacgggattaacatctttaaaagattgccatttttgaactaatttcgaagtaatttcggtgacactaaaaatatcataattttcacacgcacaaacaaaaattcatgatcttcaaatcatcgaatgatcatcttattagttacttatattcacaatttaaaatgcacctcataccgttactactttttataatgcagtggcttcgagtactacatctatgatattacctattagattgttcaaattgtagttgatgatgatacgtatatagaatgatggagaacatattattaggtttacgaatagtgtcattttgacatatgttacatattacatatatacaccctaattaataaaaataataattcaacatacaaataaacccctatctaacactatgattaatgaaatgataatgacttatattcaaagtttattaaatttgaataaagggaaaattataatttttgtttgaaaaataacattaaaatagaaaacgtcatttattttgtgaaacagaaagagtactaattaaaagttacaaatttaatgtgggatttaaatcagcttaactagcattgaaacaattttaatgtcactaatgctgttatttaccattcttaaaccttatcgtcaataactctatcacccagctatcataacagtttattaccatacattttttttggaaacgagttattacaaatttcttcgaatcgagttattgccatttttacgaaaaataaaacaaaaattataattgctcatgatttcatatttttctatatatgattctatggtctaaccattgtcagcatttccgaacacaactgaaattgtcaaagacaaaggtaatctaaagaaaagaaccaaagcactccaaagccttaaagtgttctttactttggttttaaaatttgaatctaaaatgaacagaagaacgttcctcgttatatgtgtacactctctcaacactgtacttaaaaataaaataaagcacagtgtagtttcaatttcatatgctaaatgtaggattatttttccaacggtcgaaaaaagcttaaagcatttttaaccaattctttatttattttttaaaacattacaaacttttcatatttttattactctctcaagtagtctcatcttcttcttaatccaaaggcccaaactttgaatcatcactatcactctctctctctctctctatctctcaagaactgcacggacaacgacatgcttttaatttccatgcaaatctctcctttcttctcaagtcatttttgaaaatcaatcaaaaaactgaaacttggtggagcttttatcattcactcatcaatggtggctggtaaggttcgtgtaacaatgggttttcacaaatcaccttctactaaaaaaaccaaagacatgccttctcctttacctcttcctcctcctcctcctcctccacttaaaccaccttcttccggttccgctactactaaaccaccgattaatcctagtaaaccgggtttcactcgctctttcggtgtttatttcccacgcgcttccgctcaagttcacgccactgctgctgctgcttctcataacggcgtcgtttctgagcttcgtcgtcaagtcgaggagcttcgtgagagagaagctctgttgaaaacagagaatctcgaggtcaagcttcttagagaatctgtttctgttattccgttgcttgaatcgcagatcgctgataagaacggcgaaatcgatgagcttaggaaagagacggcgagattagcggaggacaacgagagattacggcgagaatttgaccggagcgaggaaatgaggagagagtgtgagacgagggagaaggaaatggaggcggagattgttgagcttcggaaacttgtttcgtcggagagtgacgaccacgcgctctctgtttctcagaggtttcagggtttaatggatgtgtcggcgaaatctaacctaatcagaagtttaaaacgggtcgggtcgttgaggaatttacccgaaccgattacgaatcaagagaataccaacaagagcatttcatcatccggagacgccgacggcgacatttatcggaaagacgagatcgagagttattcacggagtagtaactcggaggaactcactgagtcatcgtctctctcaaccgtcagatctagagttccgagagtccctaaaccaccgccgaaacggtctatttcgttaggtgattccacggagaacagagcagacccgccaccgcagaaatcgattccgcctcctcctcctccacctccgccaccgcttcttcaacaaccaccaccacctccgtctgtttccaaagctcctcctccgcctcctccaccaccgccgccgaagagtttaagcattgcgtcggcgaaagtgagaagagtaccggaagtggttgagttttatcactcgttgatgcgaagagactccacaaactcgagaagagattccaccggcggtggaaacgccgccgcggaagcaatacttgctaactccaacgccagagacatgatcggagaaatcgaaaaccgatcggtttatctcctcgcggtaaaagtttctctttaaccggctcagtaaatttcggtttagtttctctgactttcttgcgtcagtgagaattgactgatcattccactttttcctcgtccttttccaagtaactttcaaaatttaaaatcataaaccggtttgatttaactttaaaccgaacattgcagataaaaaccgacgtagaaacgcaaggagatttcataaggttcttgatcaaagaagtcggaaacgctgcgttttcagacattgaagacgttgttcctttcgtcaaatggctcgacgacgaactctcttacctggtatgaatcaaactttcaaattttcccaaagtttctggaattatttagttcaaagtttgtaaatttgttgttgtatctttgaaggttgatgagagagcagtgttgaaacatttcgagtggccggagcaaaaagctgatgctttacgtgaagcagcgttttgttatttcgatctaaagaaactcatatcagaagcttctcgtttccgggaagatcctcgtcaatcttctagctctgctcttaagaaaatgcaagctttgtttgaaaagtaaataaaaaaaaatccattctttgattcatttcaaattcagattctttagataactaatgaagatcttttgttgattccaaaggttagagcatggtgtttatagtctttcgaggatgagagaatcggcggcaacaaaattcaagagtttccagattccggttgattggatgctcgaaaccggtattactagccaggtcagcaaactaatgattctcgagatttacaattttacaatcataatttatctcgagatttacattattgatccttcttctgtgtttcttgcaagatttaaatattggttttgcttaatgtttttatgatgaatacttagttcccactttttggtgcaattattgcatattgattggatgaaaaaaatacattttggaatatagaaaacatagagggatagacaagaacaacaattctgatggtccccaattttatgataaaagtcaattgttgatggcaggacatttgtaaaattgttttttgatactgttcttcactctattattgtttttttgcttgtttacatggtaaaactattatgtactacatgacaaattcagatatatacaaatatttagcaaaagtaaacttgaatacattgtttactttaatgttttgtggggttttcctatgtgcacgcctgtgaattttcgagattttctctattgtatcttcttgtctgtttcttttgttgttgctttgggattataatagacaaatcaatagggaatggaatcagattctctgaagactttttatgccttcattgtcactctttgagtcttaatgtttagtgtagtgtgctcaaattggggtctgtgcaacttataagtcatgcaaatctcatattttttgaggaacttggaatttggtaaagtatgaatgttttgaattgttgtggaatgtgatttcagattaaactggcatccgtgaaactagcgatgaagtatatgaagagagtatccgcagagctagaggctattgaaggtggtggccctgaagaggaagagctaattgtccaaggtgttcgattcgcattccgtgttcatcaggtaaagttaaaagaccttgatcatcttctctttcgatttggttctgttctgttacaatattaaactcttaaaatctgttttgtttttgttcagtttgccggaggatttgatgcagaaacaatgaaggcatttgaagagctaagagataaagcaagatcatgtcatgttcagtgtcaaagccaaacacatcaacataaactttgttttcgatctaccccttgttaaagaagcaatcttagcttcatatataatccacctcttgttgtcattttctcgatttaatttgtttttttgttctttcgtcttaaaagacctataactcttgtgaatatacgttctcgatcgtcttgctgaaaaaggattaaaacagttgatattcaaaggaaacccatcttatcatatgtactgataaaagcttcacaataatgtcgcggctaagaatgaaatattcaaatatttcaaagagacagcagaaataaaactaaatccattgccctaaaaccccaaacttcaaaccctgcaaattttgattgcacctcctagttacacaacaaaccactcatcactgctgtatccagcatctttggctttagactcatcatcaccgactgcatcttttgagagttccatctgaaaaccaaagagacgtatttgttaggaaaatcaaaacagaagaaaggatatagtttcaagacatgctaaaagttatgcgaaactagaatacacaccatttgaatagctcctggtttctctgttttaacattgggcataatagcttcagctttgtctacgactacatattcgtcatctgaatgacctgatgatgcatacgtcagaagttaacaaagacattacagatcgattaaaaaacgaatggacaaagaacggatttagttacttgcactagtctcattcacaaagcaaaaacaattacctttatcaccttcaccactctcatcatcagaatcgttgtagaaatcaaacgtatcaacagggggaattttcctacgaggtcggatcagatatggtaaaggaactcctgaaaacgacacaaaatttcctgattaaaaactcaaaactcgaaacagaaggaacctaaaggataatatcaaatggtaaaaaacaaaaaaggtgaaaagtgagctcaccgttgcagcctcccctcttccgagaatgcagaacagaaacagcatgaactggtgccaatgttgccatgtcctgattcaaaaatggtacctgttagcaattgcaacaacttttatgagaaacagagagatcagcacaaatctaagaaaaccctaaaaacgatataagctaaccagacaaagaagagataacgaagaagaaacctaaagagattaagaaatttccacacaataagttaacatctttgtataccaaatcggcgaaaaccatcttaaaacaagaaattcagatcgttcgaaacagaaatttactccgcaagaaatataacgcaaaccctaattttccgtgtgatcatataaacagaatcaaaaccaaaagttccatagaaaaatagcagaaaaggagaattatttcaaagaagagatgaattctcaaataaacataggattaccttatcgaagattcagagaaaatcgtttatcagatcttgagaaatttgatcgtcgacgaattatcaaaactcagtaagagaagaacaagacatcagcggtggcgaaaactagagattagcgatgaacagtaatcttattagcgatataaatagggattatttactttttattttgtttcccttttctaaaccttttccaattaatttatgttggctgacgtgtctctgattaaaccaatctcgagcggttcagcttccaacaaaccggttcggtttaacactattaatttctcgacctcgctcctatcttctcctctcattcgtcaatccagagactagggttttcttcccgccgaaacctcaccggaaattctctccggcatctcctaattcgtcaatcgggtactgttaaatcacaaggctttagtaatttcttcttatacataggtctaaatctatctgcttgatttgaaatttggattttggtctaattagggactgacactaccaatttacttaatgatttgaggataattacttcgattttgacttagatgatatgaatttgatttagtttcagtgagaaagacgaatgaatgttttgatttttatagagaatggatacatcaagtcctgctgcttttgtgaatggagctttgttgagaaggtacattggtcagaaagtgagagcagtgattcaagttatcagatcagatgttggatcagtgattggtaaatcgactgatgatcaacagattgttgttaaaggttctcctcaaccgcctttaactacttaccttgaggtaattggaattgctgagactgacaacactattcgtgctgaagtttggaccaactttggtgatagtttcggtatgaatttaagcaaaaatcattcctttaataagctatgtcctttatgatttgcaaattcttgtgtcttgatttggggtcttggcttgtttgcagatgtgcaaaactacaatgagctatgtaagcttgcaaatggtgagtttagacacttgttcatctaaatcacagggtattggtgatgaatgtggaaagcttttttcttggagattctttgggttggagctattgatatgcctggttgatctttagtattgaaattcttctgtttcatgttagtttcacggtttctagtatttatcttatggtctttgaaatctgtatgaaaactcttctgtgtcatattagaattaaggtaaactgtgttagtcgatcttactatgaatcttatgtttcttgttttgtgttttggttctctttgcttttcttttgattccatcacattggatcctagcttgtaaatggtataaaactatataaaatccctaaaaactatatctacattaaaacttacaattaggaaagaaaaaaaaatctaaactaaagcataaacaacacacaaaattgttggtcaaaaaattatacacacaactttgacgaaaatgttcaaggaattttgcagattagtaatgttttctagaattttagattgtttttggttcacacaatgacacagttttgaagaaaagaccttagcccacggcccagtccaaaatttttaaacgacagcgttaagaactggtccggttaaaccgggatttagccattatggaagaatcataagacaaaacctaaacttaaaccgaacagatttgtcacgaagaagaaatcagtgtagcagacaccatccatccctgagcaaaggtgattccttttttcccttgttttctgatatcttaaagaattattctgaggtttttgattacttgaaatattgtgtgtgtttcgtggaggtttatagatttctcgtttagggtttttgtggtttaatctgcttcttcgccactgattctgatacattttttcactttttgggtaaatcttgcaattgaaattcatgtgggctatcttttggttgttcgtgtgattactcagtgtaggtttagtgactcatgtagtggactaaaccaattgttgttggaaagctgttaactttttttttattagggatttgaggatcattctgaaatgaagaatttttcgtttgttcattattgctctgttattatgcaattttaaacttgtggctggcttcaaaatcaaattttttactcttatttaacaataagatttatgttgatcctgaactatgtttatacactcgggttgaatttagtttgagagttatttttctttgatttagatagaagaaaagctatgactgatttgcaaatggaggtagaggtagataccaattcttctttgcaggagtctctcccgaagccgcaagtcatgtacagatgtaagaaatgtagaaggatagttgctattgaggaaaacatagtcccgcatgaaccaggaaagggtgaagaatgctttgcttggaaaaagagaagtggaaactctgaacaagtgcaatgctcttccatctttgtcgagcctatgaaatggatgcagacaagtgagaagctttgacaaaagcactttactctatatagaaattttctttatgtatctcacaacaagaatctctgcagtttcttttttatgatcttttacattatttgacttttgcagtacatgatggaatggtggaagagaagcttctatgttttggatgtaacgggagattaggttatttcaactgggctgggatgcaatgtagctgtggtgcatgggttaatccggcttttcagcttaataaaagccgaatagacgagtgtaaatccgagccaaacccgaacctgaatatggaaacttgatgaaaaaggagaagatgtaaactcttggataactaaagattgataaaaagatcaaattaaagccttattgtattgactatccctaatggggtttttagtttcattgtttaaattcaaacatagaattagttatgtgtatttctttgttctttctaaattctaatattagggacacaaaagaattagaggctataattaaaagaattaacaaactcactaatttactaatgaacgattgttctctatttagctaaaaataacagatggttttaactttatgattttgtataaaaccgaactttgtggctcttgtgaattagttgtcctcttctctaacatctcaaacaaagaaaacgattacaaaagagaagaggtatcaaaaagaagaccagaatcttttaacattttgaaacaaatggcgtccaaagccatcttcttcttctttgtctctgccgtgtgcctgtcctctctcgccggtgtggccatcgctgatgccgatgactttgaccgtttccaaattcagggatcggtttattgtgacacatgccgtgtccaattcgttacccgtctcagcaagttccttgaaggtaaacattttcatacatctatatactacatattacacattgtttatgttattagtatttctgcttattcaaatttgtctacattgttttctataggcgcgaaagtgaagctagaatgcaggagcagaacaaacggaaccgtaacattgacaaaagaagccgtaacggacaaaacagggagctacagaatggaagtgaccggtgaccatgaggaggaagtttgcgagcttgtgctcgtcgaatcaccagacagtggttgcagtgacgttagcaaagaggcttacctacgtaacgccgctaagatcagcctgaccgcgaatgacggaatcgtctctcacgagacacgtatcgttaaccctctcggtttcatggttcaaactccgtcagctgaatgtcccgctgctttcaaggagctcgggatcgttcctgatgtcaccttctaaatttaatgatttcaagatcgtcatttaagtgtaatctattgtttgtttctatataacaaaacaaaaatgtaatttgataaaacacaaaaaaaatgcagtaaataaaataaattattttctttttttcatgcatcacatttgaatttctgatttataaatagtgcttgtgttaacatgaaaactgaaatgacagagaggaatgtacaacaaagaatcaattagatccctttggttttatgttcatcaagacaaacactatcaccaccctcgtcatctgtagctacaagcctaattaacagcgaagaatttgtttgttagtctcatgaggctaatgatctacgactaatgcaaatgaaaggagagtgagttttactataagtacccaagagattgatcttgcgttttcttcgacaccgtgtttgcgtctacgtttgcttcattacagggactgctttttggttggtttggtggccaagcacggatgatctctgagacagatggtttgtattccggaacttgttcttgctctagtcttgaaaatgtggattgatgatctacggcgtcgtaacatgggagatcaagaaacgaaccagaaaaagaacccatatcaccatgtctacttctctcttcaacttgcttcaagcttgatacagatattctagggctttcatcagattcccacagctcagaatctgacaaacaatagtcggaaacacaaggagatgactgacaaaaggtgtcactgttgtcatcgccgtcatcagagttgctagcctctggaaccaactgaaacgaagggaacatatccgcattttcaccattgtaccgaggttggcatgggattctcagtttcaatttaggaactggagaggcttctattgggttgaatgatattttcatatgttcaaccggtggggatgaagtaggtgagccaaagagagatgattcataatccaattgctcctcaaagcttgaaccaccaggactttgctgagtcctgtcttcgatagcagctactctggtatcatagctactactaggtacagattcaaatttgcaagttgaagaagagtttccccgaaacccagccatgagtaatctatgacttaagccaaaaactctgaacgatgttccagtgctctgcatgggagagagactcgacatgttgctttgttgttgagacgtgggatctgaaacaattaatggaagtgagctcttctcagcattttcaactgatcggctcgatgattcctgcttccttgtcgaaagaacactagcttcgttgatctcgtgctttatatgttggcttccagaattaggctcagcaaatactggaggtttcaatggcgcgagtccaaggagtcctccattgctccatatacttattgattcaacacttgtaccatttggaagagaattctgagtatctggagaaatcgtaacagtaccaccgctcgagggaaatgttctttcagtagattctggttccaataaaccactcttctgattcatagaaacatcagatgctgtgtagggctcattatgtacttcaccttcttttaccttgatgtttttagcaggaagatctgttactacacatggtgcggcaacatgcatttctggttctttcaaagaaggatacgtggaatccggaacttctggtgaaaacttttgatcgaaaatagcttctgcaaataacaaaagtgcggcatcatccaagaatactttttggtcaggaataccttcagccaaagccagatatgcagcagcaggttcttttggcagaatattttccttgggaacaggttcttcagggaagcatttgttgtgtgaaccagtttctgttgtgaaactaggaactcctgagcctgtgatcttttcatcaaaaacagcttcggtcgaggacagatctgtggtaatagtttctctagggaaggttttgttgtgtggactagtttctgttgtggaactagaagcttctgagcctgggatcttttcatcaaaaactgcttcttttaaagaaagatccgtggcaaaaggtttttcagggaaggttttgttgtgtagaccagtttctgttgcggaaccaggagcttctgagcctgggataatttcaccaaaaactgcttcgttcaaggaaatatctgtggcaacaggttcttcagtgaaggtttcattgtgtagaccagtttctgttgtggaaacaggagcttctgagcctgggatcttttcatcaaaaactgcttcgttcaagaaattttccatggcaaaaggttcttcagggaaggttttgttgtgtggaccagtttctgttgtggaagtagaagcttctgagcctgggatcttttcatcaaaaactgcttcgttcaaggaattttccgtggcaaaagttttttcagggaaggttttgttttgtcgaccagtttctgttgtggaaccaggagcttctgagcctgagatattttcatcaaaaacagcttctgcagaagatggatatgtggaatcaagttcttctcgagagatcttttcatcaggtacaacttctgcccaagacggatatgtaggtaaggattcttctggcaagttcttttccttagaaacagcttctgccgaagaccgatatgtgacgccaggttcgtctggaaaaccgatttcgttgggaaaagctgattccaaaaatggatttgtgccaacaagttcttcatgcgaggcttcctcatacggaacggattcttccaaagatggatgtgtggaaccaggatcttccagtggcgggatcttctcatcacaaacagcttcagaaaaatatggatgagtagcatcatcaacttcttcttcttgtgcgatcttttcttctggcaattcttccaaagaaggatacacttccggaggttcttctggaaagattgtcatgatgggcgcagctttcgtcaaagaccgacatgtggtgtcaagttgttctggcaaaacctcttcatcaagaacaacttctcccaaacacggatctatgccaacaaattcgtcaagtgtgacttgctcatttggaatagcttctgccgcagacaaatttgtggaattaagaacttccagtgagacatgttcatcactttcagctttggcacaagacaacgtatgtgtagcctcatcagattcttcttgtgagatcttatctttaggcaattttcccaaagatgcacacgcttcaaaaggttcttctggcaagacttcttcgataggcaccacatttgttaaatagatacatgaggtgatatgttcttctggcaaatccctcatatcaggaacagcttctaccaaacatggatctatgccaacaaattcttcaactgagatttgcgcttgtggaacagcttctgccacaggcgaatttgtggaaccaagaacgttaggtgagctttgttcatcactaacagcttcagaaagacatgggtgcatggcatcatcagcttcttcatccaaaatcttttcttcaggcaattctgacaaagaaggatacgtttcgggagacttttctgacaagactccttccattgtcaaagagagacatgtgatgacaggttcttctggcaagaacctttcctcaggagccacttctaccaaacactgatctatgccaacaaattcttcatgtgagatgtgctctagtggaagagcttcttcaagagacaaatttgtggaatcagaaacttcttgggagatttcttcatcactaacagcttcagatgtatgtgtggcatcatcagtttcttcctgcaaaaactcttcttcaggcaattctgccaaagaaggatatgtttccaaaagctcttctgacaagaccttttcaatagccacggcttttgtcaaagacagatatgtggtgtcaggttcttctggcaagagcctttcatcaggaaccgcttctaccaaacacggattgatgccaacaaattcttcaagtgagacttgttcttgcggaacagcttctgccacagacaattttgtggaatcaagaacttctggtgatagatttgtttctgcagcagctttggcacaagatggatgtgtagaatcaacagatttttcttgcaagatatcttcttcaggcaattcttccaaataatgagacgattccaaagttttttctggcaataatatttcagtaggcatggcttttgtcaaagacaaacatgtgctgggaggttcttctatcaagaacctttcatcaggaacagcttcagccaaacatggatgtatcctaacaaattcttcaagggagattggctcttgtgaaacagcttttggcacagaaaatattttcgaatcaagaacttctggtgagattttcttgtcttgaacagctttgggaaatgatggatgagcagcatcaggttctcctgctggggtcatattgtcaagcacagcttcttccaaagacttttcagacaagatcttttcttgcggtatgatttctgcaaaagaaggatatttggcaatagactctcctggcaagatcttttcatggggaatagcttcaagagatggatagttgaccaaatgttcttctggcaagatcttttcagcaggaatagcatctttcagagacgggcatgagataatacgttcttcagatgatatcttttcattagcagagtctcctgcaaacaagggatgtgccatgacaggttcttctcgcaaaattgttacatccggaacggctttttcagccaataacgaagggcacatggtaaaaaattcccatggcttttgagaattctcatcatgaaacagagtttcctcacacactggatctgataggcaactggaaacatttgagtcttcaggaaggtaagaacctgaacaagattcatcttcagaattttcatggcgtggatcatgtgccatttcttcatatgttatatcttctgatccatcattgttgtcactgttagcatcttccgaacaataagtactaatatccccaaagtaatgctccaatttcggttttggtactccatcaatatcactctccgattctgattcaattgtattacgagcatcaacaaactcatctgcttcactctcttgttcactcttatcttctccttcgttctcaattcctagtgttccatcaatattgttggcctggctcttactttgtttttctcccacaatatctacctcatcaaacaaaatatatgtcctatcaaagtccctttgattttgccttaccctgtctggtgttactgggccaaattttgactcatgtagctctgatggttcatcatctttgcggcttttctccaccatcgattcaagtgtttctttcttctcatcacaaacattagaagcagaaggcacaagtaggtcttctgaggggctatataggatattatcatctaccacttcaatgcagccttcgggaacagttgaacctattctatcagcaggacataaggacccagacaggaatccctctactagcttcacttcaggcttatcaacaggactttgattaatgacatactctatataacctgaaccagttatagaatcacgagcttttgatgactcttggaaatctgattgtacttgtgcttcactttgttcttgcgcacctgactgcccttgcagataagattggtctacaatatccgataaatcttgcatattagagctacgtggcatgtcaactgtggacgtactccgagaagttgttggtctgtcatcagtaaaagaactgagatgagcgctgcacagaaattcaggttaacaaaagaaattgtcaggatcgactacacttcaatggacgagaactactacatctatattttaaaataacccacccattagtttcatcagatgtagacactgcatttgatctgcaaatgtttctttgtggtaacctctttttctgtcatttcagcaaaagcacaaatcaggtaagtcagcagacgatagccaaaaaagcacaagaataaaaaaccatagccgttgagatgtctaacgaaatatattttatcaggtcacacgattctttactagtccattctggtacgaggtacagttgtaagaagacgaaaagagctcataaccagaaaagaaactcttagtataacctaaaccaaaaaaaaaaagataattacaaacctttcttttgcggtgagcctgatctctctggactttgatatcatctgttttactggggttgcttaactcctttctaaagaatgttgggtctgagtattttctcagacacgatccaggaccacctacagcaaatctgcaaggaggaagaaaagcagccacttcagaataaagatccaatgcattttctatatatattaggatgaactaaaagcttgtcccttaccggtcaagcagatgcaaaggaggaggatctctgcattgctcataactttccataacacacagaggcaaatcactctgaacaaaatgactatgtccattccttatacgaggatgccactcagagcctacagcagaaacaaaaacaaaagactaagaatttttttctgtacaaaagctcataaaaaatatgtcacacaaattgtggagactatgtgttcataaaagctttcatccctatacacaagtgaggtgcatgacagtataactacatagagaaccttcaaactagaaaatctaaaataagacctgaagcttatagataagagtaaagccatacctgcagtgtatgcaaaatgtatgtggcttgtctgcgatagaacagccttttcaagaggtgagagcgctgactctatccgtctaacacggcttgtcaacttctgacacctagatgccgttacagttacttcttcttgtaagccgttaaatacttctgcagaaaatctacatgtaagaaatgccacctggttaaagaactctctatcagtttacattcacttgaccatctatgtttcgttccatggaggaatgatacaaaagactaaaaaagaattttgattatgggagattaacgtctgtttgcaaaacgcactatgccaattcactaacctccccgggtaaacaaccaaaacctcataattcctagttaagtaagaaactttagtttctcatcatcaatagattagatgtccacataaattcccaatctttacttcatttcagctgatactcaagttaacaactatattgaggtacttcaaggacataactcatcattcaataaataagacttacacttactcaaagacaattaatttgttactaagtctacgaactaagctcaaatatcaaaacttttgcgaaaagccctaagccctgaagaaaatcaaattatatagcatgttactgaaacccctaatactcaaactaaagataaaattgatgagctaaaactcatcctaatcacacgaaacaacttcaaaacctacaaaatcagctacaagtatcaaaatttcaatcttctgtatgtatgcaacagtcgaaaacgagaacatactcagcgagatcgcctaactgacgaagaataccgatgagtccagctacttcaacagcgccgagaatcgccttaggttcctcatcttccacggaggcgctacgttgaatctccggcccacctaagcttagctcgttccgtatcttgaacctcaccaacggcattgtctctctctctttctctctcccgcagcagaaatgaaacagagcttaataaataaaagctgtgaccatttaatttaatcactttgactcttcttctttattagaaatttgaaacctaattaattaaagtctctgatgaatcataattagagaagcctaaagttagattctcagtctcatgtgtctgtacatttgattcagcttttccagataatttctcatttttatttgttcttacgtccctaactttttttgtaattatgtatgggcctgagataataacatgtatacgggccttaattgggcttatcgttattaggctcaatagcttattttatcatactattgctgggctcttactttacaaagaaggaaaaaaaaactgaaaaaaatatgactcatagaatttgttcacaaacaaaatattatcataccaatataaaattagctgatgaattattatttttatactttttatgtaaccaaaggattgtgggctatataacataccaacaggcccggcccagagctaaagatggtgaagctagggctttaggcatcacattttagtaacaaaatttgaggcatcaaattgtaaaattgttggtggtatagtggtcaacgctttgaataaccttcttctatgtgtctagtttgagtctaacttttgtcagaatttgattttttttcctcaatacctcattattaatgggtcaaacacatttttgctttaagcaacaaaaagacttgggccggccctgcataccaatcttcagaaactgtagagtgtcgagtatttttatcactaaaaaagttggaaaatttgagatatgatttctctatgtcttttatgaatacaacaaaaccaacattcatatatattatctttttttgtcttctggttgatattagaaagaaagaaaaaaaatacagagaaacttgtttcaaagtagctttagagcacattatagaagattttacatggtttattactggtaacacactgcaatggcatattcattccaacggtttttctttccattaacttaaaagatgattgattactagtcacgacttacgccatcatttcgtatcataactaaaggaaaaaaatgcaatatagacagtcttgtaactttcttaacaaaagaaaaggcattcttgctaagggcaaaaaaaaatacaaatacaatagatatatatgaatcatatgttcccaggtgaaaaaacagatggacccaagtcccacgtgaatttttatttattacctttttatacttatcttttgttttggtattgagtggatttctattgatgttgtgacaaaagtatatcgaaagatatatagccccacacaagatcttctcttacaaaatcttgctttttacttagggtttttctcgtcggattcctgttctccggtcaccggaatcttgatttcaccgtctgcagtatttttattcccgacaaagggtactaaatgtgtgtatcaaataatatatatgcgcgtctttaattattatgtcttctcttttatttcactattttcatgctttttatgtatttctgtctttgaacttattccttgaactagtacttcttgtccgtgagaaaacaatagttatacacaataagtacacattctagtagggttgcctttttcttaacaacacattaatagattggctacatttctattttgaagttgtgtatatgtcagtcatcgacacgtattgatttgaaaattaatttcaataacttgaacacatatacacgtaatagtcattgaattgtaccttaaaaattgtaaagcattatcaaaagaaaagaccgaggattgttttgtcccttttaacattcatgggtaagataatggaaatctatatattatgcgtcgtccactttcagacacatttatgcttaagcaatcactcattgtatcgtcaaagatatgttattatagttaatattccacgtatatacaactacaaagtatcaactaatatatgaatatggtgttactattttttcatttcacgtatatgaaaaagcacttttatagaaatcatcacaaattggaataccgttggattttcgaaaataaagaggagaaacaaacttagtaggtattgctacgagtaggatgatgacggtcaatgtcgtcatcattcatcaacgttattgttgtaattattataattatttcattatctatttcttatgtataaagttatagatgtaataggctccataattcaacaatagccactaaattaagcaagttggagaaattaattaataaaccattattaaaacttataatgattgatttggttgctagtcgtacaatggatagcttaaactaatattttcttaaggaattttaaaagaagagtatatcataacagtgtgtaaagtaaatagctagccacatcagtgaccaaaaaagataattaacaaaccaaataaaataacaaattttgatcatttggaataaaatttataaaaggaacgaaagcaccttctcacgggtcccatccattgaaatatattctctctttttgctctatataataataacgcgtactaatttgtagtatatattattacaaagtcgatatttgattgttttgtgaacgttgatatattaattttcttggatgatgacaaaaaaagtcatagaaagtaacgtgtgaacatagcattaacaaaatacaaacataatatataaccaaatatatgaaaataggataaaatctcattgaatagatcttcttctattcaaatatataaatatttgtttgtctataaaattaacagagcattcacattatctaaaataatagtaaaatcaaaataaaactaaataaaaataactctggttttataacgattgattttaaatattagtttttgttgtaaagaaatcattatatatgtctgtaatatttttatactgagttacatgatatttagttattatagcgtaattaactaagataagaaattaactaaagtgatattctgattattattatttttgttaggacacgtacgtggaaaaactaaacactataggttacaaaacggtataataaactcaccattactggaaaatgtttgcatttgactcaataagtaacttattataagttactgatataatgcatagttttgaaattcttaaataaattattttggtttcgcatgaaaatatgaaaggagagaaatttattattgtcacttatatatatatacatcgtaatcattttttcgtgaataattctctctcccattccattatttctcagtatctctctttctttcccttactttattgttgcttttaaaccttcaatttgctcataaaccaaatatataatatcaaaacaaacaaacaaaaaatcagaattc

SEQ ID NO: 594 - DNA, 94301 bp, Arabidopsis thaliana
gaattctgagtatctggagaaatcgtaacagtaccaccgctcgagggaaatgttctttcagtagattctggttccaataaaccactcttctgattcatagaaacatcagatgctgtgtagggctcattatgtacttcaccttcttttaccttgatgtttttagcaggaagatctgttactacacatggtgcggcaacatgcatttctggttctttcaaagaaggatacgtggaatccggaacttctggtgaaaacttttgatcgaaaatagcttctgcaaataacaaaagtgcggcatcatccaagaatactttttggtcaggaataccttcagccaaagccagatatgcagcagcaggttcttttggcagaatattttccttgggaacaggttcttcagggaagcatttgttgtgtgaaccagtttctgttgtgaaactaggaactcctgagcctgtgatcttttcatcaaaaacagcttcggtcgaggacagatctgtggtaatagtttctctagggaaggttttgttgtgtggactagtttctgttgtggaactagaagcttctgagcctgggatcttttcatcaaaaactgcttcttttaaagaaagatccgtggcaaaaggtttttcagggaaggttttgttgtgtagaccagtttctgttgcggaaccaggagcttctgagcctgggataatttcaccaaaaactgcttcgttcaaggaaatatctgtggcaacaggttcttcagtgaaggtttcattgtgtagaccagtttctgttgtggaaacaggagcttctgagcctgggatcttttcatcaaaaactgcttcgttcaagaaattttccatggcaaaaggttcttcagggaaggttttgttgtgtggaccagtttctgttgtggaagtagaagcttctgagcctgggatcttttcatcaaaaactgcttcgttcaaggaattttccgtggcaaaagttttttcagggaaggttttgttttgtcgaccagtttctgttgtggaaccaggagcttctgagcctgagatattttcatcaaaaacagcttctgcagaagatggatatgtggaatcaagttcttctcgagagatcttttcatcaggtacaacttctgcccaagacggatatgtaggtaaggattcttctggcaagttcttttccttagaaacagcttctgccgaagaccgatatgtgacgccaggttcgtctggaaaaccgatttcgttgggaaaagctgattccaaaaatggatttgtgccaacaagttcttcatgcgaggcttcctcatacggaacggattcttccaaagatggatgtgtggaaccaggatcttccagtggcgggatcttctcatcacaaacagcttcagaaaaatatggatgagtagcatcatcaacttcttcttcttgtgcgatcttttcttctggcaattcttccaaagaaggatacacttccggaggttcttctggaaagattgtcatgatgggcgcagctttcgtcaaagaccgacatgtggtgtcaagttgttctggcaaaacctcttcatcaagaacaacttctcccaaacacggatctatgccaacaaattcgtcaagtgtgacttgctcatttggaatagcttctgccgcagacaaatttgtggaattaagaacttccagtgagacatgttcatcactttcagctttggcacaagacaacgtatgtgtagcctcatcagattcttcttgtgagatcttatctttaggcaattttcccaaagatgcacacgcttcaaaaggttcttctggcaagacttcttcgataggcaccacatttgttaaatagatacatgaggtgatatgttcttctggcaaatccctcatatcaggaacagcttctaccaaacatggatctatgccaacaaattcttcaactgagatttgcgcttgtggaacagcttctgccacaggcgaatttgtggaaccaagaacgttaggtgagctttgttcatcactaacagcttcagaaagacatgggtgcatggcatcatcagcttcttcatccaaaatcttttcttcaggcaattctgacaaagaaggatacgtttcgggagacttttctgacaagactccttccattgtcaaagagagacatgtgatgacaggttcttctggcaagaacctttcctcaggagccacttctaccaaacactgatctatgccaacaaattcttcatgtgagatgtgctctagtggaagagcttcttcaagagacaaatttgtggaatcagaaacttcttgggagatttcttcatcactaacagcttcagatgtatgtgtggcatcatcagtttcttcctgcaaaaactcttcttcaggcaattctgccaaagaaggatatgtttccaaaagctcttctgacaagaccttttcaatagccacggcttttgtcaaagacagatatgtggtgtcaggttcttctggcaagagcctttcatcaggaaccgcttctaccaaacacggattgatgccaacaaattcttcaagtgagacttgttcttgcggaacagcttctgccacagacaattttgtggaatcaagaacttctggtgatagatttgtttctgcagcagctttggcacaagatggatgtgtagaatcaacagatttttcttgcaagatatcttcttcaggcaattcttccaaataatgagacgattccaaagttttttctggcaataatatttcagtaggcatggcttttgtcaaagacaaacatgtgctgggaggttcttctatcaagaacctttcatcaggaacagcttcagccaaacatggatgtatcctaacaaattcttcaagggagattggctcttgtgaaacagcttttggcacagaaaatattttcgaatcaagaacttctggtgagattttcttgtcttgaacagctttgggaaatgatggatgagcagcatcaggttctcctgctggggtcatattgtcaagcacagcttcttccaaagacttttcagacaagatcttttcttgcggtatgatttctgcaaaagaaggatatttggcaatagactctcctggcaagatcttttcatggggaatagcttcaagagatggatagttgaccaaatgttcttctggcaagatcttttcagcaggaatagcatctttcagagacgggcatgagataatacgttcttcagatgatatcttttcattagcagagtctcctgcaaacaagggatgtgccatgacaggttcttctcgcaaaattgttacatccggaacggctttttcagccaataacgaagggcacatggtaaaaaattcccatggcttttgagaattctcatcatgaaacagagtttcctcacacactggatctgataggcaactggaaacatttgagtcttcaggaaggtaagaacctgaacaagattcatcttcagaattttcatggcgtggatcatgtgccatttcttcatatgttatatcttctgatccatcattgttgtcactgttagcatcttccgaacaataagtactaatatccccaaagtaatgctccaatttcggttttggtactccatcaatatcactctccgattctgattcaattgtattacgagcatcaacaaactcatctgcttcactctcttgttcactcttatcttctccttcgttctcaattcctagtgttccatcaatattgttggcctggctcttactttgtttttctcccacaatatctacctcatcaaacaaaatatatgtcctatcaaagtccctttgattttgccttaccctgtctggtgttactgggccaaattttgactcatgtagctctgatggttcatcatctttgcggcttttctccaccatcgattcaagtgtttctttcttctcatcacaaacattagaagcagaaggcacaagtaggtcttctgaggggctatataggatattatcatctaccacttcaatgcagccttcgggaacagttgaacctattctatcagcaggacataaggacccagacaggaatccctctactagcttcacttcaggcttatcaacaggactttgattaatgacatactctatataacctgaaccagttatagaatcacgagcttttgatgactcttggaaatctgattgtacttgtgcttcactttgttcttgcgcacctgactgcccttgcagataagattggtctacaatatccgataaatcttgcatattagagctacgtggcatgtcaactgtggacgtactccgagaagttgttggtctgtcatcagtaaaagaactgagatgagcgctgcacagaaattcaggttaacaaaagaaattgtcaggatcgactacacttcaatggacgagaactactacatctatattttaaaataacccacccattagtttcatcagatgtagacactgcatttgatctgcaaatgtttctttgtggtaacctctttttctgtcatttcagcaaaagcacaaatcaggtaagtcagcagacgatagccaaaaaagcacaagaataaaaaaccatagccgttgagatgtctaacgaaatatattttatcaggtcacacgattctttactagtccattctggtacgaggtacagttgtaagaagacgaaaagagctcataaccagaaaagaaactcttagtataacctaaaccaaaaaaaaaaagataattacaaacctttcttttgcggtgagcctgatctctctggactttgatatcatctgttttactggggttgcttaactcctttctaaagaatgttgggtctgagtattttctcagacacgatccaggaccacctacagcaaatctgcaaggaggaagaaaagcagccacttcagaataaagatccaatgcattttctatatatattaggatgaactaaaagcttgtcccttaccggtcaagcagatgcaaaggaggaggatctctgcattgctcataactttccataacacacagaggcaaatcactctgaacaaaatgactatgtccattccttatacgaggatgccactcagagcctacagcagaaacaaaaacaaaagactaagaatttttttctgtacaaaagctcataaaaaatatgtcacacaaattgtggagactatgtgttcataaaagctttcatccctatacacaagtgaggtgcatgacagtataactacatagagaaccttcaaactagaaaatctaaaataagacctgaagcttatagataagagtaaagccatacctgcagtgtatgcaaaatgtatgtggcttgtctgcgatagaacagccttttcaagaggtgagagcgctgactctatccgtctaacacggcttgtcaacttctgacacctagatgccgttacagttacttcttcttgtaagccgttaaatacttctgcagaaaatctacatgtaagaaatgccacctggttaaagaactctctatcagtttacattcacttgaccatctatgtttcgttccatggaggaatgatacaaaagactaaaaaagaattttgattatgggagattaacgtctgtttgcaaaacgcactatgccaattcactaacctccccgggtaaacaaccaaaacctcataattcctagttaagtaagaaactttagtttctcatcatcaatagattagatgtccacataaattcccaatctttacttcatttcagctgatactcaagttaacaactatattgaggtacttcaaggacataactcatcattcaataaataagacttacacttactcaaagacaattaatttgttactaagtctacgaactaagctcaaatatcaaaacttttgcgaaaagccctaagccctgaagaaaatcaaattatatagcatgttactgaaacccctaatactcaaactaaagataaaattgatgagctaaaactcatcctaatcacacgaaacaacttcaaaacctacaaaatcagctacaagtatcaaaatttcaatcttctgtatgtatgcaacagtcgaaaacgagaacatactcagcgagatcgcctaactgacgaagaataccgatgagtccagctacttcaacagcgccgagaatcgccttaggttcctcatcttccacggaggcgctacgttgaatctccggcccacctaagcttagctcgttccgtatcttgaacctcaccaacggcattgtctctctctctttctctctcccgcagcagaaatgaaacagagcttaataaataaaagctgtgaccatttaatttaatcactttgactcttcttctttattagaaatttgaaacctaattaattaaagtctctgatgaatcataattagagaagcctaaagttagattctcagtctcatgtgtctgtacatttgattcagcttttccagataatttctcatttttatttgttcttacgtccctaactttttttgtaattatgtatgggcctgagataataacatgtatacgggccttaattgggcttatcgttattaggctcaatagcttattttatcatactattgctgggctcttactttacaaagaaggaaaaaaaactgaaaaaaatatgactcatagaatttgttcacaaacaaaatattatcataccaatataaaattagctgatgaattattatttttatactttttatgtaaccaaaggattgtgggctatataacataccaacaggcccggcccagagctaaagatggtgaagctagggctttaggcatcacattttagtaacaaaatttgaggcatcaaattgtaaaattgttggtggtatagtggtcaacgctttgaataaccttcttctatgtgtctagtttgagtctaacttttgtcagaatttgattttttttcctcaatacctcattattaatgggtcaaacacatttttgctttaagcaacaaaaagacttgggccggccctgcataccaatcttcagaaactgtagagtgtcgagtatttttatcactaaaaaagttggaaaatttgagatatgatttctctatgtcttttatgaatacaacaaaaccaacattcatatatattatctttttttgtcttctggttgatattagaaagaaagaaaaaaaatacagagaaacttgtttcaaagtagctttagagcacattatagaagattttacatggtttattactggtaacacactgcaatggcatattcattccaacggtttttctttccattaacttaaaagatgattgattactagtcacgacttacgccatcatttcgtatcataactaaaggaaaaaaatgcaatatagacagtcttgtaactttcttaacaaaagaaaaggcattcttgctaagggcaaaaaaaaatacaaatacaatagatatatatgaatcatatgttcccaggtgaaaaaacagatggacccaagtcccacgtgaatttttatttattacctttttatacttatcttttgttttggtattgagtggatttctattgatgttgtgacaaaagtatatcgaaagatatatagccccacacaagatcttctcttacaaaatcttgctttttacttagggtttttctcgtcggattcctgttctccggtcaccggaatcttgatttcaccgtctgcagtatttttattcccgacaaagggtactaaatgtgtgtatcaaataatatatatgcgcgtctttaattattatgtcttctcttttatttcactattttcatgctttttatgtatttctgtctttgaacttattccttgaactagtacttcttgtccgtgagaaaacaatagttatacacaataagtacacattctagtagggttgcctttttcttaacaacacattaatagattggctacatttctattttgaagttgtgtatatgtcagtcatcgacacgtattgatttgaaaattaatttcaataacttgaacacatatacacgtaatagtcattgaattgtaccttaaaaattgtaaagcattatcaaaagaaaagaccgaggattgttttgtcccttttaacattcatgggtaagataatggaaatctatatattatgcgtcgtccactttcagacacatttatgcttaagcaatcactcattgtatcgtcaaagatatgttattatagttaatattccacgtatatacaactacaaagtatcaactaatatatgaatatggtgttactattttttcatttcacgtatatgaaaaagcacttttatagaaatcatcacaaattggaataccgttggattttcgaaaataaagaggagaaacaaacttagtaggtattgctacgagtaggatgatgacggtcaatgtcgtcatcattcatcaacgttattgttgtaattattataattatttcattatctatttcttatgtataaagttatagatgtaataggctccataattcaacaatagccactaaattaagcaagttggagaaattaattaataaaccattattaaaacttataatgattgatttggttgctagtcgtacaatggatagcttaaactaatattttcttaaggaattttaaaagaagagtatatcataacagtgtgtaaagtaaatagctagccacatcagtgaccaaaaaagataattaacaaaccaaataaaataacaaattttgatcatttggaataaaatttataaaaggaacgaaagcaccttctcacgggtcccatccattgaaatatattctctctttttgctctatataataataacgcgtactaatttgtagtatatattattacaaagtcgatatttgattgttttgtgaacgttgatatattaattttcttggatgatgacaaaaaaagtcatagaaagtaacgtgtgaacatagcattaacaaaatacaaacataatatataaccaaatatatgaaaataggataaaatctcattgaatagatcttcttctattcaaatatataaatatttgtttgtctataaaattaacagagcattcacattatctaaaataatagtaaaatcaaaataaaactaaataaaaataactctggttttataacgattgattttaaatattagtttttgttgtaaagaaatcattatatatgtctgtaatatttttatactgagttacatgatatttagttattatagcgtaattaactaagataagaaattaactaaagtgatattctgattattattatttttgttaggacacgtacgtggaaaaactaaacactataggttacaaaacggtataataaactcaccattactggaaaatgtttgcatttgactcaataagtaacttattataagttactgatataatgcatagttttgaaattcttaaataaattattttggtttcgcatgaaaatatgaaaggagagaaatttattattgtcacttatatatatatacatcgtaatcattttttcgtgaataattctctctcccattccattatttctcagtatctctctttctttcccttactttattgttgcttttaaaccttcaatttgctcataaaccaaatatataatatcaaaacaaacaaacaaaaaatcagaattcccctaataatgtcttcggatcgtcacacaccgacgaaagatccaccggatcatccgtcttcttcctccaaccaccacaagcaaccacttcctcctcaaccgcagcaaccactcagccgctatgaatcgcagaaacgccgcgactggaacacgttcgtccaatacctaaaatcacaaaatccaccgttgatgatgtctcaattcgactacacgcacgtgctaagtttcctaaggtacttagatcagtttggtaagaccaaagtacatcatcaagcttgtgtcttcttcggacaaccggatccaccaggtccgtgcacgtgtcctctcaaacaagcttggggaagcctagatgctttgatcggacggctaagagctgcttacgaggaacacggtggcgggtcacctgatactaacccgtttgcaaacgggtcgatccgggttcacttgagggaagtgagagaatctcaagccaaggctcgtgggattccgtacaggaagaagaaaaggaggaagactaaaaacgaggtcgttgttgtcaagaaggatgttgcaaactcttcgactcctaatcagtcgttcacttgataaatttatcatataaaaaatttccaatataggtaatcaattttcaattctcttttttttctctctaatttaaagtttcgtatgatcttttaaaaaaattgaaattattctctttggatatctagactacaaaacttataatatcggattaataatagtgattgattccatcaaattttcccgattttctattgtcacttacttaccctaatgcgtgtgtgtatatatatttctaaactaattttgtactcaaaattggatatgattaagagagaataatatatctttcaaatgtagctttttttgttattaattagctataataattagagtgtgtcccaactgtgaatgtatttaaatgacaacatttctgtacgttgcatgcatcatgatgtataaacatacactggaatacatgttgaaatgcacaagtaagtaaataatatttcttacactaaatgtatatacaattaagcattacttttatgtatatatagttatatatatgcacacctatacaaatatgtacatgtatatatgtattttattatataattattttctattggaagcatgataatatggggaactagattacaaggtctagcgagtgtagcccaataatgtaaataaacagctcatgagtttaaaataagtactcaagcaattaggaaaaaaaacgaacattttgaataagcgctagcattaccaaattaggatttatataaaacgaacttaggattcgaaccggcaattgattaagttaaaacgatcgagtcggtagaaagagttttccgaaaccctagaatccggagagaggctatatatagtgatgtacatatatgtcaattaatatatgtttgtagcttttgtagctagctatatattagccatagaccatagtatttaataatgatggcttggagccatgagttttagcataagcttgttttaatatgattccatgttgccctgtttctttatatactagtatactatatgttattcatgagtttggaagtatcggtttgttacaaatcggaagttttgatctatcatatctactgtagttgctaattaactcggcttacttgcgcccgtctcattttctttgagtgtaaaaatttgttgatcatcaataaataattttactgatagagataaaaaaaaataaaaaatttgacgtattcttttctgttagaccggataaatagacattcaatcaaaggttttttttttattaacctacaaggtagtgaactccatttgttagaacaacttccattaccttcgaactttttttattcttaataacacagaaagttgtgatacggttgcaaaacaatttatcaatggtgccgataagattgttcagagggtggcaatgggcattggtttcacttgcttaccataaagaaagcaagtttgagaaataccaaaattgcgattctgtttttgattgtgacttgtgagccccaacaatatatgtatatatttcagcttgagctcaattcccatatatgctacaactctaagacgcaatttatgaaaatttggattttaaatagtcatcatgtccatgtttctcgagatggatatctaagagaagaataatttgaattttataagtttattaagtcatatttttaatacttaaatccaaatataatttgttccatgtattttatttttattcttataatacacttatggaaatctattctattttacttcatatctttacccatttttaatttgcaatttacctttataatccacttataaatatatataaaaaaatctattacattttatctcatgtctttacagattacacattggaattgagttttttttttcatctaaaacttttgttatttatataaccatggaggtgacacaatgccggccgttaaacatgatcttagtctaggaaggctaaacataaaaccaaagccaagaaaaggactaacaaacggactggatagtttgaaacccaaaaccaaaacagaatggattttgtgctgtgtggggtgaagcataaatgtataaatggaaaatatcatcattaaagtttgggcttatacgggccttatttctaataggcaatagactgatggaacattgaatatgcctaccctggatatgtagaacttgcatggctctcggattggatacgtagaacattacacttatgaaggaaaaaagattggattctttttttttctggtcggcaaccaattaagagaaacactgttatgtttgtaaacaagtgtgtgtttcgctaaattccattgtgtgcttttccggtttaaatgacatctgtatttacctcgtgggcaatgacacatctatctatatttagctccaaaacattgctgcagcaaatttccaaaatagaccgactagattttaatataatattggtaatttttatcagttggtaagatatttaattcttcgtgaaaagatactcgtatatctctctttctgtttaaatggttgatatagtcaaaagaaaaaccttcaaagagggtttgttaaaaccatattccctatcactcttgtcagaatacccttcacagatggttttgttaatctttttgataaaaccaagttccagaatatgcaagccttttatcaaaaagcaaaagaaagtttctaaatatgccaacaagattgtgtaatttttcactatacaaggcagtcaatacttgtgtacaagtttatattgtaaaatgttttttggttagtatatagtaagaagaattcgaatcgaactctaaagtttaatattacatgaagaattcgtaaataaattaaacaatataaaacactataaaaatattttagtcggtggcttgccttcatttatatgtacgtagattcgttcgatatgctttaaaacaagtgaatacgaaaattctaaagtaagacacgaaaatacacgtcgataaaagacaaacccattagaaaaacaaaacagaaaatggaaagttctaagcaaaaacgatgtcgctctagcgtagtcgagaccattgaagcaccattaccactagtgtggtccatcctacgtagtttcgacaaaccacaagcttatcaacgtttcgtcaaaagttgcaccatgcgctctggcggcggcggcggcaaaggaggagaaggaaaaggctccgtccgggacgtgacgttagtctccggcttcccggcggatttcagcacggagaggctcgaagagctagatgatgagtctcacgtgatggtggtaagtattattggcggtaaccataggcttgttaattacaaatcgaaaacgaaggtggtcgcgtcgccggaggatatggcaaagaagacggtggtggtggagagttacgtggtggatgtgccggaaggaactagcgaggaagatacaatattttttgttgataacattattcggtataaccttacttcacttgctaagctcacaaagaaaatgatgaagtaagctctatatgtttaagctaatcaataaactaatcgtagttatagttatgaatcattggattaagaaaaaaatggatcgttatggattagtttttaatctttaaggcttttagcattgcaataataataataaaaatataaagaatcggaataatatgctcgtgtggtttctttcttccgtgattgtaattgtctcttttctcctactcttttatgaagagaaataaaatgaaggttatttctacatttttacaattaggaatctttgaaataatggttttaaattgttgactcagttggtttagttactaaatatactgatttgtattgctgacaacaaaagttagactaaatacatgtttgaaaattttcttgataattctttgtccattttgcataatgcatagtaaaagggcatcatgtaagattcttaatttgaagttctaaactaattaatatcaatactttagtataatattattaggttggaaggtattttacactcagaacagaaagtatgatgacctaaactgtagatctcgtgaatttcatggccgtttgactcaaatctgttcggaggttatgaatttatgatgtccgttgaatcattgagctgttgaactaatggagtggtttactctataatactttggtgtgtttttatcaaaaaccgaccgaatcaacagatataatttattttgaacaagttggtgaaagacaaaatagaggttctattgatctaaatataacggtgaagattggaaattttcatgttttttcgggaattgggcctttatgaatggactattgggccttgctatttcaaagcttgggtgttggtggggcttgctatttcaaagcttgggtgttggtgggggagtgtgagtggttgccacgtgaaggatacttattcccttgtccttttcattcccgcaattttagggattttggtcaacgaaacttatttcactttctttcagtaaatcgatttttttctcaggtgtatatttctcaagttattgtctactttacaaattttcatgggtttctcctcctctttttgtattagatagattagaataaatgttcgcttgaccagtcgttaatttatttatagacacttttgaagaattggttattaataaatgtagtacctaccaaaacataagtaacgacaaacagatagttaagttatgattaaaagaaatttcttcaaataccatttctattagtttttctctcatttttcatactattattcttcattctttttttgtttgtttagcaattaaaaatcaaagttttgaatattggagacggaaagaggtggccgagtaatgttttttcctcttaaaacgattactatactacctagaaaacaattacataatctaaaagtaatatactatacactatgtaatctagaagtgaaatgttaatttatagtcaatatctaaggccggttgttttagcaaattataagtcaattttttggaatgttatgagtaattcaaagtaattaaattatatatcgtaatcgagccccatcatccgtcgaggcgaatgccgcgacttttctttcaaagactttaaacaaagtaaacaattagtggtgcattcggagaaaagaaaattagtgcttacattataaacgacgttgcgtggctcggaaaaggacacaacaacatgtgttacattaccaaagtcggtaatttggctcacataaatgtcttttctcactttttcttttattttgtttgtttcattacttttagagaaaaaaaaaatacagttgaaacttgaaccacaactactcctcacgttttgccttgaggaatatttcaccttattagggccaaatttgtgtctctgatcttcttgtactccgatgtctaacgacatcgttatgtattcacaatacataaaatttccaacaaaaagaaaagtagttgatctcaatatctcatcattaattttcaatcaaatctttgtgggggatgggatttattctaagctcaattataacttatataagaaatgaaaacaaccaaacacaaggttaaagagaaagtctctttattgacaattctttagtcgcacacttataatagattcatctgctattttcctaaactccagccttcaatctcggtcctagacattcggcaatcatttacacacatatattaatacattaactctattcttatttttccgattttcttactttaataagaacaactacaatctcaaacacatagcaagagaagagatacacaaaacaaagactctgtttgttattcttccttctttttgttttcaagaatggagggaaagaaattgaatttgtatgctccattaccatcaatcaggcgaattccgtctatgatagagcgttcaagtgagttagagaataagaagacgacgattacaagaccagagcttcgatcatgtccgagcacaaaacaagaaacgccggtttttgtattaccagaccagagctttgatcatctcacagaaccagcttcaattccttttatgtgggaacaaatccctggaaaaccaaaagatgacatggctacattgattcaagagtcaggtctactagaaaccgatgatgaagaagaagacgaagtagatgaagatttggatacggtttcttcaaatgtaagcttctctgttaactgcagcacaagtggagttagcgaaatcgagaagaccggtgagagatctgattgtgatgagaagtctagagaaagtcttgatctaatgatgtcaagattcttaccagctgctaaagcaatggctcttcagacacatcagaaacatcaatcttcttataactcttcagagcagaagctaatcactcagaacagagaagctctcgtagctcgtcaaagaagtcaactggttgcagaacatgaacatttcgccattgttcagagtctttacgatgacttaaacattgatgatgatactgaagacgacgagaatgatgatgatggtgatgattatggtcatgttgatcacaagatctacccagctgaagttaccaagaaagcttgcggattcttgccaaggctttgtgcgaagaactcattcaagtttctaaacccggttcctttggattcagtatcaaaccggtctatgaaacattcgggtgatcaaaccagtttaccaaactggtcaactaggcgtctttccggttttatctctccgtaccgaacctcttgttcggattccggttttctcggaactcccgagaaaccagagagcttcaaaaggctaaacagaggaataagcaagtctcaagaactgtatccaacaagaacaagaagagaggttcttcctaattactcaaattctggagagatcaaaatgtttagaaactcgatctctactccttcgaggatccaacggaccacaattcacgattctaggtttcttgttgaggaagtaaacagaagaaggaacaacaagtcagggaatcttcaacaaacatcgtcggaatatacacctgcgctttctcctcctccgttaccggaaactccgtctcgttcctggctcggacgaaccctcctaccgccggtgaacccgagaccgtacggcgtcgttttaggtcaagttggtatcaagaaactgaatcaagaagttcttgaatctacgaaatgggaaacgatcgttaaaacatcgtatgttcacaacgatcacgctcgttattctcaggtattaattactctttgaacatttttggttctaacaaatcgaattcttttaaaaatacgttgtattattgaacattttaatttatatatcttctctttgtgacattcttctatgcaggagctgattgtttatccatctcgccagcaaaatacataaaaccagacaaattacttcttgtttttacattacaattaagttaataaatagttttaaggtttgcctcttatttttcttgtaggcaacacaaatgtacccgagattgattctttatgtttcaatatttttgtgtgtgttataattgtggcgtttgttttccgaccgcattatttgtaattggaagacctcatgttattgatgttagatacaatatggattccgtgcctaaccagttctgacttagccggtttagaccggcacaattatacaacataaccaggctgattcatagtgtcgattcgataaaccgatgaagtttcttaaataatcatatatgatcatatcatcataattgaaattagagctatctttgtctaagacacacatataatataagattttgattgacttctttttcttataatatcagctgcaattgacatttgatcatgacggaataaaatattttaagaaagtaatgggagacatgttactagcgatgatgctcttttttttttgcttttgtcaaattacgggtgatgactgatgatgttcatgcacattaattcaaaaccccatgtcatgtgtggtagtgctcattatacacaaacgatatgaaaaccgttggattaccgatatccaacggtcacaaagattcactattttattacgcactagtaaagtataagaggcaggcacgtcccccatgccccatgagtcttgttgttgaattcgattttaaaataacaaaattagagagtgagaatagatttggatactaaaattaaaaatacataaatcgttcattttgtgttttaaaatacttatggtgacgtggcttagtgtagtatagttaagcacgtataattattaaaaaaaaaaaatagaaaccaaaagtaaactacaagaaaattaggggttgtgaaattggaaaattttcgaaataattaaaaaaagaaaacaaattgtgcaaagagagagaagagggaagacaaagggaagagggaggagagagaaggcaccaccctttggccctggagagaccaaagatggtcgaagagagacaactctgagatcatcatcatcatcctgcaaaaactaacgagaaatcgattttcaaaaatataatcaagatcgatttctagggatattttgatttctaaatcctctcaccaacattctcttgcttgccctacccgcttgctggtttcatccagaaacataataatacattgtttgcattataaggaattcctttatacagtaagttttatcattacctatcatttgtttggttcctttacgtaatttgcaatgttcctcattttaaagagaacaacataatgttttttttaggtatatatacgttgcttcttcgaaacggtatcccctttggtaattattgttatttttattgcattttcttcaggtatcaagagatccacaagaagctgttagatcccagagattaacactgtgatgaaaagggttttgtgaaaatcaattttcaaacctggaaaatgatgatcaaggacccttatatccgacaattttcttctttcttctgtacattgtaatatatagaaaattaacattttttctctttctttcttttttttcttttgatatttggtttggttatatagaagagaaagtttgtttctgggaaatgggttttttggattttggtttgtaattagggaaaaaaatctttagtatatagtgtttgttgtaaaaaaccttataatgatgggttgtggatttcacttcccttggttcttcttcttgatcattggccttcaagctcctctctcattgtccctcacttcccaaggttagatctttataattattatcttcttgttcttgttttaaatgatttgtttagggttttcgttcatgctttaatttgtgttgaattcaggatccgcattgttgaagttccgggcaagagtcaactcagatcctcatgggactcttgcgaattggaatgtttctggtattaatgatctctgctattggtcaggggttacttgtgttgacggtaaagtgcagattctgtaagttcctctgttttagactaaactatgagaagatgagaccattagtgtaactatgttctgataaatgttttgttgtgtttttttagggatcttagcggatattctttggaaggaacgttagctcctgagcttagccaattgagtgacttaagatctctgtaaggatcttttctttgatgactcaactccggtttttccatgtttggttgttttttcttggagtaaaccactttcttgtcgttacagaatactctctcggaaccatttctccggtggaattccaaaggagtatgggagtttcgaaaacttggaagtcctggatttgagagagaatgatttgagcggacaaattccacctgagctaagcaatggcttatcgctaaaacacttgtgagttaacatttctaatgttcaattcttaagaaaatgtattgaatagaagtgtaccttaaatgtttgtttgctacgaccttgttgaactgatgtaggttgctttctggtaacaaattttcggatgatatgagaataaagatcgtgagacttcaatcttcgtatgaagttcggttaaagaagagtccaaagttatcacctttggctgttctcggctgtattaacagaaaacttggacactggtaagctctgtaatatatattctgattcatctaacacaaagagtgtttttttggttatgcatatccaccgttcatcttccttgacagtgtttcaagaaaccgtatcattcaagtaaaaaaggtagaagctattgtattccggatcaaagcaacctccagacgtttcttgaaagcattccctagtaagccaaagacagtttggattcaacaaatttaacgtagaaactagagataagtacttgaaggtgtcatttcaatctgattcttgcaggctttttggaggaaactgatatctacaaacgacgtgagctactcgaggagacaagtaatttagcggctgagcctgctccttcagctcctagtccttctcccgggattataactgaagcttcacctcgaagcagcgggtctttccctgcagtaaccaatgcaaagaagagaagaccacctttagtccctcctgtaccttctcctgataagggcagtactagtcctgatatctctaagaatcagccacaagataataaacagtcaaaaggatcaaaacatgtatggctgtatgtggttatcgcggttgcttctttcgtcggtttactgattatagtagcggttatcttcttctgccggaaaagagctgtcaagagcataggtccttggaaaactggtcttagtggacaattgcagaaagcttttgttaccggtaaaaaatcttatttctctttgtttccatttttactctgtttctttaggaacattaacactgaaactgagaacaaaatgtaggggtaccaaagctcaatcggtctgagcttgaaacagcgtgtgaagatttcagcaacatcatagagacatttgacggttacactgtgtataaaggaacattgtcgagtggtgttgagatagcggtagcttcaaccgcgattgctgaatctaaagaatggacaagagccatggaaatggcataccgtagaaaggttactgcttactccttcttaactaacaaaaaactaacttaaaaggtcttatcattataacttaaaaggtctttttgtagattgatactctgtcacggatcaaccataagaactttgtgaatctgattggatactgcgaagaagatgatccttttaataggatgatggtctttgaatatgctccaaatggaactcttttcgaacatttgcacggtaacaacattggtcttggtcttttcatgatgttatctcggctttcactctctcagttaataacgttttccgcctatcagataaggagacagagcatcttgattggagcgcacggatgagaataataatgggaacggcttactgtcttcaacatatgcacgggatgaacccgcctatggctcatacggacttcaattcatcggaaatctacctaaccgatgactacgcagccaaggtttgctctaaaactctcaaactgttattaaaggtgttgttattaagctgtatgtgctcaagaacctctgaaacttgtattacaagtttacgtttttaagatgaatttgctcaagaaccttgaaactgttttagatgttttgtctttaagccgctaaaaagatttgtttaaccgaatttacaggtctcggagattccattcaacttagaggcaagattaaatccgaagaaacacgtgagtggagacttagagcaaacgtcattgttactacctccagaaccggaggctaacgtccatagcttcggagtcctgatgctcgaaatcatctctggaaagctctctttctcagacgaatacggatctatcgagcaatgggtatatatatataagcgataataatccctatctaataatataaaaaaagcagaggatatcatctatatactaacggtctggtccatatttcaggcatcgaagtaccttgaaaaagacgacttgggagagatgatagatccatcgttaaagacattcaaagaagaggagcttgaagtgatctgcgatgtgatacgagaatgtctgaaaacagaacagagacaacgaccttcaatgaaagatgtagcggaacaactgaaacaagttatcaacataactcctgagaaagctactccaagatcctctcctctttggtgggcagagctcgaaatcttgtcctctgaagctacttgaccaatcagaggtttctcctattcgtttaatgctctcaatctctctatacgttgtatcgatttttctttttcttctgatttcttggatcagtttttcttatatgagcatttggtttcttgattcttcaacgttcagtttgttttgattagtgtttccttctctatggatttgatatatacgagtttcgatatgtgtttgtatattgcatagtagtattattatttttgtgatgatatatatgtgtgattctaatttttgaatattattaggtttcgcttatattttagtctttgatgtataaaatttgttacttcacattcatatatttcatgcatgaaattacattctatttttcgtttgaagtttttaacgcaagaggcagttgatggaagttaaaaatttcattcttattgtaatatgaaaaaaaaaaaaaacagaacagagaaaataactcttaagtttgtgtcaggagtgagtgacataatgtcttcggtttccccaccgacgtaactgaacctgaaacgtagccgccgctgccaaaaactcaacgcattgcggtggagttaaaatgtctaatatacctttaagcgttttcagccgcacacaatccgcagccttcaccattttctcaagacccatcgataatcctctcaccgctgcctccaccaccatcaccgattctcctccgacgtgacatccaagcctcgccagctctaccattttccgatcagccatagccacctaaagacagtttcaagttaaataactaaaataaaatgatttacaaaatttgtattcctacatttcagtataggtatagtaattactgataaaggtaaacggaaaatatttgatttaagtccaaaatttacggaaatggcgacttttttttctttcacaaattatgcaaacagtaaaaaactaaaaatagatgaataaaaacgtgattcgaagaaaatgtaatagacaaaaacatattgaatcattccaccattccgtaaaatatcaagatcatatatgttgtcttttatatcaaataaaatttaaaattgtatccaactagcaccacacagatgagtaataattaggtctaacaaaaaaatattttgtgtatatatatatatatattaaaattcggtatcccttgtttgaataaacaaaaaaaaatatatagaatatttttgatttgacactattttcaatataatttgcttttcggtttaaatgttaaggattcaatagaaaattcatcaaaattgctataactttaaagatttttttaaaaaaacataattttcaaagaaaatagagcaatcactgaaaatagcaatccattattcagttaaaaaaattccgtttataaataaatcaatgtttgaaaaatagttttaaaattctaatgaatctaaatgttggacccacctgataccgctccatctctctctcaattttttgctcatcgaacttggtcttaactctcagctcctccaatttcttcacctgagcctccacaagcaccactctcgacttcctcagcctatcaaccatccgaaacaccatcgacggtttccatccggttaaccaagagcaagcattctctaacgggtttaaccaaactgatccgaaaaaagctaagacatcttctcttatggctgcccatttggctgtataataagctttgtgatgtgtagttagcttcgagatcaaatgtcgaagctcggtctcactcatagtgttattgttatgagcaattaaaagttgatgaagatatagctcaagttgaataacccaactctcatagaactctaggaacttttcttctactaggtttctcattttgctcattagtggttatattctataaagaaaattagcattttggaacaatatttatacctacgtctatcgatatatacacaatgcatatatgtatatccccaggtgcatgcatgatgtttctgtaataataatttatctataatatatttcggaatggttttatattaccaactctactttgtacggaataacgaaatatagaaaatgaatcaatagtagagttgaaatggtcgaacacatatttattattaaaccgaaagaacttaatatgtaattatcatttggtcaccaaatattgcttaacatgagttttgaaattttgaatctcttttatttggtttttttttttctgttttgattttaagtaaccttttaaagggtaccagtttgggaaaatttaaaaagacaataattaatatgtgatttggtattcgtaaaattcttgtacaattcttgtactaatcagatactcatattttattatatgctaagtcactatggccggtgggttgtcttcccttaaaattttaatacaaaatcctatcaaaaaagctttaaaaaaaaaaaatttgacgttattagttctgaggacctctacaatgtcgacatgcagcatgtgaacgtatatctaagattttaagtatagagatatgtatataaaaattgaatgtacataaaaacttatacgtggatatttacgttcatcgaaaagatgattaaaatatacattaattaattaattctttatacgaaagaaatattaaaacttgaaagaaaagacatgacagatggaagagaagggagattacaatagttgcatggttacgcgcatcactggccgactgcaaatatgtgacgttttgcaaagttagtaaatagtcttttaatttacgtaattttatatgatgaatttaaatcaactcatgcttagtattttaataaaacactgatatatgttttccaaaaataacaaatgagaacattcattcaacagctacagaaattgatgtattgataagatcaataaaaatggaatataatagtaagatctttcttcaatgtgaagaagactcgaaaactagctaagggagggttttgacctctgagagacccgaaacggcaagtcacagagttgatggctcatgtggatcctcgtgtcgttcgtttagccattattagcgtcaacgtggaacatatcttccacgtaagttacccagtcaatctccactagctagtgtatgtatatgagaatatgcaatgtatatagttttgcttatctttataataatatgtgtaataaaatctacaaggaaaccatttttttgttatattttgattttgtcttttaatgttattttatcatggttttaaatagatttgtactaattcgaattaagaatttattataaacacggaaagcatatttcagaaaatatatgatttgtgtaaactctaaagtaaatcattttagattaactatagaaactgaaaatctaattactaattatattaaaaaaaaatattatgatgtttatctactaaaaaataaaccccaaaacggctaatatatgaatataacaaataaataacgaaacatgcagatgcagtaccattgtttcggccttttgggttgggtttggtttaaactttaaacagatagaagccgacaattttgggaccagtacaatttcttaaatggactttttctttttctttacttcctctactaggcctttagtgggctgcgagacaaataaacggaagtataacttcttctaacgtgttataaaattctgagtgtggtatgtatgggtaggtgagctcatattcatattttcttgtcaacaaattctcatttgggaactgattgctcatatgcatattttattggtgcatttacttggatactttaagaaaaaagtgcctaaaataaaaacgaagcttatataatgaggcattgagcaaattatacaagaagacatcattaagagtggataacctcataagcagcctcccaatgcgcattgatcgaattatacatgagttgacaaataatatacatcacaaagcaaagctcggacgagtaaaagtaagataaatgaggcgatgacgcgatatggttggtactgttccaaattggaataggtggcatcagtggcacgaacaaagtgatgatttgctcaataagagcaatggtcggacaactagcaagaagactacagtcataaactttgtcaacactatttttgaagttgtgatcggagtgcaaaatggtcacctctaaataaatgagtggaatctaattgaccccattttttttttgtgaaaatggtaaatgaaggagttgaatatttttttcaaataatttcttctatttaattaattcttttagttgactaaagttaaattattttctatatttaattagttgatttatttaacctacttttgttcaaaaattatttcgtaatttgcatcattctttctatcttactgatcaatgtaaacagtaattagggtcaggtaatagctttgggccttttacaaattccaataaaactctttccaattctaagagcatcattatcacggcttcttaggatataactttaatgtttttaataataaatttgttaagaacgtctctaatataagagccaattaattagttaagaacgggacaggtgtcgaaatgataagagaaaaatataaaacaaaatataaccgtgagccgaagaattattttcttctttctctctctctttcacgatgctttccgttacttcggcgaggatattcgacgatttgtgttcaatcagaaggattcgtcgtcagctcaaatatcggtctatgaaggtatgaatctctctgcatgtttgaattgattttgtttgagccttataaaattagttataagtagggtttatgaattgggaaaattatgtgtattcaatttttgtaaaatagggtaagttcatactttaatttgattagtatttgttgccatacgaatgattgttatatttatttgagatatatgtgttgaaattgaaaagattttgatcaaatctctccgttttattttgatctttatatggatgtatatggagagatgattttgtgatggaactttaaaacgatgctcttaggagaagacttacaatatgcctctgaacaaaatccaatcttacgttgttcagcctagagtggagcaagcaacggcttgattggtatgtgaattttcatgatctgctccaagctgtgtctattgacttctctccaaacgaaaggacaaaagatgtagataccactactaagagtgatttcaaaagtgaagtggttcaacgatatcgacaccctcttgaggatctctaagctccattgatttctattctttaccaattaaagtttttgccgtttaaatttggctaacattgttttcttataacttgtctctgtttacaaggaagcataggagaagaagaaagcagagtatgcacagaggatgaagaataaggctgcaacgtttcacaaggaagcagaagagagaagacattgatgactcaagacttggtgactgaagaaaactttgtatatgctttgatcaaatttgtaaagtttagtcatagaggaaaccaattgtgaagcagttttatgataaaggaaacctattgtaaactttgtgtatgtctttattccaaattccgattgtgaaacaagattaaaacacatcaaccaaaaccgtatctttgttttctccacaaaagcaaaacacataaaccaaaaccatatatttgttttctcaaaataaccaaaatttcctttttctccccaaaaccaaaaaacacataaaccaaaacacataaatttgatctagtgttacattttttttttaaagccatatcttaagagcccaccattagacattgccaaaaaaatgaacttttaacttcaaaattttcaaaataaattataaaaataatgtcaagaagataaaaataatgttaagaagatttgctaagagtccaccaatgtggatggtctaagagcaactccaaccattgacaccaaaacaccaaattttaacaccaaaaacaaaattttcattattatattaaatttctttatgttgttcaaatttatctattgcatttggtttttatgtttgtttggtttaaatgttgtaattttatgttttaatgttcaattaagctttattatatatttttaatttcaattaatgtgatatttatttcaaaaatttgtgcactttatcattttatattaatttaattaaaatttgatattttgaaaacaaaaacattcaaaaatattgctagtatacttgtcttttatttgaaaaccaacaatttaaatataaaactaaatcaaaaatataaataaaataatatatattttttggtgttttgtgaatagtgttacaccagatatagtgtcacactgttcacaaaacaccaaaaaaatagatttggtgtctattatagtgtcacgttggagaagaattatcaccaaatttggtgatttggtgtctccttggagatggtctaagtgatgaaactctatctgttctgaaaaaaaaaaatgaaaaaaaaaaatctctttctattctgattccacaagatattgaatccgatcggcaaaaagatcatccactaattcatatgttttggtgaagaaatcgggaaaaactatcccaattattttttttgaggaaatttaggtttttatttagtattatctagttcagtatttaggccatctatatcgattgattctcaaaatgagtttcttataaataaaatattgcttattttaattgaattcagttaaattatcaaatattaattaaaaaataaaattaaccatttctgaaaaaacatacggctataaacgtttcttagagtttctaaaaatagagacttctcacttctctcctctcttttccaccagtattatttagtaataagtatctctactagatactactcataaaggtgcccttagtttggtgattttggtgttcaaattattagactcttagttcaaactttttccgtttataaataagaaaaattctttctaatgcccttttcataatgcctcttttcaactctacccttttgttttatccatttttatttctaccctctttaaatttttaatgaccattttacccttatttagaaattgttttaggttaacaaaatgaaatattaatattttttcgcctaaaatattccaaaataaatttcccgccaaaattttcccaccaaaaattttcgaaaaaaaatttcccgccaaattttgttttcaaaaatatttttcccgccaaattttttttttgggcgggaaatagatttacaaggaattttaaaagagttttaaaagatttacaagggattttaaaggggttttataagatttacaagggattttaaaagggtgatttacaagggattttaaaaggtttttaaaagatttacaagggatttaaaagatttacaaaggtcttttaaagatttttaaaggatttaaaattgttttaaaatgattttaaaatatttataagggattttaaaagggttttacaatatttaaaagggattttaaagggctttaaaagatttacaaaggatttgtaaagatttttaaatggtttaaaagtgttttgaaagatttattagggattttaaaatcttttaaaattacttgtaaattttttaaaacccttttaaaatcctttgtaaatctttttaaactcttttaaaatctcttgtaaatcttttaaaacctttttaaaatctcttgtaaatcttttaaaacccttttaaaatcccttgtaaatctatttgccgccaaaaaaaatttacaaggatttttaaaatcatttttttggatgagaaaaaatttgttacgaaaaaaaaatttggcaaaattttttttttggcgggaattttttttttcgactggaaaaatgtttggcggaaatttttttggtgggaaaagaaaattttggcgtaaaaaattgacgggaaaagtttagttcccaattacatgtttctattagatgagggtaatatggtcattttgttcaaaggaaagcttatttttaaaaatggacaacataaaaaagtattgttgcaaaaatgtagtaaaaaatggtacttttgcaaaactccctataaataaactatttgaagtagatttagattgtaatcaaatactttcaacatataattttatttcgatttgagttaggatttggtttgtatttgtttggatatgaaatatcacgtgtgtgcagaactgatagagtacgtcaagtgatagcaaataactggaaaacgagacacgtatggcacgtgtcgacgagcctacacgaaaactcatgaaaggaggcgttcacgatgtacgtgtctagattcacaaaactataaatagaagcaactttactgttccaaatctatagttgaatagttgtcgttttatatatgaaggatctgtagtttttaactgattaatacgttcgatgaaaaaaataatacatatctcttttatttggagccacataatctttttctttttccatttcttgttttacatttctataaacttgtgacaattattttgacagatgtttacgaaataaacaaacaaacaaaaagaaggaaggagattccgaacaaaaatatgtaggggatcggagagagcaaatgagtcgctgagtgcaaagagacgggtaagaactaagaacatgacatagagaggacaacagaaacactctgcgtagtgtatttatcaacaacaacaaaaaaaaaaatgaataacccttttgattttaatttctcaatgttaattgtatttggcagctccgcgagtaaggttatttagagccttaagacttaagagtgttgagtaaattaattatctatattcaacagtcttctcgtctattatatactctttaattagcagtttaaaacctatacatgtagtctataaattataaaatttcaatacaatttgacattgtcgttactaaatgtgaaacaaataatatggtggtttttcgaaaagaaaatatactcatacaatattttaatgcgattttatcagctctaaccagccgataaaattttatcaaaaaaaattgaatatgaacttcggtaacttaggggtagaggttaactctattccgacaagaatgatgcggtttgcagagaggagagtacaaccaaatatttactttatttaaataaaaatatcggaaataaacggattttaataaccgatcatcaaatatctttttcaaaacgacaagctctccatgcatgattttcttttcttttttgtcttcttacataagcattttctaaatataaatataatctaaaacgttaaactgtatacaaataaacaactttaattgcaagtttcgtactggtgcataatctaaaactatataaaccggacgaaccgaaaaaccaaagcatagagattacaaaaccccaacaagaaaagaaaaatggagaatccaagctcaaacttagaaaaactgcaacaagattgttataacgaatggatgagtttacaagccaaacgcataacggagcttaaagaagccatatccaccggtgaaaaagacgataacaagcttctagatttgatacgaacggcgatcagagattttggagactacgcccgaaaacggtcagaacattcccggcgatttagttcaaactatttcgctccgacatggaacacttgtcttgaaaacgcacttctttggatgggaggttgtcgtccttcttcgtttatacgactcgtatacgccatgtgtgggtctcaaaccgaacaccggttaaccaacttcttcaataacaccaaccacgacatcgacagtaagtcagagacgtgctttgtttattattctaaaatattttaaataagaatcattaaaagctgcgaaaatagaccatctgtttctttatatgtagtttgaatatagtcactcccatagttttaaactagagtttagtttttagtattttaatcttgatataaacttatattttcataattattctttataatgtcacagcaatttatttgtaaaaataaaaaaatggtcctccgtagtttaagcatggcgttgggtgagacacgtggtggaatcggaggaggagagtcgatgagtgatcttacggctgaacagttattcaagatcaacgagcttcatctaaaaacggtggaggcagagaacaagctgactaaggtatccgcgagcttacaagaagacacggcggatacgcctatcgccgttgcagcgttttacaaagaagtaatcggacaagctgacgtggtggtcgagcgtgcgcttgataagcatgaggaggacatgggtggtttattggttgaagcagataagctgaggatgaccacgttgaccaaaattgttgacattttaacggcggttcaagctgcggattttcttcttgccgggaaaaaacttcatttggcgatgcatgagtggggaaaatcaagagaacatcgacggcttgaagctagtggtggtgattccggtggaaatgttaccagagagtaattgctatcgatcggactttagaaacaatataaagaagtaatgtaacaatagccaagattttgacgactgatcttggcattatacatatagtgtgtgatattttataatctttttaagaaattctgttttgttgcgtagttactgaacagtattttatactggttttggaattttagttactgatagtgaaatttggattttatgggcttttaatgaataaattaatgtttttattagtagattttaggataattaatcactgttgtagtggttagaatgtcccacatctaaagtatttatgatatgatacctcaaattacatacttttttttggatagagagtatgcgttgctattatacatgcgtttgacgtttataaaaagaactatttgtatagcccactagtccatccagttctctagcaaaagccaagcacattcggaatcagatcaatgagtttgttataagaaaaaaaaaaagtagactaaatttgtttggaaagagtcatctactgcaatcgaatgtgtaaagccactgggcttttattgcccatacaatacccaacaagatccatccttctcaggctaatttgatttttgtttggaaatggataatatacagcccaattttccgattaattaaagctttattttgcaattttttattttaattttttggttaaaactaaactaaccataaagttatgttttggaagtttagatatttcccttttggatttagataatcagtatcactctgagtcacatcatttactggacaactttaaacaagaaaaatagagtagcttatgatttcaacacgaatggtaaagtaaataaaaatgaaacatttcacgcataatgtttctctatcgtgactttgtcggcaggcaaggacagttctcacatcactaccaaaaaaaaaaggacagttttcagttctcacatccccaacacagtttaaaagccaaaattcaaaatttcacccatttttcctttcaaataccgattttatataagaatatttttgtataaacaatttcctaattatttacgaagtacaaatctaaagctaaattacaaacatatagtactacaataatataaaaattaaaataataaaaatgaaagcggcaatcaaggatccgatataaattccaacagcaaagtagtcagtcaggtggtgctgggcacatgtgacattggccctacttggctttgcttcatccaaaactatgcatttcatgctggaccggattcaattatgtttctttttcttactttataccgatttcacactcacagtctctcacacacaagtctcgtgcatgaaccagaataattgagaacaaaaaaataatatacatatagtttatttggagtttctgatatatcaaaaatataaaactaaaagacgctaacataggcaaaaagttgcagtaattaaataaggaaatacaaaaaagataatttcatatatgagaagaaaaagataaccagaaagaaaaaacacaaaaaatgaagtaacaatgataaagtttaataaaaaaaacaatgataattatttaagaacactaataagaaatataaggagcataaatatgaggttgctccatattttaattaatctatttatacaacttttccctgaaaaacgcctaattttcttctttttaaaattttgttcaccgaaataaatctttcggagaatacccaaccaccaacacgtacatctctctccaagaaatggtcaaacgacgccgtgttacatgtttctatcaatcggataagtgttattgacacgacacgacaccgtttcgttttcgggttttggcataagtggtgggccccttttgagaacattctgaaaaagaatcaatagaagggaggcggcggaggagatgcgtatgatattccgggaatcggcggtagtggcccttcgtagattggaggtggtggtggttggctgtggtgtattaccggtggaggtggtgggctgtagtggacagccggtggaggtggaggtgaattgtagtagtaaactggtggtgaaggcggaggactgtagtgcgccggtgatggtggtggtggaggattataatggactgttggaggtggaggtggtgagtattctatgcacggtggatgtgattgtggcggaggggagtgtattggcgttggtggaggtggtggggatatatagtgataagtaggggttggtggtggtaatgagtaatgtggcggcggcggtggttgtggtgagctgtagtagtaaggggctggtggtggtggggatgccaaattgaggcggtgacggcaagtaaggtataggggaaggagggggagtgccgtaaattggagattgcgggggttgtgatggagatggttgcggtggatagtatgtttgcggcggaggaggtggcggtggcgggaagggagaatatgtctgaggcggtggtggaggtattgatggggaaggtgagaaagttgggggaggaggaggtggtggggatggaggagagtaccctgtaaacggcgggggaggagggtaccctgtagacggcgggggaggagagtaaaccggagtaggtgttgacggcggaggagacgatggagtcgggcctacaatgggaggactaggaataacaggcggtaaaggaggactaggtgacgacggcggagaagggccggtgaacggtggactaggaataataggcggtgaattttgaccaggtgatatcggagttggcggagttgatggcgtaggaggactaggaataggagagctcggagttggactagatggcgaaggaggagaaccaggagatgttggggttgacggaggagacgggacagtgatcggaggactaggagaaatagacggtgaaggaggagaaccaccgggagaaggtgttgtcggcgatgatggaggagaaccaccaggagtaggtgtcgtcggcgatgatggaggagaaccaccaggagttggtgtcgtcggcgatgatggaggagaaccaccaggagtaggtgtcgtcggcgatgtaggaggagaaccaggagatggcgtagttgaaggaggagacgggacaatagacggtgaaggaggagaaccaccaggagatggagttgtcggcggtgacgggacagtgatcggtggactaggagaaatagaaggcgaaggaggagaaccacccggagacggagttgtaggcggtgatgggacaacaactggaggccgagtagaacgaccacatccaaaggaaccacaatccaccggcggaagagaagagaaagccgcacattgccctggtgatctctgcgcaggtctcgccggcaaacaattccgccgatcatcaaacccaggcaacccaagacaaaccggcggctctccagtgaagaaattataactgaaagtgaaattctccaacctcggcaactgacaaatagtcgccggaatcttaccagagaatctattatgcgccacatttaactgctccatcgaaaccatcccgccaatactcgccggtaacgacccaacaagttcgttaaaactgaaatcaaataccgttacgtttttcaaccgtccgatctgcgacggtaaacaagaattaaacccattttccatgaagatgatctcttcaagattcctcatatcacccaaactcgtcggaatacaaccgtggaaatgattattcgccacaacaataacggaaaccggagaatctcccaaattatccggtaactcaaaccggaaccggttatggttgataaaaatcgcatcaagatctttgctgaagagctctcttggtacaggtccttcgaattcgttaaaccttagatccagaaacttcaacgacggtaactgaaggacaacagtagggaatattccggcgaaccggttattactgagatcaagctcgaataaaagcttaagacggttaaaccgatgcggtacggttccacaaaaccggtttgaattaatatgaaacaaagcgagatctgttaacaaaccaagctcttgaggtagataaccagcaatgtcagcgtggtttagatctattccggcgacggtacggatccggcggttatctaaagccggagcacagtaaacgccggtgtaactgcaaacatcagaaccgatccagtttgttgtgaagttgtttggatcagagagaatagcttgtttccaagcttgaagagctatgtaagcatttcgaagtcgtggattctcgaagactagagatgggtcaacgtcgacattctcgccgcggtcgccgaactcgtcgcggaagtagagaagttgacgttgtgtgattagccggacttcattgtcggagagatctccattgaaagtaagtgaaagagagtaagagatacttgtgaagaagaaggtgataaaaagaagaacaaagatcagagacgtgttcttcatcatcatcttcgtcttcattacttcacataacaagacatcagtggatttgaaggaagaagaagggtaaaatgggaaatgtaagtgagaatctctataagtgaagaagtaatgtgtgaagagggaattataagtgagagagagacaggtctttgcacagctcagccctattcatatactcttcacttattataacactgtctgttttacactgtcaaaagtgtaatgttaattaattgatgtgtgtccatgaattacctaacaattatataaatgtatgatcgactttttggtttcttttttgaactaatcacatgattgattatatacgttacaaattataattgtttaatgattttggtcaacactaaagttttgattagagacaatttacattgctctaggcattaggtagttaattttgtttagcatcatttcaactattaattattacttgctgatattggaaaccttttgtgattagccatacatttggattaaattttggtaaagacttgttaataattttgtttgcatcatgaactattccaatacaacgattagttgcattggaaaacatttatatctactaataattttttgatcaaagtttggtaaatactacttgttactaataggccatcacacggtttttaatataagcatatccataatgatgcttgtgtacaatttgaatcagaatatctaaccgaagccaaaaaaaaagagctccattgttaaaagttctcatttaaaagaaatttgaatctaaatgaactcaattatcgttatctctcgcttgacatggattatcaatgttgttaaagcccataaaatgaaaatgttgctgtgctttgtattttacagctatcatgtcaaacagtaagttaaatgaattagttgaaactcgtaactcacgtgtattcatttttttcttttgaggtgtcactactcactagtccaaaacataaataaagttcaacagttaactgttcttatgtcggaattgtcttaaaacgacatgacccacagtaataatatacctttatatttctctatatatattggatcgacagaatatgaaataatgtttatatttacccttgatgttattgcgattgtctataatataaatttaaatgctaagttttttttgtatatatggaataatggtttgcttcagtctttgtaatttataaatttataaattgtgccaaatgtttggcaaaaaacataaataatgtgccaagtatattattttatggcgagtgattcaattcattttttatattttgttccatcctcttcttatacctttgcttgcaaatatgaaaatatgaactataatgtgttatcaatcagatgttccagttcatgtagagttgtagacgcatataaatttggttttcttgattcataaatgatttacgataaatcataacaagttaaagtgtttacatttatagattggatactagtaagctgataagctgaggtttgagacacttaggaagatcgtgggtgttgttacgccggttcaagcggcatagtatttgctcgccgagtaaagattaaacttgtcgttgcaagagtggggaagagttagagaaaggcgtgggtgtgcacgtggggaggatgcaaccgccgcaagaggcggagccgggaagtcaaacttaaccacttgttgatgtgagtacgtgagtttgaggtacgtatagtagataatctttttgtaatattgtctaagtagagaagagatcatgttaggtgtcttaatgtgtatacgagagtgagacgtagtagtagagtaccactaccgacatgatgcatgcctaagcttttgctgttgtcgtcttatacacataaggaataacaaaagctccaacaagtctagcgacgcttactctttgtctatgaatacagacaagtttttttcttataccatgatttgtttttgtttatttgagttatttttttcactgtcgagttactaaaatactactagtttatacgtttcatatgaaatttatgggtttttttttttgcacgacttagatattattttttaccaacttaaatttatgggtttttcttgccaacataatttgttttgttttattttgattgtttttctgtaaaattttagatgtacttgtatgattcagaaaagaagatattatttcatttttcaaagtgaagtatgtccaaaataattttgtcaggcactagtattattcatctgcgttttgtccgtttacatataaactcaaatatctacaaaccaagagcgataacatccaatttaataaaggttaaagcacgatttcacaaaaacccaccgcgtagtgattagattacacgtaccgtatgcatgcatttacatttacatgtatctaaaccacattaaaaaaaagatacacatatatgcaccgatccaatgtatataagaccatacgggaattacattttaataactaaccagctaaaaacaataagagagatatggaaagatcttcgagttatggggttgaaaaacttcaaaaaagatgttaccatgagtggatgagtttacaaactaaacacatagatgatctcaaagaagcactcatgtgtcaacgaaacaacgatgacaaactcgaagacctcgttggtaaaatcgtcaatgactaccacacatatgcgggaaaacgatcagagctctcgtaccgatgctgcgctcactactttgcaccgtcgtggaacactcctatagagaacagtatgctatggatgggaggatgtcgtccttcttctttcattagacttatatacgcactttgtggatcccaggccgaaactcagctttctcaatatcttcttaagatcgatgacgacttcgatataaaccatggtggtttcatgagtgatcttaccgcgacacagcttggaaaactcaatgacttgcatttggaggtaataaagaaagaagacaagattacgaagacatctgcgaattttcaagacgatgtggcggatttgccaatcgcggatgtggtgcatgctgatgtagcggtggaggatgctttggataagcatgaagagggaatggcggttttactggcggaggctgataaactgaggtttgagacgcttaggaagattgtggacgttgtcacaccgcttcaagcggtggagtttttgcttgccggaaaaagattacagctgtcgttgcacgaccggggaagagttagagcagatgtttgtggaggagtggggggcgccgctgtctgaagaggtgaggtggagcggggatgtcagacagagccacttgttaaagtgcgtgtcagtcagtagcgtataatatatgtgtaatatttgtctaattagagatgggtcatgtttagtgtgtgcttcatgtgtatgagatgttgcattattattttcacagtcgaattactaaattattatttaattatcttgttttgttttgattgattttctatgacattttactatgtaaagagtataatgttaactctagttgtaaattttcctggaaaataaacttactaaataatttggaacagtatatttaagttttatttatcataaaaaatacgtggaaaaagcttaaacaaaactagtggtaggtgttctttcaagacatccgataaatttggccaatggtaattggtaactgacaaactaatttggtgactggcagttgttggatctttatataatttgaatattcatttttgacatagattatcattgttgtgtaagcccataaaattaaatgttgaaattgtaagtcgcgtgtatccattttctttagtacctaaagaaaactttggttgttacgagaccacgagagagcaggcccgtctcaatataagatgaggttcaaagtgatattttgaaacattatattatagtagtttattttcgttaaccattatttacggaattcctacaaaaggaggtattttatattttttttgacgtcgggaagatattttgtatctttaatatactttctaagtgaaataggtccaaaaatagttttgtcaagcactttcatccgtgcccttttgtctgtttccggctaaagcaaagatccacaaaccaagagaaacttccatttaagaaacgtttaaaccacgatacgattacacgtaccgtcgtatatgcatgtagttgtaattacattttttacttaaaagtatatgacgacagataaaaaaactttaaattgtacatacatgcaccaatccaatgtataaaaggcaaaagaatagcgttaaaatgcattcacgaactaaccaacgaagaaagatggcgactagttcttcgagttatgggattgaacaacttcaaaaaggatgttactatgagtggatgagtgtgcaggctaaacacatagttgatctcaaagaagcactcatgagtcatcgatccaaagaagatcacaagcttgaagaactcgttggtaaaatcgtcaatgacttccaaaaatacaccgaaaaacgatctgagctctctcgccgaagctgctcaagctactttgcaccgtcgtggaactctcctctagagaacggtttactatggatgggaggatgtcgtccatcgtctttcattagagttatttactctctttgtggatcccaagccgaaacgcagctttctcagtatcttctaaagatcgatgaaaatgtcgaagtaaaccatggtggttccatgagtgatctaaacgcgtcgcagcttgcaaaaatcaatgatttgcatataaaggttatagagaaagaggacaagataacaaagaaatcggcgaatttgcaagagaatgttgcggatatgcctatagccatcgcggcttatgccacggacttgatgaatggtgacgtggtggtggaagatgctttagataagtatgaggagggcatggcggttttaatggtggaagctgataaactgaggtttgagacgcttaggaagatcgtggatgttgttacgccggttcaagcggcggagtttttgctcgcagggaaaagattacacatatcattgcacgagtggggaagagttagagaagagcaacgttttgggtgtgtacgtacggatgcagcggctgccacgggaggagcgggaaccgagaagtcaaagaggtcaagcttgttgatgtgagtttaaagttgaatatatataacttgtgttatatttgtctatgtagagataaaatcgtgtttaagtgtctttatgtgtaatatatgtatgagagagtgcggctagtttcgagatgatgcaagcataagcttttgcttttgtcttatataataacaaaagctgaaaacaatcaagagagtcgaattttttatgaatcttatataataaagtaagatttcctcaaacttgtgctctaaaaatttgacaagtggcgctctattcattcgacatgtgtcattcttctcaaatttaaatatattattttccatattctttaagtttaaaatttggcctctcacataatcgattaaatgtttatttgtatatcttgaaacaaaataaacaacataactgaccatataacttaagtcataaatatcatttacaatataataaattgaatgaaaaaacaatgaattactcataatacgtttcagttatgttgtgaggttaatattctatttaatgacacatgtgatatcacgttttcttttatttattatgtctaactattgcaggtttttttttagtcaactaaactgttctatttcataaatcaaagcagttacgttacactaacataattatcatttatgtaattatgaccatgatttcaatatttagtatcatatttaatatcatttttagtgtaacccttcaccttataaaatgcaagacgctgaatgtcagtttttttaagttggtttctctgcatttgttaacgcttgaggttgaagcttcattctttctatacgaagataataaaaacgtgcatggtaaatttcgggaattacttcgagaggttgcctgtgaagcttcctaataaccgccatgtggagaaggagaagaagaaggaggtgaaagaagaggaggtggagaattgggggcttagagagttgatcgatggtggtgacgctgctcctggtaggattcttcataggaacaacatcaacatcggttcctcaaggtttgtttcttacaactccttttaaatttctatcattctgtgttgctttcgggattgtttaaacatcgaaataatattttgtggtctgctaagtctttccacataattaaattgaaagtaaagagaaaaaaagacaaagcacgaaccatatgagtatgacggattggagaaaccaacgaatggtaatctcaaaggtttgcttcgtcctctgtattacgttgttttttatttttctcattttcaccaaagaaatgaactaaaatcaagtttctctctctcatttttataattttaatatttgttttgtgtagcctttgtatcgtccaaatgtggtgatactgattcacactttgttacttctcttctttataacatgtgttcatgtgtttttgctaatacatacttttataggtgcaatggtagatacaaagtggcttaaaaattattacactaagaatttcttagcaatcattacactgagaatttctgttcatgatgaaggtaataggtaggcaaatcatatatgtgttgctcgatgctcatctgtgatgtatattttatttaattattaatgtcattgttctaattttttctccagctatttgtgttttaactattcgagtcacaaccatagtcaaaatttcaaagtttagtaaatggtgtcaaaggcctttagcttcactttagtggttcgacatgggaacctggtgtcttcaacctgctattttatgaacatgtccgatattttaatagaggatataaacatagtattaatggatatacatatatatatatttaactaaatatctttaaaaacaaaattttatgtgactttcgtaggttttgaaataaagaggttgagtcaaattttagagtatatgcataagtgaatatgtgaaaggtggatttcttttagaaatgacttgatgaaaaatgtctaaggtaccttctcacttttacatgagaaacaaagtatcttttaccttcattttctacttattcttcatgttttgaagttgaccaatgttgtttataaaatatttatgtcaagttgctaaaattcatattaatctttaaaattattttagtttttcaatgaaaaataccaacagtgagtactcaaccaaatgataaacatatatagccaaatgtttattggatccatatgatatttcctggttggtcctgcttaattcattcactttttattttaatgtgtggctacttctttaattttcgtctctttcatctagtttatagtttaatatacaaacattattcctatttgtacacatttgatttattattgatcttatgtactaaacagtaacttataactcattttgctaatcatagtaattgaaagaatgtttatcttttacttatcatgctaaatttatactatatttcgtttcttaagttttatagtgaccataataattcgtcttttgatgcatttgttggcaaatgaggtaatatagaaagaaattacatggataaagataatatagaacctacgagatttgatgaatgatgaaactatacaaaatatataatcttcattgatatcattggtgggaaattctgttaatttaaattattttgtatgttgttacttgttacattgtactttaaattttaaatttatttagttttcaaccgaattatggtatattttcttcaatatttgattatgtgcatcgaaataactttaaacttctttattaaaaatcatgtgtatatagtaaatcattagtaaataaattcaatactttcttaccatattgttcaaagatggaagaaatagtaaataatttgaatattaattgtataaagtatttagagttcttttgatatcaattagtattaatatatcaatattcatatatgttaatcttactcattaatcaagactttatcaatctcacaacttcaaatctattaactactttacaatttacacacatactataatcaatatgatatatacaattatgaaatcttttactcagagaaatattgcatatcattttcatatatttaaataaaacacaaggcttatcttgtatatcaatattataatttttcttttttgatcaattcgataatttttaatttataaatacccaaaataattttagattataattcataaactaaatatttagtttaaaactaaaatatcataatcacaatatttatgatattttttattgaatgtattataaaataatttaatattatatcaatatatattaattatagacatatatttcactacattcatttcacccacgcatcgcgtgggacattttctagtactaaataaagttgtgatgctttttcctctaaacaccgtgttatattttgtatttttcttattttgttaacaccatgttaattgttcactatcaaattactaacataagtaattttcaatgtaatgactcacgatatattataaatgttgaaatatttcataagaaaaatacgtggaaaacctaactaaaaccaatgtaaattgacaattcgaatttgttgggaattaggtgtcgggaagtattgaatctttacatcattcgaatattcctttttaaaggttttagatttttttcttttccaaagtaaaaacggtatacacaaattgggtaagaaagagttagatgttttttgttttgtttttggtgtgcaaaaagatggagatatttatgaatcagacaaaacaaagactccaaattttagaaggtgacatgtacatctcccgaatcgagtaaaaggactacgtggtaaactacatcaacttgttccccaacacgctagcgagatcgagagtgcaaaaggactaaccaggttttaattctgtttaaaataaatatgaaatatcataactatatagtttgaatcgttttagcattaagctaatctccgaggtaaataatgttgttggcttaaagttttagggaaacttcggacgcataaaagagtccaagccgaagaaactcataacaccaaatcacccacttacataacaactttctttatagactgaaatcatctaatccaattagccaaaatttgtacggatattggcgtcttgcctcaaatctttctaccacaactcaatctttacaaaaaaaaaaaaaaaatggtgtaatgtttacgaatttctaataataatattgttcttgcacatattgatgtgtggaattttgattgtcaaagatgttatctacaaaaatatacttaaagttcttcagtcacctttatctcatcataaaatataatgaaaatgtatatgttattttgatattacttcttgttctatctgtactttaaagggacattaacacattataccactataataattgtttcgaaatttttaatatgcattataaagcttttctacaaaagaaaagacatcctcatatgggctttaatgggggcatgtgcatgtgggttgtgctggtaaattgggtcaccagactctcaccacttgcaattgcattttattttttggtttaacaaaacagccattatttccttgagctaaaaagacaaggaaaagttaatatattagctttaaattcagagacagttttctgttccttatttcccccaacaagttacatttgatattttccttttgcccaaaaaaaaaacagcaataaaagaaagggggaaaaaagaaaaaagacagagatgatcattaagcacattcaaacaaaatctccaaaaaaaagttacgagtcagttacatcatcaatgcatcatcattcatcaccaacatatatatgctttacactcacatgtaaatcgagcaaagcttggccatatcaagaaacaacagcttttgtatccgtgattgtcaaatcttacaaatataataatttcccataaaaagacaaatattttgctatcaattcaaaaccaacttgcatacacacaaagacaaacacttcacatggttcttgtcaatttctttacccacaaatagataacattcaccatcagaattttccgctattaaaatgttcaagaatcaacaaaacaagaacattcttctcttcttattcttacccattttagcaaattaaaaaacaaaccaaaaacagaaatataaccaattatcagagataacaaaaagtggattttcaagaagaagaaaggaactttcttttatttatttcattgtttttatacatatcaaagatctgattatgcgaaactgtttacaattctcccattacaaaaaaaaactgctaaaaggttagtaaaaaacataactcaatttctctaacgatcctctccaacagaaacataagtattacatataattcgattctaaatttcaccaaccgtaagcagctttttttctttcccaatccagattacaaaacccaaaacatacagtgtacatacatacccctcatgatctctggctttgtggtcttccatcaagtccttctattcagtgtcagacggcaagaaagaaatggttggagaattcgggatagcggtttcatcaaccgctgaaaccgcgacaggctcagctactacatcatcagctgtcaagttttgcaacttgggtttcaattcattgttacagaaatcttcatactctgttttatctcctcctttcttcttgacttccacaacaaccaacgatggtgtcaattcgaatatctctgctgcaatcgtcaatggacctttcactccttgtcttgaaccttcaagacttaccctacaatccttcttcctcacagtaaagctcacaactttagcaatctcttccaacttcgatataatcttcgaaaccggagctcccgaaacaaacctagaaccctccccatcgtcatcaaacaaacccgataaatcaaaaccttgcgaaaacgatataatatcgaaagcattcaaactcgcaggtctaggcaaccctccaactctcctcctaggctccaaatactcaatctccgactcagaagccgcggaatctctatccgactccaccgagtcagactccagttcatcatcatcaacaacattacacaacttatcatcctccacataaaacttaatatgcttaaaccctttcttaaaccaagaattctccataatctcagggaaagtgaaccgtttctccggattcgtctccaaaagcttcgacaacaacctggtaagctcagtagaaaaccacctaggacacctaaactcccctctgtaaatcttcttatacatagccataacattccgatcatgaaacggcaaataaccagccatcaacacaaacaagataacaccacaagaccaaatatcaactttagcagcatcataacctttcctagctaaaacctcaggagcaacataagcaggagtaccacaaaacgtatgaaaaagcccatcttgacgaatctgatcagagacagcactaagtccaaagtcagagactttaagattaccattctcatctaacaaaagattctcaggtttcagatctctatgataaacacctctcgcgtgacagaaagtaacagcagagatcaattgctggaaatatttgcgagctacttcttctttaagacgacctttagctactttattgaataactcacctccacgaacatactccatcacgaaatagatcttagctttcgtcgccatgacttcgaatagctgaacgatgtttgggtgacgaacacgtcgaagaatcgagatctcgcgtttgatgtgtgcgattaaacctcctttgagaactttctccttgtcgattactttgattgctacgctttcgtttgttttcacgttacgtgcgaggtaaactttagcgaaggtaccatggccgagaagcttacccatttcgtatcgtcccaggattagagcttgtgggctgcttctctctttaggtaacgacgtctctctcgtgattttctccgccattgatgaagaaagtttgagtcttttttggaccaaaattaaaaagtttgagtcttttttttagggatttggaagatgaattgaagaggaaaggtggagaaatcgagattctgggcgagacgagctcgcaaagatttcgaatttctcacctgttgattcgtttgtttgaatctctcctctctctcgttttgtgaaattttgtagaagaagaagaaagaagaagaaggtttctctctctactgtttttagagattcatcactaaaaatagcatttggcctctgtttataataatcgtcgccgtatatatttgggaatatgcttttatgaattttgtgtgtttatagaaaataacttttttttttgttaatggttatagaaaatagtaactttataaatttaatgcaggattttgtgtttaatgatattcttaagtactgtattgactaacaaaatgggttgcaatgattacttatcatttctcccgacgatatatataatttgtttcaaaaatttaaataagttgaaacaattacaacttgctattataaattttttatttggacttacatattcaagtaagatcatcattcacgtgaagataatacaagtttaatcatctctcaatgttaattatttcaacttgtatttaaattccttgttatttgctgcgtgtattttgggttttttcgaaccaaccgtatgtcagtatttgtcatgcctcttatgcaccaattatataccacttgtttgttacaaatactcaaaaacaaaaacataatataagtcactatcgtaactttgttttgctataattcattttagaaccgctaatgtcaaacaataacgcaataaaacgatcaaataaatgaattgatgttgaatcatttcaaataattgtagtggaccatacgatcgacattgtttcaaatacaatgtttctaaaatatctttcgaattgtaccttgcattataaacgcttttcaatgatgaattctaaactttcattaatctaatagggaaagacaattagcaccaatagctaagtgagtgggtcaagttgttggtctcgagacgaatctagatcgtagatttacgtatgaatttcaaaataaaatacttccatagaacataaaccacgtggcgtgaagatgacatcatagtttctgtggctgtattattcaaaacgatagtttattagattttgttttacacgtggcagttactcagcgatcgctttaggttcagtggtctggattctcgagttttctatctggtaagtgttaggctccacgtcatctgaacaaaaaaaaacagctgtgagtttaatcacagccgttggattgccatatgaaaatgtttttgtctttatgtagagactcacggaaattacggaatccagctatatatagtgttcacaggaaattataagcgtaaaattaacaaaggttttatacgccaaaattcggtcgagaattctaaattaattcaattgaactatgttaatggtttaattatgaaatctaaattaattcatttttataattatgaaagtcaaatctattgcaacggttggtgaaggacggtggggtcgtaagtcaacatacgtaatggtggtcggtcaagagattataaatataagcaagagaagttatcatatgaagcaagttctattgtcaatttagaacgataatgatgtaaataatattttagatagatttgtttaattatatctaaaatgaaacttactaattaaaatgaaacagaaggattttttctttccggcagtattactaaattacaaattggtaaaaatgttccacactatacctattgaataacaaatttttctatagtggaattgcgattgacagtttggcacttgcattaagttaataatttcacatatattttaagttcaaatgataattataagctaataaattcacgtagatcgtacgcacacattttgtttacatgctttaacgtgttgcatgttatatatctagtttggtatgcaagattcgtgcctaccttggaacaaaagaggcaaatgctaagacaaaagaggcaaatgcctaatcatggcccaaattatatactttagaggatcccaattcaaatagtactcggtagtattttgccgccagcttttgtcgctactttgaaacaatctttcgtatttaaagactagttttgtcttcctggttattttagtttaatatgtgaacttagcagtcctgtaaataaactgagaagttgccgacgtttgttcgatcgtttctgttttcctccgccacgaatccggatttctcatgttagaaacctatgcacgtccgatatgttgcgtttgaacatttttcaaaagagatatatatatgggcctatatgtttcttttgcaactataaatgggcctttgaataagaacacaaaatattgatattatttcatgtccaaagttttattaaactctagttgtcagctgaagtgaattaactaacaaaaaaagaaaccgaggaaaacgaactaaagaatcatttatcttagattttgtcaaaaagagggatatttcaccactttagatagaattaaatatagccgtatagggttttaaaaacatttatatggttaaacaaagtgccagaatctaactaacaaactcgcctaagtcctaactcctctttgtagacttgtaacgtacagagaagattgtataaatctatgagccttatactataaaagcccattctctccactagtttataagctttggttatggtgggctaaaagttccaatcgaagcctgaaaagtgtgaacatcataacggtgaagtgcactctaaggactgtacgttccaaaacagcatgaaccatccacaaaaatattaacaaaatatagaaaaataataaagacagagaggctaaaagagatgatgagttatataagaagtttgactaaataagtttgcagctttgactagcccaccttctcccaccgactgccaacccatccgtcaatatttctatcttcatttcctcacaaatatttattcaatctcttcattttcaaatatatagttttctagtactcgtagtatggtctaaagactttaaaactaaataaaatggtaggaagtaaatgcaaattacttgaatttgtaaactatattcatactttcgcaatgttagattagtctgaattcaaatgtgattaaatacgtttgtatatattacgttatcaaatataggttcaaattgtagggattgtccataactattgcgtatatatgttcaaaattatattatatgttgtatttgtataccatagacgttatgacatttgtaagttgtaatgtatcttaaattaatgttttgacaccggttttcaactattatggacgtctttaacgtaagaaaactgactttctgtgtgtttgaaaattagtctgctttacaaattaatctttgcttatataatttttaatgataataagattaaagaatttgataaaaaaaaaaatatatattaaaagtaatgtatattgtttttaccaaagataatctgaggttaaagttacaataataatcatatagaaacaagttcaatagcaaaattaacttagacatgcaatttaccgatttcttgacattagtcgaaaaacatttgaaactcggttatacaatgaggttatcgttcaggcctctggaaagaaaatcaattctataatacttcaataactttttagtaaaactaactggatcaactgatgaatcatatatcaaaaaaacaaaaaaaaaaactaacggaggtagacaatagtttagctggaatgcttgaagaaatggcaagaatatgcttcgagaagttatgatttatgaagaggttacctgcaaattttttcatttctttttgccgacggttggctgttagttaggaaaaagaatttttgttataggattttctcttccgtttcgtacaaacccaatcattattctcgtctttatacttaactttgcctctcattttcatgttatcaatcttttaaattaaatatatcgtcaatgactgttatgaataattagttcttcattctctgccttggttcgaacctcagtcacatggtgcacgttattgtgatttcccatacctcaagagttattcaagatcccttacagaaatatatttatataatcttttatctaatgtagttatttacaaacatgtattatctaccaaaataaaaagggctaaaagcttcttgagtgagaccgcttttggttcgattcattttcctacactccaatagtattacactattgtatataacaagaatcgtgggatttgtttaatccgtacaatgaaacaagaaagatatacaataacttaatatcatttttttttggggacaatcttaatatcatttctaatttctatagaaccaaaaacactcataacaacttaaactttgttttttgtgagaaaaataacaacttaattactagttactacattgacaatttaacatcttcagctaaaaccgaatgtatatgaacatttataatctagttgctattgtatatacgattggataatacgcatatcgacatttaaataattgagcctgaagataattcacaaatatgcaatgtaaatccgtccatacagccaaaagtatgtatgtcccatgcataattgaacaaaaagaaattatattaatattatttttgttgtcttctgcaaatgctaggactgctatcattatcatcattgattttaatattgatgtttccagaaaaataaataaacaaatataaagaaaaaaacaaacacaataagtaaagctacactattaggtaataattaaagctcatttttaagtctaaaattttaattataaaataaaaacattaaaaagttaagacccaaagaaacataaatgcttttttctttcatcaatgtcaaaaaagaagttttcccaccaaatggtcaaacttggatctttgacaatattgttccaatttcatcatgccctatcttttctatttatacacataccttagatataattattaaacccaaaatttgtgttaagaaaaaaaatagacccaaaatttgtgttaagaaaaaaaatagacccaaaatttggaatatatatataagtcaccgctggaaaaaaaattattgcaagtaatttcttatatgaaattggaatgataatattttgatcaagtatccattactaaaattttacaacgctagataacgagattgcttgaagtcgaacttgtgaacaaattataataatgtaaaactaacttgtattgactaatctttgattttttttacaataatgagtgatattacattcattttattaactaaatacaacgaatatgataaatattcagtcctcttataaactttatgatagtgaaaatttgagacattgacaattctagcattctaacattttatgagattacatgaaatgtcaatttagaccttaaaccaaacgaatacatgattcaaatttgaccgacaagtacatgatgccttccctttgatcacgaaatttccacaaagagtccgtgtctgcgtaattaaccagcaatttcaagggtgtttacgtaattgtagcttaacaaataaaaaacacgaaagaagatggcgaagaaaacggaaagtagtagatagataaagaaagagaaagagaagagctggattcacatggtcttgttctttctctctccttcttttctcatcttgcggcttccctttttctctctatcgccacaatgatcattaccaaccaaactgattgaaactcatttgttctctctctctcaaatccactctctctctttcttttctcttctcctctctgtgtctctatcgccatggctgatgataaggtaaagctgcttgtgttccttttgctgtcttttgaagaagaagatcctgttttttggtttttccacatttgacccttcaattagttgtcttgagattcctgttcttacagatgttttgtgataataaatctagtttagttagtactcttgaagttgaacggttttgagttctgggtttgtccaaagttttgagctttcgttaactttttgacttaccctgagatctctgagggttttgagttctgagcttagaattttctaagttagctctgttgggatgatccatgtctatatatctcgatctgtgattaatccagagtttatacaagctgctagatccataattgaacatagattagtccttgtttggtttgttatatgtatttgttttgtttaccattcttttggcgtgacaaaagtatatatttttagttttaactaaatcagattcactctgcgtaacggttattttgtaaccactcttttaggataaaagtttccttctttagacttttgattctcagacaagcattattcttttagcttttgataatggttttgtgctgatattaaagcttttctctttcaggagatgcctgctgctgtagttgatggacatgatcaagtcactggtcatattatttccaccacaatcggtggcaaaaatggtgaaccaaaacaggtatttttaaggcttttaaccaaatagactcacttttatgtatatgcaagattttgatggttaccaatacatttttctatgttgttgttagacaattagttacatggcggagcgagttgttggtacaggctcgttcgggatcgttttccaagcaaaatgtttggagactggagaaaccgtggcgataaagaaggttttgcaagatagaagatacaagaaccgagaacttcagttgatgcgtgtgatggatcatccgaatgtggtttgtttgaagcattgcttcttttcgactacaagtaaagacgagcttttcttgaacttggttatggagtatgtccctgagagcttgtatcgagttctgaaacattatagtagtgcaaaccaaagaatgcctcttgtctatgttaaactttacatgtatcaggtaataacaacacacattcatatcttccatttccaaagttgatgtacataagattgttcttaggctgatattacttccttttgttatgttagatcttccggggacttgcttacattcacaatgttgctggagtttgtcacagagatctaaagcctcaaaatcttctggtatgtgtaacattttaagattgaactctttgttttttttcttgcctttgtttctttcgttcttaatgtatctcttctggtctctttctataggttgatcctcttactcatcaagtcaaaatctgtgactttggcagtgcgaaacagctcgtaagactttgtgacatataaactcattcgacttgtagcggttgttgttttctgtgatcttgtcatttactgttgaaatttacttttgcttcaggttaaaggtgaagccaacatttcttacatctgctcacgattctaccgtgcacccgagctcatatttggtgccactgagtacacaacttctattgatatctggtctgctggttgtgttcttgctgagcttcttcttggtcaggtaaacaattctttcagtaaccagcttattcaatctccatgtgtatatttgcattaggactcattgtgactatatcatgttcttatgcagccattatttcccggagaaaatgctgtggatcagctcgttgaaattataaaagtaagaatctttaaacgatgattccttgcaaattacattctttggctacaaaatcctcactgtatagttgttgtacacaggttcttggtacaccaactcgagaagaaatccgttgtatgaatccacattacacagatttcaggtttccacagataaaggcacatccctggcacaaggttagtgtcttttctctttttgcatgtgttcttgtttcagtttctttcttcacacatcaactgatcataattacgttttggtttagatcttccacaaaaggatgcccccagaagcgattgattttgcatcaaggctgcttcaatactctccaagtctaagatgcacagcggtaagcattggtcttgaggtttcttcagtctctaagaatccaactgaatccttactatatattttgtttcctcgtatttcagctcgaagcttgtgcacatccgttctttgatgaactcagagaaccaaacgctcgtttaccaaatggacggcctttcccgcctctcttcaacttcaaacaagaagtagctggatcatcacctgaactggtcaacaagttgattccagaccatatcaagagacaattgggtctaagcttcttgaatcaatctggaacttaaaagggatcctgcaaaagacaactacttttttatatataatgtaccattacacgagccacaaggtcgtagttgaaggcaaacgtggaggacacaattcaaagtttttcctcctcaaactcgttcagacaaagccagctgctagcaaaaccaactcccccaaatctgcgaaaacaaaaactctccagtgttgtatctgcttatttctcttctcttttcaagtttggtgaaaaacacagtctcctctttgcttcatttcttctttctttcccccttatgtaaatgagtttagtcagaagtttttttatatagtaaagtttgggcagaaggtgaagaatgtaatcaaagtgatactctttcaacgaggagcttctttcaaacactttttttttttttcaaacacttcatgaatggatacatggttttgctttaagcataagtatatttgtattaaattttcactcaatttaattgcacgaatcattacaaaaataatatctcgctactcatataaataccctataaataaataagtgaattttttttatctctcatggaaatttgatttatgtatttatatgttttaagattcgaagaaatttttaaataatgaaaatttacaaatatataattcttaattcagaatttcagatattgaattacttattggatttttaaaacaaaaagaaaattacatgactttttttttcttttttttttttaaatatctgttagttcaagttaaaagaccatacattttctaaaggcgggacctatatcaggttaaattcatctccttttagaaaaaaaatatatttgggaaaggctttgatagcaagcaattaaagtatccgaaactaacaaaacctatctggtcttggactcttagtctttatataaacaacatcagatagatcgagagaccatacgcaacaatttactaatttctcttctccttcgttgcttttgaaaccctagttattatcgagagatcaaacacgtacgtacacaaaagaccgatcaaacagagaaggatgcagaagcgtgagttcatggagttgttcgaggcagcacttagagcggctaagtctgtgaaaggtgatgagaattctccagaggtatcgaggtttgtcgatgccatgaatcgtttgaaggaagcacccaagtcacttgtttgtgacgtggtctgcaaaacctccatggggcagggtttggaattcttcatcgatcacaaaaaccctaaaattcgatcggaaggaaggattcttcgggatctttggatgaagtttttttacgcttcaggtagagaaaagagccgtgataatagagaagctgcggtgaagatcccgacgcacgcaacgatgaagaagactggagattcaaagcgagacaaagtgcgtgagattctacaaacatctttggctaaagtcgcttctgaggttgttgacacggagatgaagacacgagtgactgcttgtgatccttgggttgtggctgtatctgtggaaactgcaatgtttgagaacttaggttgtttcatgggacctcaaaaagcaaagtaccggtctattctgttcaacatgggagatagtaacaatccagatttgaggaggaaagtgttacttggtgagattagtggggagagattagtgaagatggagaaggaagagatggggagtgagaagattcagaaggaggttcaaaggattaaagagagagcaagatttaaggaagagagtcgcgtgaagatgctttcatcagcagatatgatcatcatttagttagctgcagagatttagtcatgagtttcattattgtatagaatcagtattcgtgtcaattttctatcacaaactcgagatattagtagattgtaatttcaatacgatgatcgttttcaagttgcttcattgaatggtgtttctaaatctgcgtttaaagaatctagtcaaagtgtttcgtttcataagagggagctctgcagtttatgcagtttaaggggtctttggttttttcttttgaatgtttgtcttctattcgcattaggactcattgttcttatgcagccattaattcccggagaaaatgctgtacaatggttccttgcaaattacattctttggctacaaaatcctcattgtatgaagttgttgtacataggttcttggtacaccaattcgagaagaaatccgttgtatgaatccacgcattacacagatttcaggtttccgcagataaaggcacatctgtggcacaaggttcgtgtcttttctctttttacatacattcttgagagaaccaaacgctcatttacttaatggaaggcctttcccacctctcttcaacttcaaacaagaagtagctggagcatcacctgaactagtcaacaagttgatccagaccatatcaaaacacaattaggtctaagtttcttgattcaatctggaacataaagaatctgcacaaagacaataactctttaaatgtaatgtaccattacacgagccacaaggtcatagttgaaggaaaaagtggaggacacacttcgaagtttttcctcctcgaacaagtttgatggtcaaagccagctgcaagcaaaccaacttccccaaatctgcaaaaacaaaaactctcaagttgtatctgcttatttctcttctcttttcaagtttggtgaaaacaatctcatcttttcttgtttcttttacgcatatgtaaatgagtttagtcagaagttttatatagtatttgagcagaaggtgaagaatctagtcaaagtgatcaccaaagtgtttcataagagtttgtgcagttaagggtctttggtttttctttttttcatacagtacttttgaatttttgtcttctattattaccaaattttatgaaatggtttgtttatgactcattttcttacaaaggcaaaatcttaaatacttttttcctgtatttctgcgtaaagattctctcattattcattcattgtccttggtccttaccatattcatcaaaggtagctgagagaagtcagagaatgatgattcttaacatgttgttttaattaaatgtaatagcatgagagggcaacaatccgttgtagtctagctggtcaggatactcggctctcacccaagagacccgggttcgagtcccggcaacggagttttttttataattgttaaccgtaagtcaggggtactttcgtcattaccttatttgaagaaaccctagtgtctttcatataattatcacacactacgcagccgacgcaattcgtgtgccactctatttgctcatctccttcgatttcgaacccctaatcttgagatggtaaagtttcatccttttgatctatggttatcttcgttcctcgttttggggatttaacttactatttacgatgttgcaggcatcggagaagaagctctcgaaccctatgagggatattaaggtccagaagctagttcttaacatctctgttggtgagagtggtgatcgtctcactcgtgcctccaaggttcgttctttctttccccgtaagagtactcactatatggcttaggaaaaaaattgagactttacattttagcaacattgaaatggattggttagtaacttagttcatagatggcagtgaggaattttaattgaatcgagagttttggttattgtaggtgttggaacagctcagtggtcagactcctgtcttctctaagggtgtgtgaatatgtttatgtagattctcttatatgttatagctatgagttaaggattgtagagttcaattttagtgtggtcttgattgtaaacagcgaggtacactgtgaggtctttcggtatcaggcgtaatgaaaagattgcgtgctatgtcaccgtgagaggtgagaaggcaatgcagcttcttgagagtggcttgaaagtgaaggaatacgagctgttgaggaggaacttcagtgacactggctgcttcggattcggtatccaggagcacattgatcttggaatcaagtaagtgttgtgataataatatgggctgatttattaaattaaatgattactgagggtaatgttctcattgttctgcatttctttcttaggtatgatccttctaccggtatctacggtatggatttctacgttgttcttgaacgtccaggataccgtgtggcccgtcgccgtagatgcaagactcgcgttggtattcaacatagagttaccaaggatgatgccatgaagtggttccaagttaagtatgaaggagttatcctcaacaagtctcagaacatcactggttgaagagcttttttttgtcattttgttttgtttcaagttcttatatttaagattctggatagtaaggatttcgtgttgtggtaacctttttgacttaagttggttaagaatcttcaagtaccttctaaatatgaaaccatttttgggggtttttgtttaccaattctaaaccttttcagaatttagtttgaccacaggcaagaattggagataaccaaacttttacaaggttgagatacttgaaaatgtttcagctttacaagaatgattgtcttaatataacaacatacaatctgtcatcttgtttgcatgtaagagaatgttgactataagttacaatcaggacgatcttatcagctccaatagttcactcttcctcaactttgagtatcctttgattcctctgttctttgcaacttctttgagctctgcaagtttcatagtttctatcagtgaagctttctcttccttctttgtcaattttcctaaagctttatcgctgtttgatactgggagcttacctcttggacctgaggcagaagaagataaaggagttctcttgacaaaactagacggtggtcgaggaagctctacttgtctctttggtggcttctccttcacactagtatctcctacagttgcaaagttgattatattaacaaatggcgagaacatggatttttgacatttgaccaaagcatagttgattaccctcagttttttttcttgatttctcaagaacgtcaagaatagctttggtcagcggcttttccttagaagactcatcgctgttcttctcttcctcgactcctcgagactctcctttagagatcgaagattgaatccgtttcaagagcgaaatgatctcctcttggttcgatttacttgggtttgacgttcgtctatcagacggtttcttgcaacaaacacatcctttcttggatcttcccattgaagtataagaagaaccacctttctcttgaaaccaaatacttctatctccattaatcgttgttctcgaaagactctgctcaaagcgcaacgcaaacggcagtgaatgagtatctgcaatctgtccaaattcagtttagctgtacagaaaaaatggttttggcagttcctaaagttctacaaaactcggaacattctcaatatctctaatgattttagcaaatattcgattacctcgaacatgaagatgattggctgatttagctctcatgaatcctagtttgatcaacgggtaagcacaatgacaatgaagagccaagtccatagctttaattcctgactttccctgaaaatcagagattgtcttccgacagttctcactttggcctctttcttcacctcacaacaaaaaagaaacaaatatttatccccaaaaaatccaacctttatatgtcagggtccaattacagctacgcaaaaacttgtggaccataataaatggctaactttgaagttttgggtgctaaaaaaacacactttcaagtttttgaaacaacgctctcaagtgggctctgattttcacaaggagacttaaaccttcgaaacaacttttactgaagataaaatccacttacagaagcattacaattttcccgcgctttttccgtctgatgagttagaggaagataagagaaatggcgatgttggtgacgaatttatcttcttcaagcttctgttttttttcctctcctcatttacaaaaccagaaggagatcagaagcggcgttagagttcgaaaatatgtgattttcaatagagcctcgttgagaacagtatcagattgtgttgattcgattacaacttttgatcgaagcgtaacagatgcgaacactcaattacggagattctgcgaatcagggaatctagagaacgccgtgaaacttctttgcgtatctggaaaatgggatattgatccgagaactttatgctctgttcttcagctctgtgctgattcgaaatctctcaaagatggtaaagaagttgataactttattcgtggtaatgggtttgtgatagattcgaatttgggatcaaaactctctcttatgtatacaaattgtggagatttgaaagaagcaagtagagtgttcgatgaggttaagatcgagaaagcattgttctggaatattttgatgaatgagcttgcaaaatctggtgactttagtgggagtattggattgtttaagaagatgatgagttctggtgttgaaatggatagctatactttttcttgtgtttcaaagagtttttcgtctttacgaagtgttcatggaggagagcagcttcatggatttattcttaaatcaggttttggagaaaggaactctgtggggaattctttggttgcattttatttgaagaatcagagagttgatagtgcacgtaaggtgtttgatgaaatgactgagagagatgttatatcttggaattctattattaatgggtatgtatcaaacggattagctgagaaagggctatctgttttcgtgcagatgttggtttcagggatagagattgatttggctactatagttagtgtttttgctggttgtgctgattctcgtttgatatcgttaggtagagctgttcatagtattggagtgaaagcttgttttagtagagaagatcggttttgtaatacattgcttgatatgtattcgaagtgtggtgatcttgattctgctaaagctgtgtttagggagatgagtgatcgaagtgttgtgtcgtatacttccatgattgctggttatgctagggaaggtttggctggtgaagctgtaaagttgtttgaagaaatggaggaagaaggtattagtcctgatgtttataccgtcactgctgttttaaattgttgtgctcgttatcggttgttagatgaaggcaagcgtgtgcatgagtggataaaggaaaacgatttgggatttgatatctttgtatcaaatgctctgatggatatgtatgcaaaatgtggaagcatgcaagaggcggagctagtcttctctgagatgcgtgtgaaagatatcatctcgtggaacaccattattggtgggtactcaaagaactgttacgccaatgaagctctaagcctgtttaatttgctgttggaagaaaagaggtttagtcctgatgagagaacagtggcgtgtgttcttccggcttgtgcaagtctttctgctttcgataaaggcagagaaatccacggttacatcatgagaaacgggtatttctcagatcggcatgttgctaattcgcttgtagacatgtacgcgaaatgtggtgcgttgttactcgctcatatgctctttgatgatattgcttccaaggatcttgtttcttggacagtgatgatagctggatatgggatgcacgggtttggaaaagaggcgattgctcttttcaatcaaatgagacaagcgggtattgaggctgatgaaatatcctttgtatctttgttgtatgcttgtagccattcaggactagttgatgaaggatggagattctttaacatcatgagacatgaatgcaagatcgagccaacggtggaacattatgcttgtatagttgacatgcttgcaagaactggagatttaatcaaagcttataggttcatcgagaacatgccaattccgccagatgctacaatctggggagctttgctgtgtggatgcaggatacatcatgatgttaagttagctgagaaagttgcagagaaagtctttgagcttgaaccagagaacacaggatattatgtactcatggcaaatatctacgcagaagctgagaaatgggaacaagtgaaaaggctaagaaagaggatagggcagcgcggattgaggaagaatccgggatgtagctggatagagataaagggtagagttaacatctttgtagctggagatagttcaaacccggaaactgaaaacattgaagcttttttgagaaaggtaagagctagaatgatagaagaaggatattcaccactgacgaaatacgctttgatcgatgcggaagagatggaaaaggaagaagctttatgtggtcatagtgagaaattagcaatggctttgggaatcataagctctggacatggaaagatcataagagttacaaagaatctaagagtttgtggagattgtcatgaaatggccaagttcatgtctaagttaaccagaagagagattgtcctaagagattcaaaccggtttcaccaatttaaagatggacattgttcttgcagaggtttctggtgaacattgaactgtttcatgtattgtaaacattgttcttaccagaccggtttaagattggaacagtcctgatgtaatcattgaaaattgaagcaattagaacatatactaaaggaaaacataaccaccattttatgaccaggctggatctttgatggagctatatatcttcatgatagtatcattgcttcaaaggaaaacataaccaccatttttcattaactcgattactttatacattcaagtgtttgttacaacttttcaatcattaataatttggtcaaggtactaagacctaaccaatgacacgttttctatttttggaccaattgaaccatgttcgaacgcatgtgcagtattacataaacacaactcatgaaggaacaatgtttgttgaagaaaataattgataagaataattcaataattattacaaaataatccttaaccacttacacttaaaaaaaaaaatagaacaatatctgaaaataaactactaaattaacgtattaaacccactcaaatgtaaaatcaaagtaaaatagaaaaaaaaaaaacttaaaccgggatttgtgtggagaaccggttcggttattctccaaaaaaattcactatcctcttcttcatctcacaagaaccctaatctcactctcaaagattaggtctttctttgcttatactgtactccaatttcatggaatcaaccacaccatttggcgagaaggatcatgaagatgattaagaacacaagtgaagaaagtccaatagcaacaccaagcacaactttattaggaccatgatgctcttctttcttcttctcactagtatcatcttcatttccgtaatcataatctgaattcgaatcttctttctgcggcggtggagacaaaggcaaaccatgtttatcacactgagcaatacccaatttcatcttcgatgacaatacactatggttgtaacaaagatcactgtttccaccgattttgaacacttcgagattcttgataaagctcgcattgaatggtagaactccatggaaggcattgttagctagattcaagtgtgtgagatacttcattttggagatgaatcttggaatggtgccgtttagttggttcccactcagatctaagtgtgtaagctctggaatggatgagattgaatctgggattggtcctgatagcttgtttgaggataaagataggttttttaaggagattaggtcaccgattgagtcgggtatgtctccggagatggtgtttttggataaatttagagactttaggtttgagagcagagtaatggaagtgggtattgagcctttgagtagattgtctgataagtcaatgaatgtgagatttgagtggaatgatttagggatgtttccggagagatttgcgtgtgagattgtcaaagagacgatctcgtgcatatttcctaggataacgaagagaccagaggttgagactggaacagaagagactgtgaggtcagtgaggttaacgagacgagctaagaagactccggagaggccattacggcggcggaggaaggaggagacggcggtgaaggagtggagtgagtcagggagacgtggaggaggggagagtgaaggacagttgaggaaagagagagaggttagagatggtgagagagctctgagagctgttgtggagatggagagatcggtggagcaatttgtgaaggagatggaagtgacgaggcgaaatggggagctggtgtcgcaggttacgacggaggaggaggtggatttggtggtgggacggtggttgcaaggatctttgacggtggggatgttgagagattcaagggctttgagttgttttgggtctaatggggaagaggatgaggaaggtttgtgaggtggaatgggagaggtggttggagatggagttggagagagggaaggagcggcggagatagtggctgagaggtggaggaggaggaggagtaacggtaacgacggaggtttcatggtgaagagagagagagagagattgagaaagagaaggatagtgtcagagaaagtaaaagagagaaagagaagaagaaggaagagaaagattggatttttcaaagatgggtcatgtgacagttgggttttgtatacttttagccttctgtttttggtttaattacgattttgaccttattctaatcttcttcttttcttctatatgaactcttattttgttgcatttagtatttaactatgtttttggctttttagttcaactttggttgttatggatagagattcttttgttgtttttttgctatgtgttagaaactttgacaaatgtaaacaaccttttaaaactcattattcgacatgtaccaaccataatcaatttatttgctttacattttctctatgtcattgtaaccattcaaaactctataaagaagtgtataaataaggtatattaccaaatgttatttcaccaggatgattttatgctctgccctggatttgatcgtgtaatctaagactccattgattttgcttttgtaaatagttcatcgatattagcattagtccagtccttatgcattgaggtggggacaagaagaatatcataggaatcatatttttttgtaacccccatacatgaattaataagggaggtcttttaaaaagttttcggacagaactcagatttaggcagaaaaaagaaatacatgcatgaactaaagaactaagaagttgtacactgcaagaaacaccattagagtcacactgttaacactttgttataaacgatgcggtttttgagttttttttttgtttcactttggtcagagactttttgtgagggtttacttctagaagacggagtgaacaaaatgaaaattagaccttagagctaatatggtcaatacactcattgtccttcggcatttaaaatggtaattacatttttgttgactaaattaatactacactttatgataaattaactaaagacaactaaatatacaataaatgagtcatttacacattaaaaactagatttaattcatactagcgttttcacaaacattcaactatgtttaccccaaattcaacaacacctaatgtgtaacgtcaacaaagattattatctcacattttctaacttgattttcaatctaattatatttctatcaaaatatgttaaaagaaataattaatttgaactatttttagtaatacctctaaaaatctaactaggataaaaaaaaaaaaaaatctcattgtaaactaacttcgaaattaattttcttaattttacctcactttcatgttgagatatgatttaagaaaaacacaaaaatggctaagcatttaagaaataatttaaaaaaataattaattaatttaatatatacaaaatcacactaatgctaccaacaaactacaaacgttagatttcaatccataacaaatttatgggtatagtaaaaacacacattaaatgtcttttctttcttctcctaccttacaaatacgagaaagaacaaagctaacacaaaatcggaaaaagacttcacttttttttttttactaattaattagttttttttttctcctttccaaaacaatggagaatttcgtcgacgagaatggttttgcttctctaaaccaaaacatcttcacacgtgatcaagaacacatgaaagaagaagattttccattcgaagtcgtcgaccaatcaaaacctacaagctttcttcaagattttcaccatcttgatcatgatcatcagtttgatcatcatcatcatcatggctcctcatcttcacatcctttgctcagcgtccaaactacgtcttcttgtatcaataatgctcctttcgagcattgctcttaccaagaaaacatggtcgatttctatgaaactaaaccaaatttgatgaatcatcatcatttccaagcagtggaaaactcatacttcactcgtaatcatcatcatcatcaagagatcaatttggtcgatgaacatgatgatcctatggacttggagcaaaacaacatgatgatgatgaggatgatcccttttgattaccctcctacagagactttcaaacctatgaacttcgtaatgccagatgaaatttcatgtgtttctgcagataatgattgttatagagcaacaagtttcaacaagaccaaaccatttcttacacgaaagttgtcttcttcttcttcatcatcatcatggaaagaaaccaaaaagtcaaccttagtcaaaggacaatggactgctgaagaagacaggttcgttattaacacaagaaacctcaagaatcaattaacataatcaagacttttgatgattacactattctagaggtttttactatagtcacccgtttttgcttgtaaatgaagttttcttgttttggataatatagggtactgattcaactcgtggagaagtatggattgcgtaaatggtcgcatatcgctcaagtgttaccgggaagaatcgggaaacaatgtagagagaggtggcataaccatttgagacctgacattaaggtattttactagtagctataagatcatgtattgatgattatggaacctaaaagataaagattgttgcagaaagaaacatggagtgaagaagaggacagagtgttgatagaatttcacaaagagattggaaacaaatgggcagagattgcgaaaagactcccgggaagaacagagaactcgatcaagaaccattggaacgcaacaaaaagaagacaattctctaaaagaaaatgtagatctaagtatccaagaccttctctgttgcaggattacatcaagagcttgaatatgggagctttgatggcttcttctgttcctgcaagaggtagacgcagagagagtaataacaagaagaaggatgttgttgttgcggttgaggagaagaagaaggaagaggaggtgtatggacaagacaggattgtgcctgaatgtgtgtttactgatgattttggattcaatgagaagctgcttgaggaaggatgtagcattgactctttgcttgatgacattcctcagcctgacattgatgcttttgttcatggactctgatttgtattttttattctgcttgtttcagttttgttgttttttgtttgtctttttatacgagacagattccaccaaacttcaataatttgaaaagatataaaatattttgctttttaaaaacatgttgatgttgaaacaatagaaacctaacttgcggaacccgccaagacttgttgctaaaataagaacattacttaacttgtggctcaagcaaccatatgaaaatttataaaacaaccaaaacacatatgatcaatctttcaaaatacaaacataacgtatcttctcttagcaatcgatcaaaagacagttcagagaaagggaagtcgtatcggttttggagacgaaaggattgatacgaacccaaacaagtgaaaacacagaagcaagcaagatagaccagagaataacaatagtaggtgttctgttttgtcttcccataagacctttgaggaatggataaagatgaagaatcacccaaaaggcgaaaaataccttcccaaacaaaggtccccaagcttcataacctttgttaagagcgtcagagaatccagcaacaactccgaccaagttgattataagaagtgacgtcggagggatcaagagagttgtccatttgacaatgtaaagctcaccgaattctaaatcatctgcggttttcgatgtgactgtgaaatttgtgtcgagaccagcgagcattttgaggaatccttggaaaacggcaaagagatgagctgagacacctccaataacccaaaactgttcgtttctccataagtcttcgatactgactccgctccatcgaagctcgaggacactcgttaagatgattgatataaagagacctagaaacagcatgcttgctaggtttgatagctgcaataaagaacagaaacaaagatcaaattctcaatcttgctgtaacctaaccaaagtaattagtagtatgaaaaagttaccgttgggatgataaatttgccggtaagaaggcaaatagctggaagagtacagtaagcaacaagaggcaaagaagtgaatgggtagacaatagtgtttatataagctaatctctggagcaacttgaggcggcctccgctgcaaccgtaccacaaaggacaatgtcggctaaggaagatctcaaccgagccaagagcccaacgtagaacctggtgaagcctatctgatagattgattggagcagatcctttaaatgctggtcttaatggcatacagtaaatcgacctccatccacgacaatgcatcttgaaacccgtcaaaatgtcttcggtgatcgacccgtaaatccatcctatctgcgaaaacagaacgaaaggttataaaatgtactcacaagagaactttgatatgaagaaacaaggcacttacttcttttccccattcagttttctcttcgtatccacagctaatgacatgaatagcttctttgatgagcgttgacgggtttacagagtcgggaacaccgccattctccataagagtagactcgatgaaaaccgtagagagaccaaacgttttctcaaagcttgtttgtgaaatcagcatcgatctgtcgtactcatcgtagttgtctaggtccccaagattaaagattgcagcatcaagttcttctcgctttgcatctttgtaaatctcggaaggatcttgaggttgtttcttcttggttagacagcaacacgacgatgatgaagattgcggtaaaatcctcggttttgaaggtggactgtatccgtaaagtgcttgtcttctaaagacagtacctgtaccaacataaactggaccttgaatcccatcaagccctctcatattaacctgaaaacatcatatcaaaaccacaaaatatcataagaaatctcaaaactttgcttgaagttatgagtatgagataacttacatcgaagaaaacaatgttgcggttagcatatcgatcactcttgtcgattccatcaaatctctgtgggaactgaacaaagcaaacgtcttgaccaacaacaggatccattaaaaagcacattgcttcacgcacggctttgctattgttgacgtagtgatcacaatcaaggttaagaatgaatggagcattcgttaaaaccgcagacaccctcacctacaaagaacaaaatcattaggattgtgctaaattgaacgataaaagaaaaagttttgaagtttaccaatgcgttctctgccccggcctttttgtgatgctgataaccaggtctcttctctctagagacgtaaactaatcttggaagttcatttccttcaatgtcgcgagcaccgctatatccaagaaaaacctgcaagaaagaaattacgtgactaacaagaaaagacagagcatttcaggtcaaatgttttagctagcaaacctgaatcatcccgggatggtcacgagtgttgttcccgggccaagatgttccatcttgcattgtccatccttcttctggtgtcttttgagccttggcgactaaagcattcattcttattttaaactcttcataatctctctacaagaagagaaattagacattaagttttcgattcaatcatcggttaacgctatatgagattaatttaaggttttaaagcccttgcttacttactttcatggctctacgttctttcacaaaagaaggttgaactttatccctcaagtaatcgattttaagcgagaagtaaaactcgggagctcgtggctcgatggagtactttttgcagaaaggtacccatttcctagcaaaatctgctgtctcaaccaaagactcaaacgaaagcattgcagcaccatcatcagatacatagcaagagactttatccaccggataatcaagcgcgaggatcgaaagaaccgtgtttgcagttatcaaaggtggctcctttaatggatctaccgtactaacaaagaaatctacagctgcaagctgtgattgctcgccttctctttcgaatctgcatagttttgataaatggtttcataaaacttaaagattggtagtaactgcgcagattaagcatataacggttataaaacatttgtaaccttgcggataaccggtcgatgtaagtttctcggttaataggagaccatttagggaactgatccaacacccaagaaacagcaaaccaaatctcacatatcacagatgttagccataaaccgtaagcgctatcgacaggatgcgtgatacggtagttaaaaaacagagccaagatgatcaaccgcatgatgatgacaatcctatatgaagtgatttttgtccttgggataggaatcacaaccgaaagcacatctgtagcaccagattctgtgttcctgagaatacaaacggcagagaccaaatcaacgtctcaaactttttggtgaatgttattagattagtacgaggatgtgcttacggtggcgtatcttccatgtgctgttgggtaggaatctgagcctcatgttgttcagcttttgttgcttttggatctttcttcttcttcttgctcttcttgtctttcttgtctttccagctctccactctgttcttccaaattggattgccatattcatcattcagttcttcaggaagaaacaacaatccccaagttagttaaactattaataacctcaccaaatgtatacaaagattttggctttgtttcttagttcttaccactgtctattgttgagactgtacttatatgtctagcatgaatccctgaatcctgaaaaagtcaagataatgttctcaaatttgtaaaatctaattaagacataaaagcaactaatcttagctaagcacacaaacctgagaagtgttattggtctgtgttggaacaatggattgagttttagatgtctttgtctcaacatcatcaaacacattctctatgaaagcaaaacaaaacaaaacaagttataaatactctttaaccaaaaaatcaaactttcgaataaagtttgtaaatttataattgtaccatcgtaaggattgccgcaacgcaagcaaattcttcgaccttctttgaattcatactcaagacaagctttgcagatcgggaaactacactcatgacaagccacaaagaactctccgtttgattttacaccaatctcttcaccacaagtgttgcagatgggagacctagactccatcatcttcgaattcccctgtttggagaaacagagaaatgaaccctaattagggattgagatttggatggataacaagtttgagaagccatgagagtggaggttttgtaataagaggaaaaaaagttattaaaaaaagtttggtggattgtgaaaaatcggaagttgagaagtttctttcactggttttctgagaaagctgatgggtaagctaaatttggagcttttttgaaatgattttgcgggaaagtgaaggaaagttttagttgagaggagtgacacatgttctttgtctctaaccagcggcagatactagcttgcttgcctcctaagcgtcaccgtactttctatatcaagctaacattgaagttgttatatccggtttattcgggtcgggttattcaccattgaagttgttataatttttaagtaaatcttttcaatcaccaactttctataagaaaaataagaattaaaatcacttttttgaatcaaattaattttagcattaaaatatttaaatttatagtgtaaacaattatttaagacataaaattaaaatttatagttaaaattataagacacatatgtatctaaaaaaaatatttagttttttttttatttaggtaaatgacaatttgtgacaaatattaaagtcttaaacctaaaattttaattgtctttgtcagaagagaattttcaccgtttactactaaagaaaacactcgtcatttggtttaatatctctaatctctataacaatttgagctttagctgtaccaaaaataaattttgagatataatatcacttctctaattttgtttctgcttaatcacttctctgttcattaacgttttttgcataattctactctacatttgcaatgttagaacaaatcaatctacactcttaaccaattcagtctttgcatcatcacatctgagtttcctctggtctactgtctcaaataaaaccgttgaccaaatacagcaaaaccatccatcaaattcgaccttctgattttgctcagataagttgtaagggttgaagaatactaaagttatgggtttctacgtctctgtggaaacaactctctctgacatttctaaactcgaccaggaagaagattgtgagcttctataagaaacaagatagatgatgaaactgatgtatccaactactccaccaaaaaccagaaacccaacaagaaacccttccacttcagccatgaagaaatctagaagaagatacccatttatcatcatcacaaacaccgccacagtccaagctagcttctgcaaagatcccaactaactcgttacaatcaaaagcacataacaataaagagagatgacaaaaaattgctttacctcaagcgaaggtccgatcttgaagacacccatgatatgttcattagaaaccatagtcaaaagaggaataaccgcgaaaggaatctgcatcgactgaagaatgttaagccattcgtttaaaacatcgagcgagccctcggatgtgttaaacataatagcaacaaacatagtaggtacaatagcaaagcttctcgttataaaagctgatagccattgttccatttgaagatctaagaacccttccattataaactgtccagcataagtcccggttatagtactgctttgtccagcagctaataaaccaatcccccaaatgtatagtatcgggaaaacaccaccgccatatttctcttgtaggtaatatcccgcgttaaccagtcctatactatcagcttgtttggttccataaaaccctttcgcgaaaaccgcagttacaaacaaattgatcatgaacgaaacaaaaagcgcggctgacgattcgattgtatagtagttaagagcttcttgaactctgtttatctcctttggatccgtcttcctagactgcactaaagctgaatgcaagaacacattgtgaggcgttattacacatcccacaactccaacagcttctctaatcgtctttgatccgagtttcggaataataatacctttcaaaatcatcatcaagataaaaccaaatcaagaaatgacatcaaataagagacaatgcttaatcttacaaacttacctatgaatagttcttcaacacttggcttagtttcattaaacatccaagcgaacgaaagcgccattgtcgcaatcaaaaccgcgaaaagaccttctaatttcctcattccacatttctccaaatacgaaatcaagaagctgttttttcacaaacaacacaaatcaaaacttgtgttacaaacaacaccgcaaaaagacctattttgttttttaataactcaggtgatcctaaaggcgttctaagccaaagacctagttttgcttaccaatcaaatgatgtgatgataacaccaacccaaataggtaaaaaccctcgagtcaaaatctgaagagcgatcgcgcttccgatgacttcttgaatatcagctccgatcaaagcaacctccgccatgaaccaaagcaagattcgcgcccacgaaggatactcacttcgacaaatctccgctaaatgtcgacccgtggcgacaccgatacgagcagagagaagctgcatcagaagtcccattagcgtcgcccatagaagaagccataggagagagtaaccagccacagctccggcttgtaaatctccttcgatatttcctggatctagaaacgcgatgctcatgagaaatccaggtccggtgaatttccatagctttgcccatgagaatggcggaactgaatcgtaggttttgtctctgtcttcttctacgttcaggatctgattctccggtggcgattcgtgaagctcgtcctcctctggctgagaggtttcgggaactaatagacgtttgaattcgccgttactgtcgtttggtctcttagggctgttttcttggcgggaaacggtggatcccgtcatcttagtaacggaatattctttcggcgttactgacgacgtgatttgttttaagaaaattttaaaagattacatggattattttgataaaattaaaattaaagtcaagaatagtcaaatgagaaaacaaaagcaaattctaaaaatgaactgttattaaaagtttctattattagaaactgaattgtgatctctatttttttgacgaaaattttctaaattggtataacaaaaattagttgtgttcaaggattagcacaataaatattggtttagagatatttgcggattgaattaaaaacaaaccatagaccagaaccggttaaattacaaaatcccttaaccggtacagaatcagaccaaagctaagcaattttcaaacaagcaaatcaaaagccataacatagtttgttttcctaaaaaaaagcaaacatcttcaaaaacaaaatttgaatgtaaaatttaaaaaccgatttcagctttaggacataagaccatttagttggagcagcaaccagttttcttcactgcggaaacatcaacatcgatcttctctcctttcgaaggaacattaccggaatcttcaccagcctccattgctttcttgctcacaacatggtaaatctgagtgagtacttcagaaaacgcgttctcaacattggtagattcaagagctgaggtttccatgaagtagagtgattcattctctgcaaaagattttgcatcttcggtttggactgctacaagatggcgaagatcggatttgtttcccacaagcatcacaactatgtttgggtcagtgtggtcacggagttcccttagccatctctcaacgttttcgaatgttgagtgtcgggttacgtcgtaaacaagaagcgccccaacagctcctcgatagtaagcactagtgattgctcggtatctaaaaatagcgaaaagaggagaaacaaaaacccgttaacgacttagtcattgaaactctgttaaattagaaagataggaacataataagaaccgaaatgacaagaaagacttcaaagcaataagctcttcagcttcaatggtagaaaacgatcattaaagaaatcgatatcgtcatcagaattaacgaacatatagaaacaccatgaacatatacgataccgaagattatcatcaaccactggttgatcaaactaatcagcaaaacaacagaatttctacaaagctggtaactttaagcataattgttgagttctctcattatacacaaatacaatgtacacttcacctccagtaattatatacacgatcacaggttaggttgatttctcaagctttctctacgataaactgattccattaactaagacagatctaatgaaattgtattgactccacaatgcatcagagggccaatacctaaaacacagatcgagaaatgaacaaatgaagacaaaatcaaagagacggagcttaaacctttcttgaccagcagtgtcccaaatctgggctttgatgactttttcattaacattcaagctacgagtcgcgaactcgaccccgatcgttgatttagactcgagactaaactcgttcctggtgaatcgagaaagcaaattggactttccaacacctgaatcaccgatcagaaccaccttgaataggtaatcgtaatcatcatctgctctgtaacccgccattaacacttctcactgaatcaaaaaagcttcacactttcaacgaataaagaaacgaaaattgctctatgatcccagaaaattgaacaaaacttcgattttgcttttttactttcttctttattctctttagattcaaatatttattcctcagatttctacagaaagacacagactttgaaaaaagttagggtaagactggtgtctttctagctggaccatgatcaccgatagattctgggtgaaatattttgtatacatgtactaaactaccccggattcactccctaagatcaggggtagatccgacatttcgttaaacttttgtatgtatatgttacatgctttcattttcttgaaaaggtcaaaaagtagtggtggtggtcatgttacattggtaaacggcgatatttcagtcactctcaatgatgatctaacaaaaatgaaacatttctagctctatcttctagttagtggattctgtatatacccaatgggtttcaacacacactaaaatggaagcccatatgggctaatcacatagtagttgtgtgtattgtctaaattctttgaggttagcaaaaactcacatatctgctgccatgtgaaaagagttcaatgatttgtgtattatgtaatatgtaatccaaaaacgcatctgtacattaagaaaagaaacaaaaaaaagagtgaaaaaggaacatagacaaatgttctgtgctcctctccactcatcctccattattagccaaaaaatccattattttgtcattaccataaaagtctccatcaacccttttcctcatgaaaccctcctatcaaaatttagattctttactttttcttttctttaaaaaatgtctgaaactccacctacatcttcatcttcttcctctgttttaactcagaatgttacaaaaccagtttcagacaaacttcttcagaagtacattgacgtgtctgagtttcagtttgattaccagacaagcggtatctggtctccaccgtttcaacggactgcttttcttacaccacaaggcaaaattctcacagacagagaaatggcagagaaatttcagaatcttgttgaagaacctccacggatcaaaaggtacaatctttattgttgtcgtcaataagcttttgtaaatcttatctacaatgtacgatatatggagtatacaaacatgtttctacacgactcttttgttgttgtttttacttttggaaagatttttaacgaagatgagacaacacacagttacaaaagtagataaaacctggtttaaactgcaacagtgctctgttctaaagcttctttaccggtgattccatctttcagagtcttgaaatactcattgtagtctttctccggtggaggattctcaggatctaccgtgaaaggctcgctaaacggaaccgtacttttaacctgaaacaaacaaacaacacacaaaacagcccaattcagaaatttaactttttgaatagcaacccggaaaaatcgaaaaattgatgattctttaaaaacctcgaaggtcttgttaagagcatacgggctttctaaagcagcgatgcatatacgcgctacttcgtctcttgataccttcccctatataaaggtaaagttggttaggttagttaacttaaagagttgttggatttcaaggagaagcgaaattgaaaataccgtaatgttgtctccttgttcgaaaatgagatcagctccggcaggctcttctgttaaagcacatggccgtacaattgcaaatggaatcccgctgtcgcgtatcagatcctctccctagtcattcaaaagtaagagctttaaaatcttttgaaaatgacttttccaattttctgcgaagcagagagtatagagagacaaacctttaacttgtaagtgagaatgaaatcaagctctttgtttaatctcacggccggaggttgtttgcttagatccaaaccgggtctctctggtcgagtaactcccgcagagccaacgtgaacaaacctgtaacgataagtaacgaaatgctagttcagcatttagtgaagagtttggtttctaaaaagcaagaaactagatcagaccttggagtgacggggtcttggatataagctcgaatgctagataaaggaagctcgaaaggtccttctttgaatgtagggttaagcttaccatcatactcaaatttgctaaacataagctgaaaaatagccaacttattaatcaaacatttagaatgggaattttaagagggttaacacaaaaaggaaaacaaacctgtagtgaaatgatactgcttgcattaaaaggtggtgcatctgtaactgtacgtgcgcgaaatacaggtcttaaagacgagaaaggtaagcgtacctatgatttaaagtaacagaactataattaatctacccacaaaagtatatcgaaaatgaaagacaaaagtgattttacttacagattgccattggcctggtgaagtgtcaaaactggcggtgtaaccaacagtatcccaatcttggcttgttcggacgattagcttataacggagtccatcaccttttagtcttagctctagaccatcatatgcagagacattctccgcctcgggaaagttctagaagaaaagtgtaagactcatgcttcagtgagataacgaaggataaaaaagcttggagagattctgacatttagtcgtaccctttaccttggttcggacactcgtaaatccgccattatttgttgtggaaacaattcctaacaaaacatgttatgcttatataagtaaaaccccaagagaaggaaaatggcaaatagagttgttatcttatcaaacctttaaaaattccggtaggtccaccgttttcaccagcggttagatctactatgaagttactttcgctgacacctcccattacaacatcatccaatgctccccaaggtagatccttaaacgtgttatctatacagatatattggtaagtcttttataatgccatgtcaactcatagaaacctaatcaagttccttgacccaacttacccccgacaccaaaaataagcttcccattctcaagtccaacaccatctctaacagcattgattaagttcttcattccaatgtattccactaactcgggagagtcgccttttatctgtgaataaccaaaatctataggttttagttttattgaacattgagcactaaattcatcaaaacaatactcaagaaatgttcttatagtcccagtacctctggctcgaagaacctgactccctgcattataaccaatatccaaacagagtcatttctcaaagctagaatctaaagttcaaagcttttaagaaattccattcagaaaaattcaccgacctgattatatttttgtctctcaggtgtatctccttcctttggaccaacaataacagaaacagcattgatcactttcctcactcctttgaacttttcaggaaccaatgtattctcctttgtaatatctgcaacaatctgacaacattgaaatatatgcagatagttatcaatggtcttataactataaaaataacaagaatacaatgtggaaaatttcagtggactcaccaagtcaatctcaggtcctaacatcttccgagccttctcttcatttctaacctatgattattccccaaaaagttaaagactttgcccacattttcaaaatcagaattaaaacacaagaaaagagaaacctatcgaaaagtttagtaccaatgctttaacaggcaaccctcttttcctcaagatatcaacaatccttcttcctacaccaccagtagctccagccacaagtatgattccagaagttcccatttcagcaaccggttcctccgttgctccgttagtaagtttctcaaacaccgatgaaacaaacttcacaagcaagaaacaatcaattacttcaaatgactatattacacctctcaatgagaatcaaacaaaagtcctcatatatacctttagaggagatggtggtccattgaaaaagtacaatgttttgacgaatctaccaaagtcccaaccttgagaacctgatttcgcagtgacccgttttctgtaagaccttagctcgagagaatgtgaaacttgttggtcacgaagacgtcggcttttatcatcaagttgaagaaacggtttaggaagtgaagtgtacttagagaattttatatcaatacttgatgaagaaccctgcaaagtattaacagaaaagtcttcaaatttattgagaattttgcagactcagtttcagaaaacagacatatttaataagaaaaaactgagaaaatgcttaacctgaagtttgatgatggaaggagataacgacgatgagagcttgagtgaagacgaaacctccatttctgaattcaacaacactcgaaagattgaattctggaaaaatctcaaaagcgcaaaagatttttgtgctgtggaatcgatagagattgtagaccacacacgtggggaagtctcagcggtttgttttccggtttaattaaccggtagggtggttccggtgataccgatctaattcaaacgacatagttttactctgatgaagtttcacgcaaaagatttaatgaggaaatgcgtctgccgggagtcgaacccgggtctattgcttggaaggcaattatcctaaccgttggactacagacgctattgttaagcatatgaaaacttaattataaataccaaactaaacagaagttaaaaagcttgttgcacttgctacctgaggactaccaattgttttactatattgataatgagatttaagaaaataaccacataaaacattcagttgtttaagtatgtataagttactattcttaagccaatgtcatcatagtaacatgtaatagagctggctttttcttatcttgagcttttgacttttgtttgagactagtaaattttataggataactgaaactaggctttatcaaacattacatagaagaacatgtgggggacaatttagttctgtgtggtggttagttttgcttaatattcaagactgacacgtggagcctagcaatgccgccgcaaagaagcaatggtgggcaatgggcacgtgatttctaatttgtacataaatttagccatttaggtttagacattttctaagtattaggtactgaaattttagatttggatgttgaaattccatctgaaatatgcagtgagttctatgtttggatcggtttgtatttgtccatctacggatagccaaaatttcaaaaattgaatatccaaattgtttggtgcacaaaagaaaaatatatattcaaaagattcaaattaggtaaaaattctcaaaatacattactatttagattcaaattatatttttttaaagaacaaatacatcatggagtttctttttctttggattttaacatttgtctacattagttagaacaaatttataaaaatagggttataagtttatagcaaagtaaatcctgagtttattagataaagattctcttcaccacttacaagttccaagtgttaaagcatcagtttgggctcgagaatcaaaacactttccaaattaaaacgttaaagtttatgcgtcagagagatgtctacctatgtgaagtcacctttttagtccactgtattttggaactacaacaacctcgatttttaggtgtattttataaactcatcccttaattaaaaaacaaattcatcctcgcaacactaattatactacctgttctattttaaaaagtcaaatgtacaaaaagaaaaagtcaaatttgtctccaatattttcttttgggtatagataacagtatggaagtatttattgcagaaacgctaaaccatgatacatactgtagtactgtattttaatgtggttctaatgatcacattaattacaaatacgttgggaatcagatacatatgtcagagatgaaatcacaaataaattcaaccatttgtcaacatttaaatgttctttttcttcttaaatggattggaacttttatacgtttttttctctcaaaatatttaacatttactttcttctttatacaacgtttccttctacatagaagatcaaaagaagttttgtatagtagatcaaatactatcatcacttaaccaaattggcttgatatactgtcaaatcatgaacataaacggtcgctgtacttagagttgttcaatacaacaatcttgttcacgagccgtgcctattcccgactttttccaaagtagttgatcaatttaaagcatccacactagcgccacacatacaataaatattatcaatgtatacaaccaaaaaataatgtgaacaacgttataacaaactatagagaagattccaataatgatgatatgacttatatacatgtctcgactttcttttgtatagctgcgataaaacataactttttgttattctgggaccattaattataatgtttcacttaaaaagtgattttggtcccaaaatgttacaggtactaattaccaagttctacaactaggttaaaagtgaaaacacacactcacaatatagttcgactatttatctatatattaaatcagtatggttctgattctactgagtaccgagatttatatatataacttccatgctctaggatttgtgtccggaaagtgttattttgatctgttgccaattttgtgtccggaaagagtcatctcgaactttatcgacgttgtctaatttctgttttcagttctagtaaaacttttattcatttactaggaaaaaaaaggatccgagtactcaacatacataaaaagaattcaggtgcctaaaacttagattcgatcatatatataaaaatacaacacataccatacatgtatcgttgttttttttgtgtgtgtgtgtgtagccatgttgccattttgtagtacaaaaatgtctcatgagtcttgtaaaagacacgtgataacggcttccttcgaccaaccaaattactaatttccaaaatatagaaatcggtggaccatgcgtactccatacctcccatttattagttttatccgaatcctatgccaattcttcacttgtgttgtacgtatattaattaggaacaagtaaatttctttaaagtgttgaagctatatatgatctacactgaattgtgaactaattctgtgatctataggcatacgttatatttacagttaagattagttatatcatatagcaagtttagattttgaaattacatcttcctcgtttttgttttcacaaaaataacaaaagtaacttgaaaaattagtgatcatctcggcctcaatgtgtgcacgtgatctgacgttgaccgtaatattatagtccggagttttttttttgtcgtatcctattctttgggtgcttgtataattgcagttttgggagtaattaaaacacaccaagtccatatttttcataatggaaatttggaattttatttgagacagtaaacatttcgatagtttattttataacaacctaggattttcttttgttccgccatatttagaaacaaatcttagtccatcacttacagtcttacactgttaaacactattcatctcgatcatttttaatgatttttatagtaatcatctttacaattgatgagacaaatcaattttgagtggttgcaaaatagaaaccttaacttaatcaaaagaggcctgatattaattaagagcttccacaaatttagaatctttcttttcatcatgattaaaagggaaaatatatgataattattttggattattactattttgatgagtagaaagatttgactagcttgagtggacattgttctccttttaccatatttattgagaaaataaaaaagaattcgttatttaaccaacattatttcaaatgtagtaattttcgaaagtaaattttaatggatatttccaagcattcaaatagtcaaatggaccaatgatattactaagaaacatcagaaaaaaaagaaaaacacaagaataagaaaataaaatgccaacgactagttttaaaatctgtacttttttttcctagaaaatttgtacaaaaaataacaaaaacccaaggcgtatattcaaaggtcgaaactttatggtaatgtactaatgtctcagtgaaaaaattcagaaactttttaataccctaaattttttttttttttttttaataccctaaaactttttaataccctaaatctttttaatttaggaaaagaaagaaaaaagaacatactaatttctattgcatgcttctctcctacaaacggacacttctttattggttttgttcctatcataagcctctgtgttcgtgtctgcaacagatctgtctcctctttcatttttctttttctctttagaagaaaccggaaaacaacaaaaccctctacccgaaagggaggtttttaaagcactgtgccaaaaagccatcgttttctccagaaacccatcagtttcctctgaatcctgcatgtgaaagtttggtgaagaaagaggagagagatctgtgatttcctttaaaacgctgccgtttctctccttttttttgtttctctttctcttgatctctgttgttctgtggctgatgatgtcactaacaacgatgcccacttgcctccatcaatttttcaatctctctcatcttctttaatgtgatacaagttctcatcttcagtgtataagaatcataaattttgatcctttagcttctctgtttcttcttcttcttcttcttcccttgtaacagagagctcgaaagttttcatttttctttctttccccatctgggttttcaatttcactaatttactactcctgatttgggttttttgagattttgtggacttaaagctattgccatagtttgtcacacaaaatcacttcaaatttggaaactttttgcaaaaatgagatacaattcgatttggtacttatgcaagattccgaggaggaaagagatgatatttttctgctgaattaatgacgacgacgactactactacgacaagggttgcttcttcttcttcaacacggaacaatcgaattctgaaagatgcaaatggagatatcggtgagcatcttcgtaaccatatccatttaacgaattgtattcatttgaagaacaatatgcataagcagagtcctgttttaactgaccgtgccttaatgagagacctcattgttctccaaaggtcacggtctcttagagatccatctgcgagccctcctgcttggaacacgcctccttctgttgtggatttgcttccgaagaaaggagatcttgtggaaggaggaagaagatctgttgatttaaagaagtctagtcgtaggttgtctgctttgagtggttcttcacctgttgtcaactttgggacatctaaagtgactccttctgatgagaggtctggtcctgttagtggtgaaagggatagtggtaggagagttaagagagaggaatctagtagaaagagttatagaattggggatgattatcaaaatgttaatgaggttgtttctcatggttcgggatcaaaagctagtaggaggcttagtagggttaatgatgctatggttaagacattgtctgatcagttaaatgaggttgttgttggtgatagtgatgatgtggtttcatctaatgttcgtccacgggttaggtatggaggaggtggtggtggtggtaatactcggggatgtgcgggtggaatgagtcggcctaaaagacggaagtttagagggacgaggagagttcggggtaagagtagagatactggtggtggtaagagtgagatgtctgttgcttctaacacattgcctcaagttgagaagcatgatggagaaaaagagggatttggggaacagaacatgacaaaggcttgtgggattccatttaattggtcaagaattcatcaccgagggaaaacttttcttgataaggcgggtaggagtttgtcttgtggtatgtctgattcgaaaggtggtaggaaaggtgaaactaatgagagaaatggttctgataagatgatgatacaatctgatgatgactcaagctcttttatcggctctgatggtgaagcacttcctttactagttgatagtggagagaatgatggttgggtgcacgattactcgggggagctaggtatttttgcagacagtctgctcaagaacgatgaggattctgaccttgcttcagaaggaaggtcaggggagaaaaaacacaaaaagaagagccatgtaaatgctcggcatcgacatcggcaacagcatcagagtcttactgaaaaatacacacctaaaacattccgggatcttctggggcagaatctggtggtacaagctctttctaatgcagttgctagacgaaagcttggacttttgtatgtcttccacggtccaaatggaaccggaaagacctcttgcgctaggatatttgcaagggctttgaactgtcattccatggaacaaccaaagccttgtggcacttgcagttcttgtgtttcacatgatatgggtaaaagctggaacattcgggaagtgggtcctgttgggaactatgactttgagaaaataatggatttacttgatggtaatgtgatggtttcatctcagtcccctcgggtgttcatatttgatgattgtgatactttgtcatctgattgttggaatgcgttgtccaaagtggtggatcgagcagcgccacgtcatgtagtctttatcctcgtctgttcgagtcttgatgttttgcctcatgtgatcatatctaggtgccagaaattctttttcccgaaactgaaggacgcagatatagtttactcattgcaatggattgcatcaaaggaagagattgagatagataaagatgcattgaagcttattgcttcaagatcagatggttcattaagagatgctgagatgactcttgaacagctgagtttgttaggacagaggatctctgttcctttagttcaggaactggtaagcattgttctgtcccaccaccatataaaacaattgaaagtatatttttttgaagataatttcgaattggttttaattctttcaggttgggcttgtttctgatgaaaaattagtggatcttcttgatttagctttatctgcagatactgtaaatactgtgaagaatctgagaacaataatggaaacaagtgtagaaccattggctttaatgtctcagcttgcaacggtcataactgatattcttgctggtagttatgatttcactaaagatcagcataaaagaaagttttttcgacgacaaccatgtgagtttcgacattttccagcctacctaaatttcaatagctttgttttagtcttttgttctaatccaacttttgatttgttatagtacctaaagaagatatggagaaactgagacaggcacttaagacgttatcagaggcagagaaacagctgagagtatcaaacgataaactgacttggctcacagccgcgttgcttcaattggctcctgatcagaactatctgcttcaacgttcgtccactgcagacactggaggtagagaaagctcagatcaccatctggatccttctagcgatgcagctggtggaagaagttctggtttggacagaagaagaggtgatagtagaaaaaaccgacccgctgttgaagaaatttggttagaggttattgagaagcttcgagttaacggtttgagagagtttctttataaagaaggaagaatcgtctctcttaatctcggatcaggtaatgcatttcgtatagacaaatcttgaatctttattatgttcaaagtttctgtgaagccaacttgtttctggtgttatggcagctcctactgtgcatctaatgttcagttctccgttaaccaaatccacggctgagaaattccgaagccatattatgcaagcgtttgaggcagttcttgagtcacctgtcacaatagagatcagatgcgagacaaaaaaagacccgagaaacaacgtgcatcatcatcatcatcacccaactgtgaaagacaaaagcctgccacaatctttagcactcattggccatgattacaacatcgatggaagtggaagaagtgagatagttgaagttactgaatctaatggacaaagacgacaacaacagaagcaacaggaagaggagaggacagagccagttggttcctctgcgttagcccgagctagaaggaaacatttggaagcaagccagagtcagaaccagagccaaagcattgtgagaggtaaggtctcgttggctcatgtgattcagcaagctgacggatgctcactccagaacggttggtctaaacgcaaggccgtgtctatcgccgagaagctggaacaagaaaatctgtaagaatctctaacacttaatcaaacatcatttcaaagatagataaaagtaaaaatgttgactcttttttttcttacaggagacttgaaccaagatcaagaagcttgttatgctggaaatcctcaagaggcacacgtcgcaaggtaacatcaaaaccctctttatcttcagtgaaaatcaaaactttttggttatgagtaattgaaaagatggaaactttgacattataggccacgaggttgaaggtgagaacaagaagggcaagaccacatacgttacttaagctcgtgtcgtgcggcaaatgcctgtctacgagatctccaacaagataaaggctttaattctctgatcgatcatacgcagattttactgtagtttcaatcaatgtagcttttttctttgcattttttaatctttcttaccacaaaataaatggattaatttaactcttcaaaaccattcgtaagagagatctttattaatgtagatgcatcaagaactgcgttatgtaaaccacagacgctaacacacatgattattcgtaaggacgataaatgaaagttgttcaacgaggagatgatatttgatcaatatggttcaacgatcatcctccaattgctaagaatgttgtcgacatcattcaaaaggttgagccatttttgcaaatctttagtattagtctccttcaattataacagtaacaatttcaaaatggtcagtgatatggtttaacttaaaatgattaagttaaagcaaaagaaaatcacccgtctataagtaagtttgcgaagttccggaaccgtgtgcttgcgaaaatgatcggctgcatgaatatctttcagcctttgtaggtagccttcgacaatcttctccataagttgaggttgacctctcacaaaatcattgcatgcaaattgcattacttgtccatgctcaaattttctaaagccctatacggtacgttaggtacaccaacatatagcaacattacaacatcacaaaatattttatacttattcttggccaaagaatctacaaaacttacaaatttaaaaacgaatacatttgaactcgatcgagatgtgaataaaatgatcgttattttccattgatcaatatctagaaaatatactatgaagttatagttttaatttaacagtagcaatgacaaatttttcttttacagaagccacctctcgtacagccttgaagacaccacttgttacaacttttattagtacatattccaaattcggggtgatcgttgcaacacaatgaatctcctttgttggaagacaaaattgaatcttcattcatcacttttgtggcttcaatatctgcaaaataacatagacatacatgcgtataatcatatataccacatattcaagattttggttttaaagaatagtaatcgaaatgaaaaaaaaaaatgctcaatacggtgttgatctaatgagactaacctgcaagtaaaacggagagagcgaggaaagcgaagaaaacaaatcttggatggaccatttttttttttctaacgtactaactctataattattgtttattatattacttatgagaaatgtagacttgttaagtttgatatatatatagggtttttaattgtttgctactaaagtttttttccgttaattttcttgctaataaaggtaggcattgaattc

SEQ ID NO: 595 - DNA, 119111 bp, Arabidopsis thaliana
taaaacggagagagcgaggaaagcgaagaaaacaaatcttggatggaccatttttttttttctaacgtactaactctataattattgtttattatattacttatgagaaatgtagacttgttaagtttgatatatatatagggtttttaattgtttgctactaaagtttttttccgttaattttcttgctaataaaggtaggcattgaattctatattgaaggcatatcaacaattttcttagtatcagcaaggaaatgatatggtactcaaaataacattgcaatttgcaatgatgatgatacaattggtacatttgtagaaacaattgaattcatgtaaacaaaaatccagtaaactacaaaacagttcaacgttttgtatcagaaaatcacttgaatggatccgatcgcaagtcaatgatttttaatgattagtttccttagatttataaagttaacaaacataagtaatgcatgattggctcattgaaaacatgcatgatttaaaaagattatgaaagattcttaatccaatttatttcaaaggaaacaaatcttgaataagccatctttttaacactctacgtagtgttttattagtatcgttatttgacataagaactgtagaattgtttacgaatgagttttttttgtttgctaataaagttattaaattatattgaacgtaaatattaaacactttttttttgtaacatcgattatattcctaatattgttcttgaactactattttagtatcaataagatgatgatatgttattcatggaaacatgcattgctgaatgatattattggagtacaatggtaaacgaaaatcgagtcaactaaaacagtccaaaggtgacttgatgtcgttcaaaatcttaaaagtttgaaagaaaccaatcaaagaaatatgaaaaaaaataatgttttcatctatcaaacaaattagaataatgttttcaaataattattacataaaattataattacatcatgcactcttctttatcaataaaaacataacggggtccgtatcgtccctatcaccaagtttgaagtagcagtgatataataacgtcttgtcccatttgataatatgactaatagacagtctccaaaaaaaatcttaaaagataattataattacattttttgtatttatcttttgggtgagaaaaaataataaatacaggatggggtattattcttttattccttttcacattggagagtagaagggactgaaattggtgaatgcttcaatgcaaagtcttgacaatataagtgacacaaaaaacaaatgtaaatacactaaaaaaagcttctatatccccattttaatgtgtattaatattatacatctatatagaataaagaagaaaaaagaaaaaccatgaacaagttggtgggggtgacacaaaccatacctcaaggtaggtgatatatccatatggagagatttttagctgttcttttaaagttaggaccacttcttcctcaaaacttcacaaaaatctctaactttgagataacactaaatccatcaactttaccttcttcatgattaagaaaaaaacatacatctctcagtctaggaccatagagaccaggaccgggaccaatcatgttgttgtgttggatgaaactcgggtttcgaggttaattctgtacagattttgctacatgactaggggtgtaatcatgtaacctttgcaaaggcactagattccatgatctaagaactcaatgttattacggtattaagacagctactagaaaactaaaagatgggaggattcttgtggttcttgggttggtcacgttactccgaaagaagagaaagggagagagagagccaaagtctttgtcatcaatgaagtttggtttttgattgataaaattggtcccccactttggtataaattccagaacatacccagagataacagaaccaataaaagaaaaagttatttaggcaaaaagtggtcacaggattcttcaggcgggtttggttctttttttcaaactacaactagcttttacccgttaagacaacatcttcatctccctcctattaaacacaacgacctaaccatattacagcagtaagctctagatacatatcccttcattttttatacatcttttcatagtctagcctaagaaacccggtaaactaagaaagcacaaaacttcttcagattcttggaatgatgagatggggaagaaagaaacctgtttcttcttcttcttcttccgggttgtctcgtgctcttcctgtttcttggttttcaaagttaagtggttcttctgacttgaaacctgcaaaagagaagaagcaagatgaaaaagctagccagaacatatctgtaaaaacttccttgagttctactacacgtcgaagtgatattcatgagaacagcaaaaggtttcaaagagtatcagtagaaaaggagaactctgcaacaagatcagcagataaagagtcgaatgagaagtttgaagagataatgagcagtgtgaggaagaaagtaagagatttccaaaaagagacatgtggttttctggaagtggaggcaatggatagagacaacggaactgtgatcctgacgccaagaattcaggtgaacagagataaacagagatgtgagagacgtgaccaaaggcttcttgaacaaaagccaaagagatcagaacaagacgcgggggtcaaggtgaaaaaaccagctagaaggacaggtacaggaggttacagtagagaagattccgtgattcttggtcataccataacaaaaccggctcatcagtgggaaaagctcaaggaagtcaaactaagagaagtgaagctgaaggctgaccaacagaggaaatctctgtacctaaaaagggagctaaacagaataggaacaaaagaaaacaacaaagttagagttttttcaccaagagcatctgaaaaatgcagagttaaagctattgaagacttgaaaaaggccaaacagagagcacgggagcacgagcttctgatagaaacagcagatggaggaatggagaacgaaagctttgcagtagtgaaatgctcaagtgatcctcagaaggattttagagattcaatgattgagatgattatggagaatggtatcaaccatccagaagaactcaaagagcttctggtttgttatctcagactcaatacagatgaatatcatgacatgatcatcagtgtgttccagcaggtgcataatgattttaattttcattaattttggtgtagaatagtaacatatagattcatcagtatgatttgtggatagtttaagctttctacgatgtaacttcatgcttcttggtaatactaaaactgataacaattctataaaattgacagaataagattaatatagtttctggaaattaccaatttttagtcgattcttagtccttcaccagctaagaactcatggacaactccgtcaacttcagtcatgctacatccaggcttctgtttactctttctgctctcatgtttcttctaccgtctataaccttctcccaccttccatctgaggcatacaaatttgacatctgagcataacctgaactatcacgtagattcaattccagtaaccgattcgctatacgctctgcttgttccaattgtccaaacctcttacaggcaccaagaagagattctagtaaaatggaagcctcatctgctggaatctcgttcacaagttcttctgcttcctcaatttttcccatccgaccaagcaaatccaccatacaaccatagtgttcaatagtaggttcaaccctgtaaacactactcatcatttcaaaaagtttgcgagcttggtctaacatacccacatgattacaggccgacagaacaccaataaatgtgataccatttggtttaaaaccttcatacaccatctccgagaagatctctaaagcatcttttccaagaccgtgaacactcaaatccgagattatcgagttccatgtactgacatctctctttgaagtagctctaaacacttcaagagccttgtcaattttcccacacttcgaatacatatccacaagagctgtagccaaaaacccttcaatctcaatcccatgcttgtctatgtaaacatgtacccactcaccttgactcaaagatccaagactagcacaagcagataaaacactaacaagagtaaaaccatctggtttctctgtggaatcatccagcatcttattaaaaacctctaaaacctcgttgtaacaacccacatgtgcataagcagtcaccatagcgttccaagaaaccacatctctaaccggcatagaatcgaaaacctccttggcttccttaaccaaccccgcagccgcataacccgaaatcataaaattccaagactccacattccgttcctccatctcatcaaacaacgcacgagcttcatccactaaacctttctcaagataagcactcaacaacgaattccaagaaacagcatctctcacaggcattctatcgagcactttacgtgcaatctcaaagtaaccgcttcgtccataaacattaaccaaagtattctcaacaaacacatcagtcaccaaaccactcttgataaaaagaccgtgaatttgccttccttcttcaaacccacaaaacgcagcacaagctttcaacacaaacgtgaagctgtacttatcaggaaaaacaggaccaagaagcatttcacgaaacacggttaaggcaacctcaggagtagagctattagcataagccctgatgacggaattgtgagtgaacccattagggctcccaatgcgattgagaatagagtgagcgtaagagactgttttgggttctgggtttgttgcagcaaaagcaacaagcttgctcgcggaaaacgtgtcatgaaaaagaccggttttgagcataaaggcgtgagcttgttgaatctccgtcagagatttagctctctctgtgaatgagagaatcggtactggagttgatgaacaaacactcatttttttcaaattctctttctgcaataaccgcaagttatatgcttgtggtcggatgattatttctgcacacatatatatgtctttttcaaccatggaagtgaatcgatgtaaaatgttaaattctatgtgaaattaattaattaaacaataaacaatagacgtgtgtgtgaatgtatatagaggaaataaaagtacattattttttgttaaagagaaataaaagtacattatagtggaatttaagtaggcataatgcaacacgaaaacacttaacccaatcatcatcaaccaggttcagattataaaccaaaagaacaagtctaatagctgggacatgtttaaactttaaactggagaatcaaatttttttttttaaaggaccggagaatcaatgtttcaatcaaaaagttgaaacttttttcctaacaagtaatacaccatcttccaagttgtatcaaatcatttacttcgatataatttctttttgtagatagaaatggtggtgactatttcatcgcttgaactcaggtgcagaaagtcataaataaagttctacaattttccttaatatgcctttttaagaagacacataaggaatatattcctaaatctattcgactaataaatatgtggatgtttgaaattctagaatcagaactacgaagattaatttgaaccaaaataatttattttaatatagtatattatatattgtatattatcaaagtttattacaagtacgataggatcttatattacaagtacccacactcttatattaacaactaccatataatctctgaaaacaaatataccaaatatcatagttgtttttttgttttttttgggccaaagtatcatagttgtttagaaaattatttgtaacaagaaataccaaatgggatactattccatgtcacctttaaatatttcaggaaagccatattttcaaagagtgagtcgacaagttttggaaaaaaattcttaagtaaaaggtgcaactgttgaatgtttagggtgaaaagtcaaattacaattcctaattagcgtaattgaaatggcagagtaaactttttttcttctcttcgttttgcatgtgatcctagatttccttttttcttaatggtatcggttttctttaaacattgtttgtgacattacttattttatgcacaaacttaaatcgcaataactcacattaattataaaggttaaagaaaaaaatcattctcatgacgactgcttaacccgagaatcattgttttgtttgatttttgttttgttttaaagaagtaacttccaagtttaaaaaaaaaaaaaaaaaatactctcacggggagagtcgtcatgggaaagttgtgttacaagccctagatttggtacaaaatgaaacgatgaaagaaatgcaaattgaatcaactgattagtggttaagctctaccgtttggtaaagaagtttatgattccggtacacttcgatcttaacggcggaagcaagaacggaatcatgtagcggtagcaaaccaacgatcgaggcaatcaattcggcgctccgagactgactcatgctcaatttccttctcccaatgtctattacaaatgcctttttaacattttgaaacaaagttgttttatatataatattttattattattatttaatcaaagtctattacaagtacggtgggatgaaagatacgcatatgaggcagtttaaaccaaagtctattacaaatacgattttattccaatatactaattaagaaagcaagtagtattattcgaccagttattacttatcaatcctcgtcgctgttggatccttccgtcacgtcggagcttgctggtgaatcccctagatcttccagaggatcatgatacattggattcggttgtggcagcaactcgtttgcctccagatggtttatgatattttctagcagatctcggatttgttgcagctgatccaagtcgaccatctcatttgagtaaaaagaatcaagttagatatttaagtatcaattttaatttgatttcttcaattcttctagatatacgaaaatattaaaaaaacaaaaagtaataaaccaaaggagaaagtgagaaatacacgcagcatttggagcttacatcgtctacgaggtcgttaacgccatcaacaattttctcgaacttatctaggagatcatggaaactttttgtctagctttattcacgtctgcttcagccattgtaggtttcttaaaagctttgcaaatgaatcaaaaaaaaagaagaagaaagaaagtaaaagctttgcaaaatgtagttaaggttagaagatgatgttgattatgatcgtattatatagccaaaaaattatcattttaggtaggtcttaattaacaacaacaagaaagaagttatgatcatcatttcaggtaaattttttgaaacttgatcgtatgtgtgtggtttcaatgcatgtctaagaattgtttcttcctaaatcgtgtagtatctgttaagtggtaaccaccaccactttgtattacgcatcactgtttttaaaattataaataaataagacaaccacattaacgttgtttccaaattatgattaattaattttccttttcgtaaccaaaatctgatcatttttcattcgttaatattaaacatccacatttttattattatttactgacctatgtttgattaatgattttgcctttgttcaaattacgttgattaatcaaaaagttatatgatcgggaactacctttgttcaaaaaaaggaacaattaattatgctctgactagtattttacgttatacttctaatgtaattttgggtaatcgcaaggtccacaaagtcatatatataattggcaaatttatatgatcattgagatcaattaggtgcacaaaatcataattgccaagtgttgcaattagatatagaacatgaaaatgtggtaagacatatctaaattctgatgaatagactctaaacatatacaatatcttctcttatagaacaaaaacatttcgtataaatggagagtagatcagatatcctataaaatatagattctacttatgtgataatagataaactttcctacagtaagacaaagaactaattagttaaaatgtacacattttgaaatgattagaatatatgtacgatcattagaatcaatatctcaatatctgctttgttgttgttgttgtagtagtagttgttgttgtcgtcgtcgtcgtcgtctacaactcaaaaccccacactctcatacttcgtcattttgtgaatgaccccgtagtcttgacaattcgagtcacaatgtggtaggcatagctcaaacgactgtggtttttcttgattaattggatttttatttttgataaaattttaaaaagtctttttggataaccaaattaaaaataaattgagctagcagaaactggtagatggacaaaaggggaactgaactaaaaatatgttaagccaaaagtcacatggctaatatactcggatacaataactaggcgattaagctatatctgcagtaacatatgaattgataatatgaaaaagggaaaacatattaattcgacggatttcttgtgtatgtgtttactttgttttcattagtattttacctaattaattgtccaccaattgccatttgcttaacttgtcttccaatagtttaccatttatcaaattcgctccctaattattctcattacaaaattcaatgcatgtaagttataatatacttcttttcaacggccaaaaagatgcattcccgtttatagcatataaagaaaacgagggacttgacgttgtaatgcactaatgcttgtggacttgtggtcggatgactctttctgcacacataatgtcttttcaaccatataattaaatcgatgtaaagtgttaactcctaaataaaatcaaatcaacgggtcaatagattttaaataatttagtaatttacacttctttttgtgattgtaaatataactattctataataaattataatttaaaaaaaaatataaatccttaataataataaagaattgtcatggcatttgtataagaaaatagaacatatatataaagaaaacgtctattaattaaacaataaacaatagacgtgtgtgtgagtgtatatagaggtacataatgcaacacgaaaacacttaaccaaatcatcatcaaccaagttcatctcataaaccaaaagaacacgtctaataactgggaatgtttaagctaatctcctatttaaacagagccagcgatgattacgtttagttatacactatcacaaacgaaaacctaagaaaaaaaaggatcgaggaaagagagcttagagcgctatggagagcaagaaaaagcaattgtttgggaacttgcgcgatctgacgaatgccgtccgtccaagtgcgtatggacaacaagacgactgcggcggagttagacgcaattgccgagaatcttctcaagtgctgcattgatgtcatgacgatcacggtgagaccggtggagggagagggaccatccaaggccgaagcgaaaccatgatcgacgtccacggcggtatcaaagttatgaataaataataactatggttgtttctgttaagaaaacctagatgacgattgtatagacaaactttaatatataacgatagggtatatatatgctctgtttttttttttaatataagatggtgtttctgtgaagaaatctgatacagtggacaagtaattattatacgaaatggttgtttttgttaacagattcttaatttatttattttaagtgttgagtagagaactagatgatgacggtattggtacagtggacaaacagaatcaacctactgatgcagattgtcaatatattgagtctccgcatgtgactctgctacagtacttgctcatcatttatagtatttcttaaagtttctttgaacatatgttaattatatgtctaaacatgttaaagagaatatcagtgatcacaatccgaccactttcatctgatatcttgatcaaaaaacaaatggaactctctccccatttttccaacaagacacgtaatagttccatatcgaaatcatcaaatttcttcttcagaaacacaatcttgctcttcaattccgtagttttatcaccaattatccgcccaaagccctagtctttgactcatcttccgcagtatccgatctaggttttacggaatcagaaacaggggcttcaaccagggttttgggaaaatcagcgtcttggatcttcattttcttcaacgtaacggagaaatgttagacatattgtttgggaaaccacaccaattttctctttttgggctttggacattctatatatcttagagtcttttgggtctttaattgttgggatccatctttatgcattaaaatcatttttctaaatttaggaaagtaaagtgttagattacgataataaaattttgcagattttatttttaaaatttagatctataacttgtaataaatttgttaaactaatatttgttatatgtagtgaattagtattagattgtttaccaaaagatgtatttatttttctgtaaaaaaaactcttatcaaaattttaatatttcttgaaaatatccaattatattaaattataatttagtatttctttgataattaatttctatgatatataagatacaatgttgtggacttttatagaagaaaatatgcttatttgagtaacatatttaacttttggacctattttacttctagatatttatgaattgtgagtatatataaagacatggaacttcacaagagttgcaatactgtatatatgagaaaaaaaacaagttaaagagtgcttttgatccaaaatgttaaacatgagcaaaaatgaaggttcattaacctcagtatcatatttcatcaccacaacgtatgatatggtcgatgatctttcattagattcaataatttcttggagccagagcggcaagagtttcatcatttggaatccagaagaattttacaacaatcttcttcaaagattctgcttccaacgcataaatacctttttctctttccttttttcacatgtaagttacttatatatgattactttagtaagatgtcatcatagatagttttgtattctctcaactttgaatcttccttttcgttagggtttcagaaaaatcgactctggaaaatgggaattcgcgaatgataattttgtgcgaggtcaacgtcacctcataaataacattataagtgatgtaatagagcaggaggttcaatatgatcaaggaatggaattgtttaaagcagaaaaattatttgcacgactagtgaaaaaagtacaggatcaattgccacctcataacagttatccaacctcaaaacttcctttccccaccaaaatctatgagatggtggacgatccttcatcggatgctattatctcatggagccaaagtggcaagagtttcatcatttggaatccacaagaattttgcaaagatcatcttcgtagactcttcaataccctccatatacattttttcttctataaacttaaaatatttgtaagtttcttatatgttagttttgtaagatgtaatcatattcttttagctagtttttgttttgcttattaactttgaatcttcttttttctatagggtttcaaaaaaattaatccaaagaaatgggaatttgcaaatgataattttgtccggggtcaacgtcaccttgtggaaatcattataagcaatgataaaaagaagaatgatcaactacgtaaacaggatgccagagagaaaaaaatggcggaggcaggagaattgtttaagttgcaaattgaggaaatgtcggatatgagaaagaaaatgaagaaggccaaggaagtaaaggaacaagaggttcgactctgcaaattatgagtttgttggaggtcaatcttattttatgaataatatccataagaagctctagcttgtcattaccattaaagtttgtatttattagttttctttgagattatgtttaatgtttttgtttgtgcaacagttgcttctttggctttctgctttctgtaaaatcccttaaaaaggatgtaataattattctttgatttggcatagtactcgttataagtctcttgtaacttttctttttttttctttgtttgtttccgacgtgttcttcataaattattgaatggtatactgataaaagtctacaacatcatataggactttggaaattatgattttgttgaaggtcaatctcattttatgaatactatccataagctctagcttatcattaccattgaagtctgctacaatgaactgtgaaagatcatacaagtgataaataaacagctgaaccatacctaagtactgtaatcgaaaacaataaaactgagaaaccctattttacaagtaactaaaacagactagaaatttaatctttgacatatcaacttctctctgaagaagtcagatgtccaagctgttctgtaattgcattaacatttctcgaattccaccaacatttctcagtacgtactccggctttatctttatcgtctttcctctctaattgaacttcccgttgctcggttgagccaggattctctgagaaaaactgctgccagaagccatcattcgctcctgctactggaggaggaggaggagcagcaacagtgttctgttctttcgaaccatcgggctcacagttcatatcgatgatccttggagaaggaggagatttgagacgtgaatcgacacttaactgtatgcaagaaagaggagggctctctggaaaagtagatgattcatccacatcaagtgtcatcatacttcttgattgtaacatactctcacaagaatccgatacaagattctcccaaatcgctatcgatgactctaactgttccacttgatgctctcttgtgtgtgaagaagggcttgtagaaccttcctctctcacaacaacacaagttttgttctcttccaacatcggttcatcgggaaagaactcgatcctagggaaccttcttttcctctcgtttgtttcgggaacacacggcgataggttcaaagcaagccctggcttttccaatacttgagaaacaaacgaaaccattgttttctgacgcttctccatgtgttgtaatcgttctttaagttctttcacttgcatctcaaacacttctcgttcctcgtcttgtttatgtaactcttcaagcaatccttctttctcttttgtcaatctctcaatctgattattcattctcactcgttctgaatccgtcaacgggtttaactgagcttgaagattcggtaaagagtggctatgaactggtttgcgtctatgaatgttcttcataagatgaggttgacctctcacaaaatcatcattcgcaaattcccattgctcaggatcagcttttctaaaaccctacacacaaaaacaaattccactaagaagatgattgatttagtcaatacttttaaacaaagcatgaaaacacttacatatgtgttaagctggcggataaagctagagaagttattgtgcttgaagaatctcggaagaagatctctagaaaactccggcggattccaaacgatgaaactcttattgctctgactccaagagacgatagaatcggatgaagaatcatcaaccatctcatatgttttggtgaggaaaggtggaagtgagcttgatgaaactccatgattattctcatccatctctgaaaacacttttaacaactctcacactccttgattcaatctactcacaacaaagcttacaatcacactcacaaaaacagagccaaaaacagagcaagagactcttttgatcaaactatgaaagtttcaataaccaaaaaagataaaaactttcaattcaataacttcagtacacagaaactacagttaaggaggactcaaagaacttactatcagtaagtttcgatcaaaatcagaagcccaaaattccctccaaaaaaagcttcgaacttgaacaaagtgaaagactaaaaactcaccactgtttctaaataaaagacaatcaagcaaaagcttctaagaacccctaaaacccttgtaaaattcaacgaatctagaacccttttagcattaaaatcaaaaagaagaaacccttattagcttctcgaaccctctctgcttctcgaacctaaacagcttctggacttgggtatatatattttaatcagacaagagaatttcaagcagcaataatttgtctgcttctgtatctctatctataccattattgctgcggaaatatcagagagagagagagagactctttgaggagagaagaccgtagaaaagtaaacgagtcgattgacccggtggggatttacgacgacgacgattcgtcaaacctttcgtcgattttttatataactgattagcgattaaaaacgcgtaaacgataacaaaaaacgaacagtttctgagggatttgtgattatacgatttagcttttgattacaaaaaggttgatgaagcaagtacgaatcagaacagaacagctgtttcatagttttacaaagattgggtttggtggaatgttttattattttattattatcaaaatcaccccatgagataatgatagagctgtttttggcataaagtttatttctttcaattatataaaaatgtgaatagtcaatgaatataagcatagagatcttgtttgtttgttaatgtagaagcatttatggccgtaagaaaattcgttgttgatctctttttggggtttataaactaaagaaaagtctttgatttttatttggaggacacgaaatcgaaaagtcttgttttgaaggatattcaattgtgtttggcatttggtaaatatcatgcctcctttagttttttcttttggggtttttttttctgtcgaacatctgaatgttttttttaaataattttgatgtgcatacgtaaacaaagattgaattaaggcagtatcgttagtgcaagaaaaagtcggatcaaacctgaaatattaaagtgcttagcttattaatatatgttagtgtaagatcactacttagcttattcaaatgctattgaaacgggatttctaaattcatgtccaacattaattcactactgtttgaggtaaaagaacattgtggtattaatccggttcgatcgttgcacaatattgatatttctttaaagaaaaatgcacacgtatgtgcttagttcactgtccccgtcaacgctatattacaatattccaataccaaaaatcaatttaaaatgttttaaattaaaattaattctgctatagtattcacatccagtaagactaagacacagtaaaaaaaaaaggatcaataacctaattacattatagaaatcatagataaccaaaaattgtagataacctacatgtaatcgcaaatacgtataaaaatgttaaaatttgtaacatataatgtggtttattattggttgtgaataacttctacatggaatttaaaaattactttgataaagatgaaatatattgtttcaactaatttgggtcccaactattgtggtcggagtaggacgaattgagtccttcgttaacttgtagtgttattgaagtcatataaacacaaaattagacatattacacaacgtgtgttagttgatatatatacttaagtacaccatatatagagagaataaggcaagtgtggaatgttgatagtactacacaaatatatagagataaaggcaagtgtggaatgtggatagtactactacaaaatatttattagtgtcggataataaaaggcatgtgtagacaaacacacaaattgtgttgtacgttataagaaacttggaatcaaagatgtgttctatttagcagtggtacgaatatttttattggttgggtaacagatggtataaatgtcaaagaatagcatacttattctaattgttgtcacacacacaaaaaaagcatacttattctaattactatacttaggccatctccaacgtaacggtaaaactgtattttgatgtgatgcaatatactttttcactccaacccaactgtaaatattacactataatagtgtgattcctttattttgtacagtactccactatatttggcgtgctactgtagcaacggtaaaattaaatatatatttttttttactttaaaattattacatatgaatatagcttatttaggtatagcatattaaatatgatttgtattgtcatctaataatttaattgaattttgtaagtaaaaaaaaaaaatatcaaaactatttatgtatttttaattttgataatatgattatgaaatattaatcagtagaagatataaaaattataacaaaagatttattgaaattacataataaaattcaattaaccattgaaaatataaacttacaaaatttaaagctattttgatatatagattgtaatttgtattaatcaataaattaaaaatattaaatattaaaaataatatttggtttaataatataataatagaaaatattatttttagtgtgatatatagtgttgtggttggagattgaaaatattttagtgttgaatctacaccaaatatagtgttatttcagcaccaaaatagtgttatggttggagatgcctttaagactaaaaagtaattaatgaaaaagagcaaaggagtcacgagcaatgacaagttgatggcaagcagatcgagagcatcacgtgacccacccgatttaacggtcatgattggattttttgtgatcccacgaaaggtgacctgtcacattttgtagatgccgcaatctctgccacgtattttggactcgcagttattttagttaactacgtaattagtttagctaaatttatatattaagtgtagcatgattttattcatagtctctattggatgtggatagtccgtagttggaaaatgctgtcattgaataagcataaagttgtaaaatgataaaattagttattgtagaagctagattttattatacacaaaaatagtgtttgacacaaaagaaaagttattataaaagcagcttgatagtcttgacctttgaattctcaaaatgtaaacacaaactgtgtcgcatttcgattttcctgctttattaaaaaagcctgagcacgtgttaacacatatgggacatccttgtaaattacaacatactttaagggtaatttcgtcttttcacaatcagacttcttttttcttcaccctgttaagtgcttcttcatttattactccaccagaaaaaactcagaaccagaaaaaggaacaaaacaaaaataaagcgcgaaattagttttcaccggcgagattttttatcctctctacgagataacacttagaagaagaggcagttaaaacagagagacgacgtcgtgttatttttccaaattccggtgatctgagaatgacgtcggggactagaacgccgacttggaaagagagagagaacaacaaacggcgagagcggcgaagacgagcgattgcggctaagatcttcgcaggactaaggattcatggaaacttcaagctccctaaacactgcgacaacaatgaagtcctcaaagctttatgcaatgaagctggttggactgtagaagacgacggaactacttaccgcaaggtaaaccaaaaaaaaaatctcgatcctaaatttcttgaaaaatattatcgattttgtagatttttttaaggattattaaaactgtgaatagatctaaccgttcgattttgctgagagaaaaaaaatcgacggttgggatttagtttgactggtttagttagtcatagcaaacgtcagatcgaaaccgttccggtgaactgaaacaaaagcatgaatgtcttaagattcgctgatgctttcacacaaactctctgttcactttcagatgagaattatacgtagtgaccacattacccttactaatcacatggtcttacaataatatttagggtaatatcgtcatttagtgaggtattatagaaaatgtgtaagctttgagaatttttctttttgtgtttttctttggtcacacaaccttttgctttataattgaaactttaggacacgtctgtttcacgaaaactgccattggtaatgggtttagattcctttgtacaacgatcgaggtaaaccttttttttttcttgctcacatgttttttttctttacttttcagactgacactttctctgaaattcgaattttgctttttgttgaatcataacttttcttcatttgcttacgttcacacttacattaacataagataactaacctgtcaaaaagactcaaattttagcttatgttgctgtggatttagtatttaccagaaaaagctatattgtgtcaagaaaataaaaaagggacttgggattcttggctcgtgtgattcagtagtttccatgagtgtttatttttgttttgttatatacttaaattagtactatgttaactgtcttaattcttgtttagctggtcaatggtgagactgaagaaatgatttccccttttgccaacatctaatgatgatgtttggattttgcttgtgtggggataaataaaatggaattattcattgtttgaccattagatgccaaagaaaatcattgttcttttacttttttctttccttagttgcatctggattttcaatttttcaatcattgtgtcatcttgttcgttgctcaccagcttttgcatttcgtaaaatggaaaaagaaaaaaaaaacacatttttatgtaaataatctatgaggtattctcgatccatttagcaaagattagttctttgagcactatataccaaataaaatcattgttttttctcacttttttgcttaggtgcattttggttttcaactatcaatcatagtgctatcttgttcatgctctacagctcttacatttcgttaaaaagaaagaaaaaaaaacattttatgctctttttgttgttgttgataatctattagaaaagattgttcttttgagatcttctgatccatccattagcaaatgttgttctttgaccattataaaacgaaacagaatcattgttctttacttttttttttcctttgtgcatttggattttctattatcaatcataatgtctttttgtttgttgctcaccagcttttgcattatgtaattaatccactagcaaaagattgagagagtctcagctccaaatggattgtgttggttacattttgtgatatttcttacacaatttgcaataaactattgtgtagggatgcaaaccaatggatcgaatggacctcatgaatggttctacttcagctagtccatgctcatcgtatcaacatagccctcgtgcttcctacaatccaagcccttcgtcttcatcattcccgagtcctacaaacccatttggtgatgctaactcactaatcccatggctcaagaacctctcttcaaactcaccttccaagcttcccttcttccatggaaattcaataagcgctcccgtgactccgccattggctcgaagccctactcgtgatcaagtaaccatccctgactctggatggctctcaggaatgcaaactccgcagagcggaccgtcttctcctactttcagtttagtttcaagaaacccgtttttcgacaaagaggcttttaaaatgggagattgtaattcaccaatgtggactcctggacaaagtggaaactgctctccagctattcctgctggtgttgatcagaactctgatgtgccaatggctgatggaatgacggctgagtttgcgtttggttgtaacgcaatggctgcgaatggaatggtgaagccttgggaaggagaaaggatacatggagaatgtgtttcagatgatttagaacttacacttggaaactcaagaaccagatgatcatttcagagaagaatcaaagtcgtttgctatcattaagtcttcttttttgtctgtcttttttttccagtgtgatgtttaaaggtgactcagaggaaaaaaaggagaatagaaagagaaacaaaaaaagaacattttgagctctgttttcttttttttttttctttttttttttgttggcttttgactaaagttgtagttagaatctattttatatcttgaagcttctttaaaaaaaaagttatttgtggaaattcgatttgagattagtgatgttagtataatgaattttatataaaatattgaagccagattggactttagtaaccattgtgaacgtgagaaaatatcagtatctatcgctgaaaattttatatttttctatacatttaaaagataacagaaaagtggattacgttgaaagaccaaagatatgtccaagaagtcatgcgtaacccaatagaaagtcaactaacaatgaggaccacatgtgattggtcttgttaattagcgtacgtaaaacgcgacactatgacaactcgtacgtaatttcgcgaataatatgaatagtaacttcaactggactattttacaagtcaacaaattacttagtggatccaatttaaatgtccaattgttcttatttggctaaaaatgaggcccatatatacataatttttttatatgatttattttttaatgaatttatttaagagtatgtaaacagaaccctcgctctctctcgctaatttggatagatacctccgagcaagggttaagtgtaagcctcgtttgtatttgtaacgtaagttgtcatcatcgtaaagagttaatcaggttaattattttctttagtaaggaatgtgttttacccgattcttctatcattatgttatctttgttgttgaacctctcgattctcgaccttggattttgaaaattggtataattattatttgaccctttttgtttgttatgcttttctttgtgtgtgtgtgtgtgtgtttatttggttattgtaatctttgggaattcttgttttgagtggttttggaagatgtgtcgtgttagatggggatttcgttagggtttctgtgagctaaaaaagggtgtatgtttctttccctaattgattttcgtttgtaaatttattttgcagaatgataactacattttcatggataccaaaaggggttgcaaaggccatgcgtgctgatgaacttccttctaaggaggaaatcgaaatgcacaaagacagttgtaaatatttcagtaatgatacagaagaagaagagaccgaggatgaagaagagaatggtgaagttgctcatgcgaaagccgtagcagaagagtttggaaaatcatccaaaagcaagaatgtttcttcttcaatggagcttgatgatgaggtagctgagggtttgaaagaactcgacatggataattacgatgaagaggatgatggtaagttaggttttaattctttgttctcctatagatgtgtagagaatctcaaaactcaatttatgctttcattgtgtacaactaaattagactttccattgttgtgtttggattcaggaattgaaatttttagctccgggcgtggggatctttactataagagtaacgagatggatccatatctcaagagaaatgatgtaagtccttatcactaaactttttttttatatacagagttaccggattttctatatagacacaataacatctatgtttttctaggatcatgatgatgactcggatgatgatccaccaatcttaccaaccgatttagtgattgtctgcgctatgactgacgacaaagaagctaaccgtcttgacgtttgtcaattatttcaacattttatttatttattttactgcacatatatagatccgacattgaaacttatatgaatgcatgattaggtttatgtatccgaggacacatcccatggttctccaaatatgtataatcatcattacagaattataccagcaattccattgtgtactgcttggcttgattgtccacttaaaggaggagaaagaggttagtgaaaatgtgtcactaaaagtcttatgaattaaaccaactaggctctttcattcttgctataaaaatgttactgaatatctttgagtttcttattggtagggaatttcctagctgttggttcggatgggacgccaacaatagagatatgggatcttgatgctgtatgtaaaactaaactgtctttttgcattttgtttctttcataatcatgaaatactatattttaatttaaaattgatgatataatgcttcagtggttcgacatgctaccttgtgtacaactaggaggacaaaacaaggaaggggtgagtatttcatttggtttaactgcaacagaaaaatgtactaaatgtaatcattcttttgatttctcgtcttgtcttagaactataaacaaggtagccacactagatcagttcttggtcttgcttggaataaggagtttcggtatgtccatgactgaatctatttcttccgcgacttgctcttctctatagacgtacgtgtctgagtttatgtttcttttttttccggacaaaaaaggaatatacttgctagtgctagtgccgacaaaaaagttaaggtatgggatgtggctactggaacgtgtaagattactatggagcatcacacaaaggaggtaagaacaagattcgtagaactagaaatttcttagattataggattctcatggatttttgtttgtatgatccacaggttcaagcggttgcttggaaccattatgctccagaagtgcttctcagtgggtcctttgatcaaactgttgtattggtaaatgttttgttccatggtttatttcatgtattccagtcttttgttttacacaaggatcattaatataggtttgtatattgttgtagaaagacggaagacaaccttcacactcgggtttcaaatggtctgtcatgtccgatgttgaaagcttagcctgggatcctcatagtgaacactcctttgtggtacgttacactttaagtctttaattaatatatacaatgtgttttttttggcggtttaaagaattttttttcttcggtttcttatcccttgtggccttgcttatatataggtaagtctcgaagatggaactgtcaagggctttgatgtacgtcaagcctccatttcagcctctgaatcaaatccaagcttcactattaatggacatgacgaagcagctacttccgtctcatacaacatttcggcacctaatgtaagcgtctctttctcattatttgtttcgtttcgattcaaaaatatgaataattaactcataaattctaaactttgaaaacatatttcttattcccctttgtctactctctcttgtgtcattgttctttgttatgtatgttttactagttctcaccattttggagctgtaattgaacagcttttggcaacgggatctaaggatagaacggtaaagctttgggatctttcaaacaatgagccttcatgcattgctacacacaatccaaatgctgtaagaaccaataatcgaccatttaaaaaaaataaaattggtttcgttatcttaacttgattattaatttgttcatatatatgattccaacacttttgatatcacacagggaggcttattcttcattgctttctctccggacaatcctttcttactcgctatgggtggcgtaatgggggagttaaaactttgggatacactttcggacactaatgtctccagcagatacggaagcagagaagtccgaccgtgaaaagtccaagctaaactttgattggtcgtcacattcgaacacaacttaaccacaattttgtttagtttctttctttcattaatgttcgttttatttcttgtgtaatggctataattattatttctggctcaatgtttaatcagacccatacgaaatagcccattagtttatcagaagtagctcagaatattttagttaattaatggttattttacaaacatatgtggttaggatagaccaaattagtcatggcttattggtaaaccataagggtttaagatatgtaaatggtcactaaaatttagttttaaagtaaggtatcacttctgcaatttattaagaattttatctttaattaatatttttagtgaaatttttagtggaattgcctttgttcgagtgattgaccaaatgtttattaatacttctacatctaagtctacgattcgagttccaaaaaaaacgcagtctcttgcagatgaatgatgcaaatcttattggagatccatagtgcagtatgcatagtcgttcgtagtggtctgaatgttgtagggagagcttatccatcgtaaaaatatcgtatatgcagaatcgtccgctgaagatcagaatgttgtgaggagagagctgcatcttggaatcgttgttcgtggaaactgttcatcataaataaaatataaaattaacagtttcaactttcaaaaggttttctatgtacatttttgaagttaaaggtctttaattcaataactaaatagttttgggcttttaagaaattttcccttaagttgtttcttcctcttcttcgctcagcgccgctatactcactctcggcaaaaaaaaagttcctcagaagcaaacaaatcttcaattgttaaaccctaaacctacaaaagtcttgactttgtttgttgctcatcttcgttcttctctctcgattaaattcgttccgagaaagttaggtcccgtttctaaacgtaagttctcttttattacttttcaatgatcatagctttaacccagctttgaaattcttgtatgtggtttatcaaatgacgcaaaaaccctaatttcgagctgccctctacccaagaaccagcctttgagattttttaccgatttgatgattctctctctgttttgaatatttgcagaatgataactgcagtgtcatggataccaaaagggaatctaaaagctgttcctgatgttgctgagcctccgtcaaaggaagaacttaaagagctcattgagagtggtgcttttgcaagaaagtgagatttttaacttagtattgttcctgtttctctaaatttaggacttgtggagattgtgattgatattggttataatatatagcgtggaaggtagtaacgaggatgaagaagaagagattgaagaagatggagaagagataagtgaagttgatcatgccaaggctgtagctgaagctttgggtaaatcttctaaaagcaaggctgtttcttcttcaatggaggttgatgaggtttctcaaggattgaaagaacttgacatggataattatgatgaagaggatgatggtacgtttagttggccttttggtgtttgttctgcaattctacaagtgatcattttgattagcagagatagtttggtgtgttccttatgtaaacgttacctttttttttggttgtgtttggattcagaaattgaacttttcagttctggaatgggggatctttattatccaagtaatgagatggatccatatctgaaagatgttgatgtaagccatttcactgtttctatttcacaatgaaacatatcgtgtttaaattgttttgtatgaagatgatgtttggtctttttaggatgaagatgatgaagaggatattgatgacacgacagtcaagccgaccgattcggtgattatttgtgctaggaatgaagatgatgttagccatctagaggtatggtcagtccttctcgctgtgtaggttacatgttaaacattagggctcatatgaaagctatatatatatgaacaggtttatttatacgaggaatcgtctggctctccaaacatgtatgttcatcatcacataattataccagaattcccattgtgtactgcatggcttgattgtcctcttaaaggaggggaaaaaggttagtgtacgcttttattgttcatatgaggcaggttttttccttcttgctatggatgaaatcttattcttactctgtggtttgccttggtactgtcagggaattttgtagctattggttcaaaggatacaccgacaatcgagatatgggatcttgacgttgtatgtaattataacagactatgtatttatctttgcctttatcgattatgagtctattgataaggttattataatgcttcagagggacgaggtgctaccttgtatacaactaggaggaatagaggagatgatagtgagtaagaaaaagaagagcaagaaacagaaaccggtgtgtgcatcaaactcgtctatctctagttcgtctatggcaagttcgtatgtatttatttatttaattttgaggtctgtcttttactttacagaaattcaaagaaggtagccatactgagtcagtacttggtcttgcttggaacaaggagtttcggtatgtctaagcttactagtgctcattaattttaagttttttttttctggtttgctctttaggcgtgtctgattttcttttgatttgtttggataaaaggaacatacttgctagtgctagtgccgacaaaaaagttaaggtctgggatgtggctactgggacgtgtaagattactatggagcatcacacaaaggaggtaaaaacgagagtcgtagaaggagaaaattctttattatatggcattctcattgtttattgtttgtatgatcacaggttcaagcggttgcttggaaccattatgctccagaagtgcttctcagtgggtcgtttgatcaaactgttgtcatggtaactgttttgttccatggttttactttcgtgtgttctggtcttttccctttacaatgattattaatagctgtatgtatattatgttgcagaaagacggaagacaaccttcacactcgggtttcaaatggtctgtcatgtctgatgtcgaaagcttagcctgggatcctcattgcgaacactcctttgtggtacatgacacttatctttttcttcagatagacaaatcagtggtttcaagacatttttcaataaatagtttgttgtttattttccctcttaaggtaagtcttgaagatggaaccgtgaagggttttgatatacgtgctgcacagtcaggttcagattctgatttaaacccaacttacactatccaagcacatgcccaagacagaggagtctcctccatctcatacaacatttctacacccaatgtatatatatctctcttccttctacgtccttatggcatttcatggttttattttttgtaatcagttctcaccatttatgagctgtaattaacagcttttggctacggggtctatggataaatcggtaaagctttgggatctttcaaacaatgaaccttcatgcattgctacacaccaaccaaatgctgtaagaaccaatcaacataaatctattttgttccccattagtatctacttctttgtccctaaccattctgattttgtcatcagggagctgtgttttccatttcctttgcggtggacaaccctttcttgcttgctattggtggctcaaagggagagctacatgtgagtggaaattagataataatcatgtagttaaaacatatcattttattaggtactttaaatcaatcttgtgtttatgcttgcaggtttgggatacactgttggatgctaatgtcgctcgcaaatatgggagcaatagatcttgaaaagacccgcaaggataacttgtctctttgaagctgtgatggttgttagattcgatcacactcatgccaaattttgcgctttcttttcttctttttctttaggcttgttttatctctcatatgattatggttatatcgtgtaagggtgtgtgagcttatatgttgaaatcctaaaactactgggagagcctttttcaacttatcatgaatctatagctgttgtgctttaaataaacatttatcaaattgtattcatcttttaactccgcaaagtgatataaaattcttcttacgaaatttctttaaatatctatgaattacatttcgtaggaaaataatttgaatttgtcttataaatttacgtttcttagaaaatggtaagaaactttctacaaaatttctaatggttattttttcttaatgaatatcttctatttttctaccaattttcctacaaacatatatgttgcaggatatctgcagtgcttgaaaagatttgtcatttgtcaaaatgtattcaacttttttttggacaatgtattcaagcttaacatacccaaaaaaaaagtaatactagtataattttctactgttcctaggtgacggttatactaacgacttttatgacagtaggtaattaatttcaacacagaacacagcaatgtctagtaattaaagtcgttgtctgccacaaaacttatgaaatcttaacaactaattctttctatctttatgacttaaagagtcaaaagcctaaaatcatttcaaaatcccaatttagtaatatatattcgtatcatttaaagtcaagtcatttttggttaatcaaatacattactactaatatattacaataaacaatcaatacttttaaatcctcaaggaagaaaatgatctacgcaagcatgcacatatatatgttaattcggcagcatgtaaataaattgatttcatacttctttgatgaattacaaatcaaataagaatccatttttaaatcaatttaactaaacacacacactgattttcaaaagagtccattttttctaaatcatttgtaaagtcacatgggaaagggatctttgttgaacgtaatgtaaatagtgggaggttagagaatctgcatgcgcattaagagaaaatgtaaccacccaagtcacttcttgaaagtacaatttatagttattgtccatcattaccctcataattttaacggaaaaagtctattattgttaagttttcatgttatttaattgaaaacgttcaaattcgatggacgtattagtcaaagtctctgtttaaaagaaacttgtgcattatgtcaatagcaatatcattaattatctactcgaccaataacgttattggtctgagccaatcgtgatatggttaatcttacggaaaattttgtgacataattattatgaattcaacacgagatttttttattttctttctaactttcttagcttatgattccgttgaggtgacgacatgtcctgacttcagctttatgaatttatttctagaactatgcccatcaatatatatgcttttatttgtttatcaaacttattgatgtttatgggaagttttatttttaattagatcatatgctaaaataatattaattttcgggattttaaagacaaatgaataaaattgttttatcagaaaaagggttgtacagttgtgttaattcatagtgtaatgtccaatatatttataatagaacattgtagttaactgtttagcagtgatcaactgtatatcactatactaaagtaacatatttttttagctatgtagttctagaaaaataagtatgaacgcattgaatttgtattcaatcttgttctctattgttcacaaaccatataattgaatcgaatcaagattaaaaatacaaaatcctaaatgtatgttcttctcacattcaatacatattttcacttatttgatcgtatatatccaaattgtcgtatcaccattatacgtgtacaatggcacatgtggaattaacaataaaaataattgatatatgatattttttttttcggaaaaataattgatgtatatgtgacaatatgaaccagttttaccaccatattatatatatgaaaagggcaaaaagtatgtattctaacggattgatgcaaatgaaagtcgttatatgattcaaatattcaatgctaaattcagtatatactcaatctagtaaaaaatccaaattgtgatctgtaaagaagcttcttttggcatatatcttattctcataattagttacatgttaagatggataagataagaccgtaacaaatacaagcaaaatagttaacaaaaaaaaaaaaaaaaaaagacaaagacaaagcaaggtatttgaaaactcaaagcttaggtaaaatgtaaaaatttgataattatgctcgcatctagatcctaataatacacagagtaccttgaaactaaaataaagagcgtccatattttcggttggttgttgaaaacttaaagaggccttcatcaattccatcaagtgacatttttcaatttctgctcataaatgatactctattttgtcatcaagtctgttatatttttggtctatatgatgatatgacgatcacattaaccacatgacgtgtaaaaatcaaataactttccgtatcaacttaagaaaataatcttttacggataagaacatatttatccacactctatttagggaaatgcatacaaagcatttagggaatattttaacatatttcttaaacaaaaatatataattgcaagtattctaagaagtatatatatcaaaattaatgcttaacccattcaagaattcattcgttttattacaattgtatattacatattttcaaaaattcaatattttgtaccaaaatctggtgagaacataaaaacagagatatatgttttctcttgacaaaaaaaaaacagagagatattgtagttttcttaatagagccagcaatggtcaaatatatcatgtgaaatagtttctaaaatacatcatccttttcttcttaattaataaaatagtcaaataaaaaatcgtctccaatctttttctctctctggatttgccaataaattggggataaccagctaccaaactcattcacacaaagtcataacagtcgtttaaagtctgatccttttcatttttctttagtgtgtgaaaagagaaatacagttatggcggagatctcgggaaacggtggtgatgctagagacggagctgtggtggtcaatctcaaggaagaagacgaacaacaacaacaacaacaagctattcataaacccttgaagaaacaagactctctcctctctatctctgtccctttcttacaaaaggttttttacttttgtctttactcctgtaactctcaatctccaaaacctctttagttttgaagaagaaaaaatatgtcttacaaatctttagttttgctctgttttttaaattgtcaaattgctctgttttcagttgatggcggaggttttgggaacatacttcttgatattcgccggttgtgccgcggtggctgtaaacacacaacatgacaaagccgtgactcttccagggatcgccatcgtttggggacttaccgtcatggtccttgtttactctctcggtcacatctccggtgctcatttcaatccggccgtcacaatcgcattcgcttcttgcggccgtttccctcttaaacaggtctatactctatatccctatataaattataaactataaggattgatcaagtgttgcatttaagtatgatttttgagtttgataaaccaacattagacattattgtctttgtgtttgataggtttagtttaaccgtcgtttgattctttttgcacgaaactataggttataataaaagttataatgttttttaataattctttattggattttaaagaagttgcatcttttaagtttttcttgtgttgtatagtgtatactgtatacaacctttaaatcatttatatctttcactaatgactttattttttattagaattctttcagtaatgaatttgtacgatagacgtatttatgagcatatgcgagtcatgagtgattgagtgtagataatttcaaatgtatgcgtctacgactctacggtgatatatgagtatagccggaaaactagggggaatttgttttttgtttaactatttgttaaaaagttaaatgtatttttgttagtttccaaattgaaaattttaaaagtgtgtgtttaccatgtaacatttgtccgtatatataacttctccacacaaacaaagtcaaacaaaattgtgttatataaacgtcaaaatcttcacaatcttccaaaattgggtccctagttaatatgatatcgcatatcaaataattggtcactaaattttatttcttatatttttgtaggttccggcttatgtgatatcacaagtgatcggatcaacgctagcggcggcgactttacggctcttgttcggacttgatcaagatgtttgtagtgggaaacacgatgtgttcgtcggaacattaccatctggatcgaatttgcagtcgtttgtgatcgagtttatcattactttctacctaatgttcgttatttctggcgttgccaccgataatagagcggttagtattcgaaatcttcttatgttgcacgaaatgatataataatcaaatttgatggatatatgttagggattctaactattgtaagcaatgttcgttttaacttcagctaatgtgttatcctttttatactctagatcggagaacttgctggactagcagtaggatcaacagtgctacttaacgtgataattgccgggtaatatactattattaattactatcattttcttttttatatagttttctttatcgacagaaaatttgaaaatgatatatggttatgtttatctttatattaggccggtatcgggagcatcgatgaatccaggacgaagtttaggacctgcaatggtctacagttgctacagaggactttggatctacatagtttctccaattgttggtgcagtttcgggtgcgtgggtttataacatggttcgatatactgataagccattacgagaaataactaaaagcggttcttttttaaagacagtgcgaaacggtagctctcgttaagaaaaagaaaaacatgactatgttgtactagtcatcggaggttaagttgtatcactaaagaagtaactggaatattttgtattaaagtgtttttaaatttggattaccgcaaatggataaacatttatggtatgtgacgaatatgtaactgatctataacgagtttggccatatctaattacgtgctatatggttgtattaactgctatattatatctttctctttttatgcgaaagataatgtcgtcatatttatggtgctactgtatcgttacacctttgaaatcattaatgcaattttggatagaaagatccttagtttacgcaaaaattgtcaaaagttgcaatttagaactcgtcaaacaaagcacaaaagccggtgtcgcaaacattgccaagtgtgcaatactttgtccaagagcttaaaatccggccacgtgtcattttgtcgccattgttcgccacatcatcaatccgaatgacgtgtcacgcatggaatcattcacgtcatgctttcctcatgcaaacatcactcctctcttataagaccaaaagcaaaacactcgaaccaaactaaagaacaagaaaaaagggtgttgttacgatggcatcgagtgataaggttccggtggcgtgtccggcaagcagtggagatggaaaggagccaatgggaaatccgacgaaaaccactacggcgatgctagagaaaggaacggctatgatgcaatcgatgaaaccgatcaggcaaatgagcctccacgtgtgttcattcgcttgctatagccatgatcccggtcgtcagatcgaagttcatatttacggccaccgtgtaaaccaggatttcctccaatgtgctgtctacgattccaattcctctaaggctcatctcataggtaaatatacttcgacttcgatagtttgtttacatttttttgagttaagtttcattagctaccaattaaaaaacaatgcaatatatggattgatcacgtctcttatatactattccatgtcctctaatgtgtgttggatcctatgaggttgcgttgtgtttgtttattcgtttcacacattcacaattttatatgaaaataaaataaaactaaacttcatttttttcgtatgcactattaattttaggtttatataggcggtaaattaatggccatgcatattttttatgcgtataaatgttttctaagtttgagcattgaagctttttgctagagactaatgacttctgaattttgtttgttattgtattgaatctatagggatcgaatatatagtgtcggaaaagttattcgaaagtctctcaccggaggaacaaaagctttggcactcgcatgattacgaggttcatgattttcgatacattgtccgatatgtttattatttatctgaaaaacgaaaatgatcgaatgagagttgtttttagatccaaatggctcttctagtaactccaagggtccctgagctcgttgcgaaaccggagcttaaaaatcttgccaaatcttacgggaaattttggtgtacatggcagattgaccgaggtaataaactcatcttaatatgattttttttatatatttgatatgattatagatgatatgagtttagtaacttaggttttttgttgtcttgttataggggataaattaccactaggtgtaccatcactaatggtatcgccacaagacgtgaatctcgggagaatcaaaccggagttggtgaaaaagagagatgaagaacatggaatctcgactgaatcgttgaagccgtcaagagatgggatctgtggaccagagaagaagaacctggttgctgattattgggttaggtttaggaaaggctttgcgcttgatgttgttgaaacagatatgaagagaacagctcccttcccctaacttttgtgtgtgctttttttctcagacattaattatataagttttcgtaagcttacactagatgggttgtgtacttattatgttatggagtatgataatgtcataaacatgagaattttttcgctctttgttactcattcactcactctaaataggttgtgtaccctttttttttctggtttaagcaaaagagaaagacatgcatctagaagcccaaaaactctttgtgacaactgacaatgtagccttttaccttttgcatatcagtttcctaaaaagccttttcttaatatagaggtccattgcactccaaaggtgtgcgttcatgagcccatgtagttgataacttcatcgtatgtttatgtttactacatacgtcgtcgtcaagatggaattcacatctgattaaattcatttcctttgaaaaaaagattccttccaacatggctacaatccaacaccttcacttagaaaatttactactgaccaaaaccaagagcattttggtcgtattttaatatccttagtcgttgtctatgaataattaatatgacttacagctcgttggtcgtattttcatatctttattcgttgtctattaataattactatgacttattaacgtattccctgattagtacaactaatataaaatgttaatcttcttctcataatattcttgaagcaaattagcactgaccgatcgatccatggaagaggtgaagaaggatgtatactcggtttgggcattaccagatgaggaatcggagccccgattcaaaaagctaatggaagctttgagatccgaattcactggcccaagattcgttcctcacgtcaccgtcgccgtatctgcttatctgacggcagacgaagccaagaagatgttcgaatcagcttgcgacggtcttaaagcttacaccgccaccgttgatcgcgtctccaccggaactttcttctttcaatgcgttttcttgcttctccaaaccacccctgaggtataaaagtcaggacttttcatttcaagattcgatctttctaatagaattgtatagaagacatacttaagataaagtttagtcctgactaatattcttgattacatattgaaatcttgggtttgtgtctgccgtctggataaagatatgtggcttgggtaatgaatttagaatctaatgttattatctgtaatgttggcactgtttattacaggtaatggaagctggtgaacactgtaagaaccatttcaattgttccactaccacacgtaagctcctttttgactttttaactggtttctataaatcaaagctttagttagtgtcttaagtttgacaagtctgagcttaagttacttaacaaggtctcttaggggagtgttgtacactagcctgccaagtatacttttttttgcttaaatcaaacaacattttgagattatatcggcttggttaagtacaaaaattgctaacgaaatcgatatctatagggtgtggtgtttgttgcttttgggaagccttgatggtaatcttgaggataatctctcattttagattcatgattcatataatattctctgtctacacataattgcagcttacatgccgcatttgagcctgctttacgctgagttgacagaggaagagaagaagaatgcgcaggagaaagcttacacgctcgatagcagcctcgatggactcagtttccggttaaaccgacttgctctatgcaaaaccgataccgaggacaagactctagagacatgggagacagtggctgtatgcaatctcaatccttaagaaagtcaaaactttggttctgaatctgtaacaaaagatcataatgaacttgcttttgaataatgtatcgttttctctaaaactgaataataatgttacaatacaactccgatacatattacaccaaacttgctaacaacttcacatgacgatttgcatatttaactacaagaaacaacaattcacaagctttttgtaagacttgcgtccttttaaagagttataccaagaaaaatgaaaaaagtcttttactagtgtttcataatctgcgtcaatgtccataagacattttgttaacttcaatccaaaaggcaatttaggtggagcagttacggctatgaatatgtttcttttgatcaacaaggccatgattctttataaattattattttaactcacactacattatatgaatagtgtgaccctatcgccgtctcttaaacaagatttattatttgataggatgtgtgcaagttaaaaaccacaattagatagtgtataacctgatcttcgacttggtttatgttaggtattatcggtttttgatgttattgcgtctctagaaaatgaaatcatttgtagtttaatttggttccaacaattagataaacaataaaaaaataataattaatactatatttatgaatatggttccatcttttaaaaaaacatctaatatggttgtatctaatatttaatatgtataagtcaactataaaatttcagtagattttggtttgtttaatttggctttttcaataataatctttttattcacccttaatcgtggcaacgattacttatatagtcacatcaacattgagacgagtcttgcgagaagggacaatgacggaagaaaacgcaacgccactgcaaccgccacaaacgcaggaggatgatgaagaggaaaaggcaatgtatgctatctgggcagtaccggaggatgacgtggaggatcggcttcagaggttaatggaagggctcaggtcagagtttggcggtccagcatttgatcctcacttaaccctcgttggacctttcccttacaaacttacggccagcgaggctaaacggatgttcaagtcggcgtgtgaaggttttaaggtgtatcctgctaccgttgaccaagtctccgccggaacttcttactttcagtgtctctacgtatctctccggcacaccgtagaggtatattttacatgcataaactgaaacaaatctttaaccgaaattgaaacttataagctaccggacattgtttttgcgtttgtcttatgtttacaggtaatgaatgctgccggacatttcatggcccacttcaaacccttcaccggaaaatgtatgatctaatctcgattaatcggattttaatatttggttgggaagtaattaaaacgttattattgtgaaaaacactaaaaatcatattattaccaagaaacgtgtttttttgtttctttctctttctgtgtacgtgtatttgaaacgttggattgttgcagtttacgtgccacacatgagcatactctacggcgatttaacggagagggagaagaagaaagcgttagagaaagcttacacgcttgattcgagtctcgacggattgaattttaagataaatcgagttgcattatggataaccgatgcagacgttggatcgtgggtgaaagttgacgaacatactctaatttcttaaatgaaataaagtaaataaatattatggttttgggcctagtctccaatcttcctcttgtgctttgtgtgttgtgtgcaatttgtctccccttattcggttttcatctgctgcattggtttagtaaggtatgatgttccatggttcggctcaaatttgttatcggtttggtctaaatgtatctttgcctctggcttaattctatgttaatatgaacatagtttatggatcttgtgggaatattcctccttctgtttcttgttaagtgttttggtttatatcttgaagaagaatgacctagtcaaggatttgaatcattggactcttatcaaactgataatatcataataagatgattcaagatataatatttaaaagcacacaatcatgaatcaatttggagtctagttgacatttgttactaaattactaacaaaaggttcaaaaagtttgaattgacattaaagataagaatcattgataagggtgcaggaggaggaaaaagctataagtaaacaacttgtcattcgtcgaaactaaaatatgatagctatgtgcatatgttttaacatagatttaaaatttaatgtaaagttttttcatcataatttagtacgagtataggacaaaacttggtaagattttgctcgaatttcgtaaaatataatactttcttgaaactttttatttaagtaacgttgacattcatgtgacgtgtatgtatccaattttggttaataagatgctatgaaatctaattattatactttcattcaaccactattcgtatctaattaattagaatattcttttaattttagtaaaccaaatgagctatagaaaaacatctctataagagtagctaggaaccaatttggaatgtatagttgacatttgttactaaatcacttagagaaactccataaagttggattgaaatcaaaggagaagtaatattaaaatgttttcagcaggaacatatgagctataattagacaacttgtcatttaagacaacaaattgattatcatcatgtcttaagatacgaatgtcaaaatcttgaccttgcatgttagttgttatacataactggttgaaaagatagttaagtctaaaggttgacaaatgatgaaataaaaattagaaaaaatgttaaagccatacaaatccacatgttgtgaagttgaataagtaagttaaacgagttttggttctaaactgaaatttgacccccaaaaaaaagatgaggatgcagatgtcaatctttacctattcaatgtacaccacaataaattgaatcacattcttagcatgaaaccttatccaatttgtttgtatattttttccttggccaactaaagtggctattatcaagaaacaactaaagtaccctgtaaattgataaagaaaacaagtggaaaatatgtaaatatatcattttagaattcaaaccaaaatagaactcatgtaatcttataattcttatcccctttttaaaaagtctttaattttagacatgactttaaaaattcacgagccaggttggttacaaacttacaaaaactcgtcggcgcatgtaaaacgcagtcgtttaaccgaatcgaatccaaacacgtgcgggttcatccacaccgttaagtttcatctgacgctgtttacatcaacggctaagatttgttattctctcttttcgtcaacgcattgttaccgtggcgccagatatgacgtctatatacgcgcataaaatcacgtgacaaacacgcgctcaacaaaagctggttcttctccttttcctctccgatgactttcttaccgaccagcttagtcttctccattacggcatcattcacctataaatttcgccgctgggtttaattctctattcattcagaaccaaaaaagaagaaacctttttgattctctttgcgatttctttgttcaatctcttctcagattgtgtgaatcgggtttaaatcggggttttagggtctctgttttcaaaagggtaccaaaaagtttggagctttactgtagaaagatttgatttttcgttgacccactccgagattttcggatacaaatcagggttttagggtttttgttggaatggaagaggattatcaacagccgaggtttacgattggtaggcaatcatcaatggcgccggagaagattccggagccgtcggttcactcagaagaagaggtgtttgaggatggagaagagatcgatggtggtgtgagactaatgtatttggctaatgaaggtgacattgaagggattaaggagcttattgattcagggattgatgctaattacagagacattgatgatcggactgctttacacgtggcggcttgtcaaggattgaaagatgttgttgagcttcttcttgatcggaaagctgaggttgatcctaaagatcgttggggaagcactgtaagaagaaactaaaccaattgctttttttttttttggtgattgtctctctggttatgttgagtaatgatgatgtttgttagtgatctaatacgttttagaaaacagccatttgcagatgcgatattttacaagaacattgatgttatcaagattcttgagatacatggagctaaacatccggtaagaatctggctagtaatgttggttttggtgtttgattggaagcttatttgtttttctcatgattgttgacacatttgtatgttttcagatggctccaatgcacgttaagactgctcgtgaagtccctgagtatgaaataaatcctagtgagcttgatttcactcaaagcaaagagataacaaaggtaaaaaacatgtttcatctgtaatggatcttgtatctataagtttgagtcttttttgtcttaacagtgtgaagattcttgtttcagggaacttactgtatggcaatgtggcgtggtattcaagttgcggtgaaaaagctggatgatgaagttttgagcgatgacgatcaagtgtaagtaaatatcctgtagacggttctaacttctaaggttttggattccaattccttaccataatctttttgtatgtgcgtgtaggaggaagttccatgatgagcttgcattgctccaaaggcttaggcatccaaacattgtgcagtttcttggtgctgtaacccaaagtaacccaatgatgattgtgactgaatatttgcccagggtactgactttctctgataaatttgaaattatttttgcatttagtttcacgaaaccaagatctcatttgatatattcttcagggggatttgcgtgaattgctcaaacgaaaaggacaattgaaaccagctactgctgttagatatgcccttgatattgctaggtatgcaagttgaagctatatatgtctcttcttcgttgtttatatatgttctataagattctcttgtaaatcttacccgttcgaattatcctaggggaatgagctatcttcatgagatcaaaggagaccctataatccaccgcgatcttgaaccttcgtgagtcacactgtccatatcagtggtttctgtctcttatatgtgcagttactgacagcaaactctttctgttttcgttctgacattggtaaaactatatttgcagaaacattctgcgggatgattcagggcatctgaaagttgcagactttggagtaagcaagcttgttactgttaaagaagacaagccttttacatgtcaagacatttcttgtaagtactttttcgcacccaactagttactgtaaattttgaatgctttaattcttgatctgcttggttaaagagtcttcattactggatgtgttataataaaaatttatcggtgttatccacattataggtcgatatatagctcccgaggttttcactagtgaagaatacgatacaaaagctgatgttttctcatttgcattgatcgttcaggaggtaagtaaaaactaaaaacttgtgactttctcaagtattttttttcatgtcattgattccaatgtcggattctctagatgatcgaaggccgaatgccgtttgctgaaaaggaagacagtgaagcttctgaagcttatgctggcaaacatcggccattattcaaagctccatcaaagaattacccacatggtcttaaaacgtgagtctttcttctctctttcaccaagaaactaaatacttatgaacagttttgcatcattgattggtttggttcatgtcattaatccgatttttgaatcccataggttgatagaagaatgctggcatgagaaacctgcaaagcgaccaactttcagagagatcattaaacgacttgagtccattcttcaccacatgggtcacaagcgacaatggagggtctgtttctctatatctctatcaaacacacattgagttttgtttgtttgtctctctgatgtgtttctacttctacatgttgtctttttcttttctcagatgaggccattgacatgctttcagaatttcgagcacaagaagaaacataattgggatttgagcagccatgacggctcatcatccggttcacatttgtgattctttaaacggttaaagaaaccattcttttgtatccattccttccggtttagtttgggtttccccaaagcaaccgaatttgactttgtatatttgttgtacactgaagaactcaagaaagtcttcgtgtatacaaaaactgcattttttttattctagtatacaaaattgttgtaagatctatgattttaaccgcaatatatatttgctgttgtaatctaaaaaattggtttaagaatatttatgatttttcctcaatcttttatgatccctaacttcgaaaggtcaaacagatttaatgtttgcttcttttattctttttaaaagcttctttctttaccgaccatagtagcctcaaataatttgagttatagtagttgcaagcatattctgcattttggttataattgcactttcaaaatctgaaagttggatatgtttttgcaatgtttctttaactggagcatttgacacttcaacttgcttcaaaatcactccggtactcatttttcttaccatcttttgtttgtattcaaatatcaaatgtttttttttgttgctaaaataattgaataatgcatcgacctaaacgaatagataaagaatcactagactaacacacacctgtggttcttgtcattggatctcatgtgagtgttactatacttttctatcaaaggcttaccctaaattgtgaatcctgtaaaaccacatgaaattttatgtctatcacaaaagaatacatacaccaagattcaagaatatgaaaacacacatataatatagacatttttaagagggtcccaaaaacaggctcttgatctggaaactgtattaatttgtatccaattataacctcatgggccacttttccctggctatgcacattatcataggttatacgattaagttcgtgatggaaaatatgatttattaaagttttcttcccgagtttgcaacgattttcctttcttcaaaatctaaaatttattcgattaacaaaaaaaacaattatcgacaagcaattcaaaggaaaaattgtgaaaaaacaaaagaataaggagagaatatgtcctccttctgtttttttttactaagagagaatatatctttaataggggatgcttcttgctcgaagccatcattgagaagaccttcatacttgcgggagtctatgatagatatctcaagagttaactttagatacttttatgcgatttcattttatttttaatgacttactataataattattattttttcatctaaataattcaattcacgaaatcatcttaattattatttatataaatacatggacaaatagaagtggaagaacaatgtttagaaaacaaatcgaaaaagatcgccgacctttattgatcgaggaagagaattctggtgggattttagagggaggtaagagcataggtgctagagagtgttcggagctcggaaaatgattaaaattggttttgattacacttaattagtttaatcttctagtaacacacaaatatgctaaaataaacacataatacattcatgcaaacacaaaacttggcttaatattggccaataatttgagtggcacaatcacaatcaagccaaaagcagcactgatttctctttttttttttctttctaattagtcttaattcggtccaaaaccaaacaaaaatatctttaaattatattggaacctgacgaaaacaaatcttaaattcccacaaaatgctatatatatagtatctaagtttgaatgccaattccatatttttacggaatttataaaagtacgcagaatctatttctagcagtttggaaaattttcaaaatatttgaaaattttcaaatggtttgtggtctgttgatctactaatcacgtcatactaattttgggatggaatgttacagaatatataatttcaaaacagagagagtattcttttgttttctgtgaactgattttattctaggtaatataatgtatccattttttttaatgacgaggaagaaaaattaaggaacaaaagaatatgcattaaatttgattaggtagtgtcatttaagtgatcccttctccaacacaaaatgtatgattcgacgtcaaattaatgttttaaatatttattgcttttattgatcatatataatttaatatttataatcattattacgtgggaacttatctagtacacattctatgtctttgtgaacttagtacacgagtaacggtttttctattaaattaaaaccttcaaaacaacatttgatgaaaatttcatagattttacaccaaaatttcgtaagaaaaattgttggagttcgtattgttttcttgtagtagatgacattaaaaaaatacattaagatacactaaacaagaattatgcatattgttttttggtcaaaatcgagcctttaccaaattgatcgatacattttttctgatgatacgtttagactagttggataaaatattaatctgtcctcaaaaccaatttgcagtggatcaatccatatatcttctatattattaggatctttgtctaacttccgatgtgtgatattgttattcctaagataaaacaccattgaaaaacagtattttaaatcgggtaaataattcagcgagtcacatatttttgttttaataaaaactcaaatcaaaagtgatcaaaatatggtagaaagcaaccttcgattgtggtccatcatgtaagatacgagaagattttatggtttttaaaacccacttcgaccatgaaagcttgacccaaagcaattgagttgtttcttttataaatgacctaatcaatttccatacatacaagcatacatgtgacgtaaaggaaatctaattatgtactaatttgtaaattttactagtattcaattcagtaattcttactaaacttactttaactcttgctaattaaatatactactagagaaggtaaattacatgcagttaagctatactattttttctaattgcaagaaagaaagaaaaagtacaaaagaaaagaaagcacattgcaagtggatgtatatatagttatagggaaataaatatgaatatggactgtatatacatataggtttctcttatctctatcaaattaccttaaatgggttcataaagatggagatcaaagactacacatcacatgctactctccctcttcttttggcataaccttactccatttatacattgtgctcctcaattattcaacattttttaaaaataacttatttaacaaaatgttagaaaatatctacccaatttttttcttccacatacgagctacaaagatctttatcaaataaaacaagaaagattattaatccatattttgggttaaattttaatccatttagccaattaggagaactattttaacagttagatacttttcaacaaaatttattaagtagtcacctatgtatattcatatagtagtttcacaaacaatatggagagctgtgatcttgaagagggcgacaaaagtcaaaaagaaaatgtaaaaaaagagagagagattaaagtagttggagaagagagaaaagtctggttaccttctaattgagtcagaagcattacacttaaataactttccaaattaagccctacgtcttgtccagccccttaaaagtacgcttcatctccctatttcccctataaaccctaaaaccctatttatcttattaatttatcattttttttatatgtcaatatcacaacaagtaaacatcatcaacttcaaatctcactaacataaatagtatgctaattttcttcactatctgagtaattttctccttctttttacatcattcgattctatatttgccacaccattaaatagataagtatattggttcttactactaataatcagtttagccatatatctaattacacagttttcttttatatgttactttatatttgtacaccatcagttactatatacggaataaattacacctcatcatgtaattacaatattatcataaattttttgaaattctattctttaatattttcagtatccagaatccattttcttatatttattctggcaaaataatgtaaaatggtatcaaatatacaacaccatatatttgtttataaataacttccttaattagtgaaacaaattttcctgcagaatgtcacttaaatctttaaaacaattcacaaaagaaaagggaatagagctgaaattttttcctctttaaaaagatcaagatttagtaaaaactagaaacaaagaagaagatcgatatttgttgtaacaaaaaaatgtactgatcagatttacccaaagattttagtgcctcaaaaactttcacatgaaaagcaaagacaagtaatggtaagtagagtctgcatctcatgagtgattgcccaacttgaaccctcttttcatttagacctttgtgaaagaccacacaagaactacccaccaataactctctctttttttcttcatttccaaaaactatttattcatttctacaatttctcaatttgggggtgtccttaataagtattatatttatgaaaagtccggatgtatggtgggtgttatttatggtaattaacactatttattaataatatttttcatgtgatttcaaaagctgatgtactcatgctttgtgaacctttagattgctctatgtcaatcttttattttaacctatcatatgtctaaatgtactgaaaagaaacaccagtttaattaattatacttccctcatatataactatcaaccaagtacaaaacttttgtcaattctcaaaatcaactttcaccacataattatctaacatgtgtatgttccaaaaccagtttaaatagaattacttttcagaaaatacatgtatattaactctatctaataaagaagaaacacatacttatctcatagattccattcataaaactatgctttagtgagtaagaaaaccagtaatcaaacacaaattgacaagacactatatggatgtaaaaagtggggaaaaatggtgataaatagtagagaaaattaaaaagaaaaaaaatattcctttataaatgtatatacccatctcttcaccagcacaaccttaccttccattttctgcaacttctccaaatctcatactttccagaaaatcattttcccaagaaaaataaaactttcccctttgttcttctccccccaacaggtcaggctagtattttgttgttccccaatcctttcaaacattatcttcttcataatattactttgcttcacttcttttggtccttaaaccaaatttttgttcttctttagtttccttttttcccgttttgatttgattctttttatgttatttagagagaaacaagattcacaaattctctgatcttctttaactctttaaaacttttctttttcacactctagatttaaattatccctatggttacaaaacaattttgttcttagtttataacttgtgtattaccatcctttcttgattaactcttgttaggagaatatgaatgtaagatcaataaagttcttcaactttataattccttctataagatgtgtgtcggcaacagaattaaattaaatctttatagtttaactttaatctcaaccataattcaaaagaatagaaaacatgaagaatcttgagtcttttcaagaaaatcttgattggttttttgttggattcttgtaattctgtactaatcaaattttgccctaaacgtttttggctttggagcagcaatcacggcgtaccaatcggagctaggaggagattcctctcccttgaggaaatctgggagaggaaagatcgaaatcaaacggatcgagaacacaacgaatcgtcaagtcactttttgcaaacgtagaaatggtttgctcaagaaagcttacgagctctctgttctttgtgatgctgaagtcgcactcatcgtcttctctagccgtggtcgtctctatgagtactctaacaacaggtttcttcttcttctcgtgctctgttcttactttattaataattaaattatttttaaagtccgatttagggttttatgtttatgttaaagcataaatcttttacgagggttttcgatcttctaagctagatttgattctcttcttcttgaatgctcttatgggtaggattatttttcacttttttccttcatattccacacacatatatatataaacacactaacattagtgggaatatttgtttgatatgtttattttatttacttcgggggtttttgtaacaattttgtagatctaatttcttgttcttcatgtgtatattaattttcccttaagacttaaataaaaagagagaatttgttatatatagatatatgaagtgagggaaatggtacaaagttaaaggagatctgagtgagagttagataataaatgaaaagaaataagaaaccatcagggttttttctaatgtggagttttagattcagttttgtagaactaagattcactttgttgggtgttctttcttcactcatttctgttattataataataataaaatcttatatctttctattttccttactaacaagtacttgaagatttagatatatttatagatctggtgttgtaataggtaaaaacttgatttttatgactataaaagtaagttttgggaaacaaattggggagagagtaaggaaggactatgaggtcatatcttctgttttgtgatcatccatcctccattgttgttaatgtctgtgtctctctttttcttctcttctttctcttactttcctttcttatctctagctctctttctctctcatgaattatatcatatcatatatttgatacaaacacatgtgatggtaagtgagagtgaataaggtgaaactagctagatttttgagttttcatgaaattttaacttatatgagtgatagaaaataatggaacttatacgtacatgtaggacaatttagatggttatctaagtttttgtttttgttttctcttgagaatgttaaatgttagtgttatttttgtagttttggaaaattatatatgagctaagattagtttagaagtggtcaaaagaaacatagatttgaaatttcaactgaattttcaagatttcaaatagtcaatgaaacaaggaggtaattaagacaaattagcttatggggactcttttttgttattccttaaaattactctttttaaaattaaaaataactaatctcatttcgaactacattactcaaactagtaatctctaattcgacacgcaatttccaaatacttattagtagagagtcccacgtgattactttcttctccaccaaaacataaaacatgtcaagattaaatggtgtttgaaaattaaaagatcaattttcttaatcgtttacagttgtcaactctcatgtcctgaaatatataattctcatgtccaaaacaagaaaagctaacaacgacttcaaattaaatcagtcaatcaaaattagtcttcatttacctactaatttctttttatatatccgatgggtactctacgaaatcagagtttcgtttctttatttattttcttttataagatttttgaggttttttcagaggttggaattgagcgcaagattaggttttgggtctgtaagatttgttgtctttgttaaagaatctttgatcacgtcatcactcagatattatttctttttatttttcacttgtatttttactaatttattataaagttttgttagtttcagttcttgacttctgacaagaaggttttatgtcataatgaattaatttgtaacctatttataaattcaaaaatgtcatcatattactacttttgaccatttaatattagatttctcatttggtcaatacccaatgttcatattacatatatagagacaaaaattataaggatactaaattgttcatatttcttggaagtaaaaagattaatgatcactgaataaatagatttggcatagaagtatagcattggaattgcttcaacatctttggtgtagatagatttatgcaatttctctttctttttgaagtatcttttttttttctagagagagaataatgttagggatttttatcattttctctctcattatgggtactgagaggaaagtgagatttttagtacggatccaatagtttaagagtttggtctgccttctacgatccaaaaaaatctacggtcatgatctctccatcgagaaggttgagagttcagacatcaaagtctataatatgtcattgtaatacgtatttgtgtatatatatctatgtacaagtacatatacaggaaactcaagaaaaaagaataaatggtaaatttaattatattccaaataaggaaagtatggaacgttgtgatgttactcggacaagtcatttagttacatccatcacgtttaaatttaatccaatggttacaattttaatactatcaaatgtctattggatttatacccaatgtgttaatgggttgttgacacatgtcacatgtctgaaaccctagacatgttcagaccaatcatgtcactctaattttgccagcatggcagttggcagccaatcactagctcgataaatttaaggtttcagaggaattttaatttatttagggttcatattgtttcataaaatgattctttatttgttacaactttaaggaaatattttattaactatttaattgttcccttttcttatattacttttgttttttcttcacatcatgtgtcacattaagttgcatttcttctgactcaaaagaaccgatgtttgcttttaaggtttcgtattagaatcacttaactgtgcaagtggtcgatttgaccctatcaattttattttttattacttatcaaaatgcagatttaagcgtagattaagtttagaaaataggtagttaataggtctaattaacttattaattcctttaaaaaaattattgcagtgtaaaagggactattgagaggtacaagaaggcaatatcggacaattctaacaccggatcggtggcagaaattaatgcacaggtaagtggtaacttaatattacacgaatgattttaattaatatatgatgacatgacaacattgttcattcttttactctttttttttttgttgttgttgtagtattatcaacaagaatcagccaaattgcgtcaacaaataatcagcatacaaaactccaacaggttaattatctaactgacttgaaatatttgattacttggttgttattaactatttgatatattaacatatgttgataaatcaattaggcaattgatgggtgagacgatagggtcaatgtctcccaaagagctcaggaacttggaaggcagattagagagaagtattacccgaatccgatccaagaaggtaattctattttttttataaatgcttcaatataatatcaaattaaatctatatgccttgttgctaatttttgtttaattttacagaatgagctcttattttctgaaatcgactacatgcagaaaagagtaagaaataaatcttaacttaatttctattcttaatatgttcttataataattttgctcatttgcattgcaccgattaagcaggaagttgatttgcataacgataaccagattcttcgtgcaaaggtaaaagtacacattatatatcaatttctataattttccctattgtttcaataaatattatatgaaaacgattaaaatggtgaaagtacttgtagataaatagtttatgacatatatttgtgtaatgtagatagctgaaaatgagaggaacaatccgagtataagtctaatgccaggaggatctaactacgagcagcttatgccaccacctcaaacgcaatctcaaccgtttgattcacggaattatttccaagtcgcggcattgcaacctaacaatcaccattactcatccgcgggtcgccaagaccaaaccgctctccagttagtgtaaggacacaaaatcttgctccgatcaatcattctagtcttatattattaatcggtccattttgtaaaacttgacagcatggatttggtcttttatgctgttttgtaggtaatataggctgaaggaaatggccgggagtgaataaaaaccagaattgggttgagcaagcaatataaagctaatgcatgttatatatatatttatcccatgaatgttgtatcagtgaattttatgcttatgttgatgtgaaattaatatcttaaagacatgtcattaatgtgcttaatttgcttcaaaacatctatgtgtataagtgtactattagttcaattgttgtatttaattaccaattcctgctctattaatgattttattatagaaaagtctcaatatgataatgatatatattcatgtgctgagttccatcctcctcctccttctccccatgtggtacagttgcaaaatgtcgaaacattcgttcattttgtagctgcctaccaggaatacattcaccacccggtctcaatatctcgcgtcttgctcggtgaaaacacatacaagagtattaaccatattttctttaaatgcacatacaatagcttatctctgcctagcttcatttcgtaaaccaagagcaaacattatcggatggctccatacctgttctcaataaatcatggtcataatcaagctcattttcctagcctccggttactagattttgtatggaacgcaacatccatttccatccaggcccggtccaacaattttttttgcaagggacaagatatagttgttattgttcaagaacctgactcttatgcacaagcttcctcttatcagaattcgccatttaaaccaacttcagtttctttttatatccatttactagaaaagtgtttgaacaattaaaagattgatacatagtaataactaataagagaatcagagatccaaatgaatttagtcatctataagaaagcagaaatttcatgtcattatatagaaccatgatacataaactcaacaaaacaaacaattcttctgcagcaaaaagaaacaatcatcaaacacttaaataagaaaaagattaaatctgtctccctctctttttcactctgtgtttgcttggaggaaatttcatgaactagagccgagcaagctgctggatatcataaggatgagcatcagaagcagattctctctgaaaagatcgactaccgatgacaacattcgcagcttctcctggatgaaacgcgtcccagaacacatactcgtccctgttaagacatggagcttgacccggaagacaagttatctgtccattgttcctcccaactccacaacatcccgcgtttgtcaccctaaaccctaaaccattaacaagacgttgatgaaaccatcaacaaagttttcaggcaacatttgatagagtttgtttaagaggtgactcttaccatagcgagaaggattagctaccatgtcttggaagataccataagcattaatgtaagtgaacttggcccctggtgtgttttggttgaagtgatcaaccagagacacaagcttactgttgaagattctgttagcggaattgatcctttcgtcacaagtcaccccgtctctgctgttttgagccagctcatttggactgcatcctattgcacctataccaactagcgcaaacttcctcgctccgttgttatacattatctactccatacaaaaatacaaagattcttatcaaacacagagaaaacagagtatatatgaacagcggacagaggaaacagagtttaaagaaacagagaatattagcaaataaatgaacggacccggagttgctcggtgtagcggtttatgaggtcgttggcgtaggcatccggggagtactggctcccggtggagtaataaacaggcataaaatagttattgagatagtcgttactgcctaacccgattgagtagatgcatttacttaggtaattagcagcttcattctcgtctccgagtatgttcacaacttgtgacacagtgtttacatgattagctacttgccctgcaaatgttattctagctccctgaaccaaaaatggaaaaagatttatgtttcctagttttaaaaactgaagtctaaatgatatctcatgacatcaaaccaaaattgtgtattctgttttaaggactaaattaccaattgtcgaccagtttcttctcggattccggcagctgcagaagcgtagtttactcctcttaggatatcttctccccttgcttcggaatacggtgtaatgtagtcatcgaaaccaagaagctcagctaaaacagataaagttagttctttttcttgattacatgttttagaccaaagaacagaatgtaaacaaaagaagggtgttggttaaaagattactgatgacatcgacggtggtttttccgttggagaagcgaccggttggaccgtactggaagtcgataccgtaagggaagtaattagctcttgctagagaggtaagccgattgttgtttccactatcaaccaaagagtcaccgaatatgaagtaacatggtgctattggatcacccatagctatgttcatagccatagctatagccatagccatcatcattacacaaactctagccatctctacccttatccggaaagagagagaacgtgaagaagaagaagagagagattggtctgataacgtgaagaatgtaaatggatgtatataataaaggtcagaagaatatggagggaatgacaaaacaagttttgagctttagacagttgaagaagcattaaatgtcacgcggtgataatgtttatgtgtagatatgtaaagtaactgtataattatgtggagacataacgagtgggagagaattgataatactctgtttttttacagtgttgggaccaacttgtgtgtctaaacgactaaactgatcattctgttattatagtttaccagaaaaagttgtcttcagagggaaccatatgtttggacatttaaaggattagagatttgagatttgaaacaaggattgagatggagacaccgactaagttaccctttagcttatttagattaatttgctagtgtgccaagggatgagacagttgggtttgtgattgatggcaaattgtaaacaaatgatgaattgttagggccagttgcataatcttgatcatgtgtcctgtgtcctgggaagtaatcgaacagctcagattgattctggttgggttcaaattgacgatgaagaatgatgttgaggtatggatgcatgtattaatggaggtagatggcaaaaataacattaaatggcaagaggaaacactatgtcatgaagatgaacatcatgattgacataatgtggtagttggaagttcataaattctgtgtctttttgttcatgcatcttcttcttcttcagtgacacagtaagaaaataatcactttgggaataaattgtgaagcatttgtccacaaagattctacctttctgtactaagtagccacccaaaggatatataagacgattttaaaatagatttggtaagtaatgatgtagagtggaccagtagaaaaacttataaatgaatttgttgttataatgtgactttgaggtttggagtcagtgactcataaatttgaagcatgatcttgtggggttttgtgacagagcaaataagttaaagcagccatgctggattctttttcaaataaagaaacatttcaaaaaatagaacagaaaaaatgatcatatctactacactaccaaccacatgcaaggaattatgaacactataaagcatgagtgtcattgaacatttgacaattcgtttgttttctcgagaataaaagataactttataaatggagattcattttaccatcttcttgatgaattcacaaattagaaattacaatcaagggtaaaaaacttgggggtaacttctacatatacatgtgtgtggttgtgtgtgttcataagaatgaaatcaactatcttcagagaaatatcttttgactctaacccgctcaccattgaagtagatgtatttgtattcagagaggtaccttctaaggatcagttttcgattttcttcttggttgagttccctgaaggctcgtgccactctcctcgcagagtcttcgtctgggctcaccttcagctcttccatgtctgcaaagacctaaaagagaacaaccgaaagaaaatgtatcttagaaccacgtcatacttcttgcagagaggtgtagagtatcttgaggagtatcttaagtgtaagatcaagataaattctcgagggaagaaagaaccttgttttacctcgataaccttatcgtgaaggtcatggtgagcatacaacgctatcatcctagcgaacaagcgtcttgggatggatcgtgtatgtgtgtgcagaatcatgttccataaggactctgcctcatcagccctttcgtccatatcaaatgccaataagaggatatcgtatgttcccattgtagcaccttgccctttgcttaacatccacttagccaactgagtttgtcactaaaccaatcaactcaggacaccatatttagcaaaactttacacttgacataggaagccgtattacttacttgaatcacacgatgccactgacttctctttcttaagatttgcaacgccttagctgcagcaataatgggaaattcaacctcccaagctacccatttattcaaagctccataaacagcctctttttcatttgggagtccagagagctacatatcaacaaggactactttatcatcgtttcacttatgaaaacatatgttttaacagaacttttcctcacttaccattcgaacaagattaagtgctttctgtccagacccagcagagtcattcttcttccacaagtgatgctctttcttccccactttctttatttccttgctacaatatcaacattcaacacaaaaacttactggtgaatcaaacagaaaaaaacaatgtcaaatgattactcaagaaagatatgcaaccaaacataagttaatttacatatattatatatataacttgaaatgtaacaaacaacaaacctgttcacagtggcaacataacctctgtccaatttcccagcttccttctctgagaacttcaaaacaatatcaccattatgacatgttgtaattcatttcacaagctatatagccattaaacagaaagtaactacaaaaacattttttttttacctttgatctgatgcaaaagccaaaccttttcgtcttcaacgaggagtaacttccgcaacgtggagattgaagcaaagaaaagcatataaattcttgagatttctgcaatttgaagaattcacatctgaatacatatatacaatcttatctcaagactgaaatatttgatggagagaataaagtaactcactgataagccttgcaatgggaatatcccttgagttggattcaagttacagagcgccattactttcacttccagtaacacaacgaagaactgaatttgaattttatgaaatggtaaatttttgaaactggagttgttgaagataagggataaaggtgatacctttactcaaaacagagcagatttggaagtaatacgatgcagcaagaacaaaaacacattcagagtttcacagaatcaatcgagtaataattgctagagagagattgcacgatgatcgattgagtttgagagagaagaatcgagtttagggatttcttagtaaaccgaggaaaattggtttagccaattacagaaccgatcaataaccgaatgaatttagtgtcactgtcagtttgtaatgggttagtgcctagtggtggagtctagaacgtgaatatattaatgggcctttttagacaaatctagcccaacagagagaaacgagttattgaaagttctgccatacttgatttttgattgtcaagtactcaaatagcataacttttctttctttatgtatatgattgagttattagtacttgattatttagttaaaatttcatttactatctcaaacttttctaacttctcttaatcacgattattagcaaattggtttccatgtcggtaagtttatgaaaaaaggttgaatagataattagaaaaataattagcacgaccaagaaaaaacctcttaggcaacatcaacgtcgatgtaattaagaaggtcccatacaaattgatattgaactaatcaagaaaaggaaaaccttatctctatttccacctatcgtacccaatcaaatgtctgtcttaatatcatctaaactcattcggatataatccaagttgccttgagtccctgacaatcgctatgattcatgcatgttacgactaaagaaaaaaagctttaggaaaaggagagtataaacgtataatgccgttaacggctgttaagtcgcacattcgaattgtctaacaattcaaatgaaatacttttagactaaatctacttaaatgaaatatttttattccaacaaaaaacactttaagtactaaatagccaaataaaaagtggatgaatatttttttgggattttttccttgtgatatagataaagagatggtttcaaaattatgactaatttagcaaaaaaatataagagacatggaacccaacaaaatatcaagaaattattggagagtaaaaatatgcttgcgaaaaccatgtgtacatagaagttaattttctctggaaatgatcaaatggaccactaagagtaggaaccacacttgtccaaaggtacccaaaattttggctaagtcattgtctttagcacaaaactatgcatctatgattaccccaattcgtcctctgtctaattcattcgactctatctgtctacctctttgtccattttcattgtccctcttcaatttaattatatctagctagtaggatatgcacgaatttcagtttcaccgaattgttccaacactgaactatatcttatttaaggccgaactgtttcaacattgagctatattaattaaatgtatgagcgatgatgtatttatagtacttttttttttgctttgatcacataaaaacacaacacatcattattaatacaaaatttcgtgtcattacaacatacatcgttagaaacgaaaatggtcacgctgggctaaatattgagtactagattttaactcgcgctataccgcgggacgatttattttttttaagtaatatatattaaaacttgcaaattttatttttataaaatattgatattttacagtttataattgttattaagtatcgttataccacgaatccatgagacaattgttaaaaaactaaagttttaacccctattaaaacatcatattaataatattttaatattttataaatattgattcaaatacatccatcatataacccaattccaaaataaaacccgttctgtaatttctttacccgtcccgtgatttttttttcaaagtagtaatttttaaaattgaagaattattttttatatataaaaattttgcaaattgtatcattctctaatatatttaaattttatagtttaattttatatatagtaacattatacataccacataacatttttggttttatataatcttttctaaattaggatgatttgatatgtttaatattagtggtcttaaaaaataataaattaaagatttaacccgtattgaaatggtggattaattatattttactttttttattaatgttgattcaaaaacccgtcccttcaaatccgtcttgccaaaaaataatttattttattaatattaattttattaatgatatgactctgaattataatctaaacattttagctaataacataggagtacaccatatttatttaataggagaatgtaccatatgacccgaatacacttttacccaaatccaccaaaaaacaaatatattagttagcttaaattagttaaagaatacaaattgaaaaggtatattatactttattcgaatatagtatcaaaacttatataacacagagatttgataattttttaattgttgaatacttttttttttgctaatttttatgtgattaagatttaattgatttcgtatataaaatattaaattgttttacgaacttatttgtttataatttggtaacagatagatatttgaatattcagtatattttgcttcagtttaggaaatgtttgatgacccgtctttagatccaataagccctataatctagatattaacctgcagtataccgcaggtaggcttatattttagttaaactaaaaacttttaatgtaaagatgatttaaaaatatatgatattattttatttgattttaaatgtatagtaaactgtgagttgtatatgttttgttgatattatctatattgtttagtgtttaagattatacacttgtagtttgattgttaatttaagagtttcacctgtagtataccagcttgtattaatatcgatctaaactcgtcaattttaggatttttcagcttgtattaaaaattgaatcacatcatacacataaaaaaaatctaatatgttattaattattgtagtatataagattataaattttcaatataatatgtatgaaattaaatataaatatttcaaattatgacccgttactcagtagaaagttttcttaaatctattttcacccgttataatattttttcatgtattcaacagtttatattcgtttttaaaaattcaaagtatggcatatgcgaaaaaactctattttttttttataatgatgatattattttttcgcaaaaatagaatcatataaagatgagaagtgaactataataattaataaaaattaatatgataatttagatatcaaatcttatttgttaattttaattgtttacttttttagaaattaataatgtatttcgcttttctaattaaattaaattaattaaaatttagatatcaaatcttatatgttgattttgattggttattgtttttgaaaattaaaaatgtatttcgttttttaattaaatttaattaattaaattagtatttgactttttaatccttaaacagataaattaatttattctttaaaaaattatttctaatggcatacctatgtaattatttataaaaagtaagattacatttaaaatgtatttcccaaataatatagtaggatatttcttcgatttaggtaattattctcaaaacaagttgtttaagtcatctggaatgtaaacaataaactatttatagtttgataattagtatactcttttaaattaccatttatgttactattatacttgctttacgttaaccatattgtttagcttattatatcaatttttgctcaccaaattctttaatttcgtttctacaaatgcaaaattctcgttaatcatattgtaagattcaacatcttaattgagaattctacctatatgataggtggatcactcgatcactttcaataaccctttttttgttaaatgtactcctcaaggcatgtctttctcgctaataattgtctttccatcaatcaaacaaaataaaataaagtaaaaattgcttttccgacaaattcacggataaacttgtttgtccacaagatacaattaaaatggcattaacaacaaatcatattttcttggaatcaaaacattaaaagtatcaatgatattacatataaatcaagaaacatttcgatatatttcacatttgactttacaatacctactgatatatttttttatttagtttgttaaaattttgaaggataaacgtcatttcttttctttagttattgtttgtatatctcgctcgatcttacattactttgttttcttgagcatcgatcaatatcaatatgcaattaaaatatatcaagattaaaaataaaaagagtgttttggacaaaagaaactcccgaagaagttagacattaaaagctaataatagacgcaatggaaaaacccatcttttaaggctttaagtatttaaccatgggaactcaatctttgatttatcccctttttttcttgtccgaaagcaacaaatcaatgatcagccgttaattaacgccgccacgtaatcgcgcgaaggagaacgacggcagttatagattaaacaaacacgtggcaccggcacacgctagacggaagctttgtgacattaactttggctgacgttaagctagttttcgacacgacacgtgttagcgcacacgtgtgggttctcatgttttttgtgataattcatatttaagcgattataagtcgtagagtttgcaaactgcaatcattgaagaatttcgttgtagtaacttactaacttataatgatagtaaaataactttgtttaaaagaggaaatttgaatgaaaagaattgtgatgttactaattacgtacacatacgcaattattataaggcaaaatgatgtgaaagtgtaaataaagacttgtgtagttcacgataatcacatccttaatgattaattaataatgagatcgaatcccttgacttcactcaaacaccttcacgatgatgtcatctgatgtaacaaaagatattagttaatacttacacgtttatatacatatatgtaacttatatgtgtatatatacgtgtaaaacatgagattctcttttgcgatgtcttcatctatataaattccacttttttcctttagctgtggatcttcttttttctaccgtactctatatttttccttactttctaggcaaaaactttacgatctttcaatgtcagaagaatttcaagaatctgaggttatattttccgatgagtctttcacaaggaaagataacaagatcagtcacaacaacgaaaactacgaaagaaagtcgacggagaaggataaaatttcatctccggtgagaattccgtcaagaactactatccggtatacggaagaggagggagaaatgacaccgccacatgtcataatcgaaaaacgaagaacggaggcgcaaatggcgttttctttttgtacccttaaaggaagagacttgagtcgacaccgtaacaccgttcttaggatgaccggctttttggaagtttaatattgatcccaaaataaaatgagaaccggtcaagtttagtttgatctatttgagttcggtttacgtcggttttcttcaaaatttggatgtgatttagctttgaaacgaaccaattagtgtatcatgttttacacgtataacatagcgttgaaacgaaccaatgtatcacggttcttattgtttggtgaagaaaaatttaatattggggacattttctcatattttatttggtaagatgttgaatttccggttaacttaattgtaaatttttcttttaaattattgcttggtttcttgagaaaaagaaaacccataacaatcaaatcttatgataaattgagttatggggtttgcttgagaagtaattggtttcttcgcttgtaaatttagtgttcgtttggtccactttcatgggaggaatctgctatttgccaatatgcttgctaatgtgagctgtataaaaactttatttgctattgtgaactgaaccaagggagagataccttggaaaattcggctaaacatttgataatgatacacattgcttaaacaaaacaaattgataccttaaaaattggtttgacttcggattagatatatggtccaaatttgtatccattcgtctatatattaatcaacatgtaaccttattttatattatggaatgttacatgtcatctattgacacttgccttacatattcatgaaattttaaagtttgctgaaaatttatttactcagatcagttccacacttccactaatcctagtttacattgaatatcgaacagtaaagattaaacattatactttcttcttcaacgtatataatattatcttaacttcataagccgaaaatttaacggcgatgtcgatggttagaaacttagaattgttaatattcttatcttacttttctacatttttttttgttttgtattttcacgtcaatgtttttttgtcaacaggttatattccattttgtatggagacatttacgtaccaaaaaagttcatagccatctcagctttaccaagatagtcggattgctgagctgtgttttctagatacgtttacattacgctgattttgtttttttgtttgtaaatagaaaatatctaatttgctatcacatactgatataaatgtttgaatcattagccagttgttcataaaaataaataaagacttaaataacagtatcttagagttgaccaccaaaaaaaaaaatgtttaaccgtatctgacaaagtgactactttgacagttaaaatcaattacaagaagattaatcttgtaattttgacatttaaattctttcatcaataaaaaaatgggtaatattagaggataaccaaatttgacagcataattaagaaaatagctttcgtacagaaaagttgggtaaataacttttttgagcctgcaaaataactattttaccctttacagatgagagaaactctttctttccgacaatagctgctacatctagggaacaaaagacaatatgaagtaatgattacaccgctacttcttaaaaaatcattcaatattagaccactacttattaaaatcacacgcaatatctcttatactttaaaaatgtatatgtaaaaaaaaacttagttaaaagatagccatttagaaacagttgtgattgagtatagaagtgttgcataagatatttaaggacatgctatttatttttattacattagaatgtaggtttattgttttgacaatatggtaaatggtttcaacagagataagcaaaccacatatgtgttatttatagattacatgtgattgtacaaatttgcatgtgattataaaaaaaaacatgaatcatgaatcagtaacttacttgtgattttagtagaaaacatggattattagtaaaatgcacattatctttaaaaaatattatcttatcaaaaaatacaaacgttttaggaaaatatacatatcaaatagaaaaatagcatgaattattcaaaaattacatgctatcgtttgaattgagacacacggatcattgtaattttagtaaagaacaaatattatttaaaagaaactttgaaaaatacaatgttttagaataaaaatacatgtcaacaaaagtaaacggcggtggtgatgaatacggaagaggcggtggtgttatggatatgatggtggtgaatacggaggcggtagtgtttacagatctagtaatactaaatacggaggaggcggtggtgttacagatctagtggtggttattgttgtaagggaagaagaggttatggaagctttagtagtaaagctatttgcctataaaactatttgtcccctcaaccaaaatcctattataagaatatgagagtaatttaaagttggtttccgacaggtactatacgtccatgattagtttctataatattatggatttcatggtcatctagtacatatacccataaaaaaatggtatattttatatgagaagtatcgcatcatgtcaatagaagggtaaaaatgtataaataagacatgaaatttaaaacaagaaaaaatcaaacaattataaaatctacaagaaaacctatataattaaaaaaaaaaacactatttatacatactcggtaataaattcaactaacttaatgctataggtcagccgatacaaccggcgtagaccgattccgtcgccgtttcttacgtgctttatgcactttaggatgactaccaccaaactttaaccgtccagtatctctaaaccggttcttctcagccgtcacaataacacactccggtggaggcaccgagtatcgaatggtgtcataacaatacgaataatacatataacgttctcggaaccgtcgcatagcagttgcttgtttaggactaatggttgagtagtcattgctcatgagaaattggtcggagacagaacaatttatgttattgtaattaccgatgttgttgttgttgttttctccggggaatgagtcagagacattacaaccgtcgagggctatatctttgaattcggaaacaaaaggtgaaaatgtgtagtcgacgccgaattttccaccggaagtagcccaacttgaggcgtcccaaatggttgcatagagagacattggcttttgtggatagtctccattcatttcctcttttcttaggatttctcttattggtacatcatctacccaaaatctgcaaattacaaattaatcaactttttgtaatgttgttactaagagattttattctgtagttataaccacattgtgattttaatgttcataattttcttggctaaagcttgtgttattcatgagtcttcaattttaacaaaatcaaactgattttagaaaataaacattaatgatatatttgattaaaacagaattttaatagaaaaattgaatcgaaactaaattctatccaaagtgatatatgtaccaaatttggttattatatcattttcctacacttaaatccaaattatacattgttaaatgcgtgtaaatgagactaagccaatagtgaaatgaaatctgtgttgccgtgtcaatttttgcgttgactaaactaaatgtatactactaaacaacactttatgtcttaatggaaagttaagttgacgacaaaaaaaaaatgtatactaaacaacaaccacttatagttaatattatatagatatttcatgcatgatcgcactgtcaaattaattcataaaccataaacaccatcattctcataatcggaaaaagtccttagagatcacctaactaattatggttcttcttttcttcttcttttttaataatccaaacaataccattttaatctcataatcttgaaaaccttatagtagaatgtctaacaactttatttatttatttattaaatgatcataaataaaagtgaacttaaaaagatgaaaaagagagaaagaggactaacattattttggtaggggtccaaaggatgctataacggtgaaactccttggaaggatcaaaccaaagacggtagcgttcttcgcggccgcggtttgtgctaccgtttccatacatattcgtttgaaatcgccaaggctttccttctaggttccctaaaaactctatgtctagttcgtcatggtccttcacaaacacatcaccatttgatgtctgcataatttacaaattgcacacgttaattcaatcatttttttttcagtatatgtttctaaattgtttgacaatcaaattcaaaaaattagtgatttacatagaaagcgacgacgataccagccgtgtacgctcctggcaactttatcaacgaactgaaaaacccatgttgatacatgcttgaagagataaatccggaccctaatcaaattcattttataaattcaatgatttgattagtgatcctctaacaagatactagaacacatgtagaaaatgatagtttataaaacgggaaaataaactttgcaaaattgcaaaaacagtgacaagaagagattgcatctactatcattcaacttacataaagaaataatgatttgactatataatgaataaagattttgcaaagtttcatgttaattgatgaaagactgtataatgccataatcatgtaacgtacaattctgaccctttcgcgttactaaacctatccagtttcatgttcatgcaatttacaaaattatatatacaaattaatactatatatatagaaacatgattcaaagacaagaaaattaccagtgtatttgtcgaggagtaatcgaacgctacgatcatcaggagatcggatgagattaccttcaccaaacaaatgagaaagaccttcatcgaagaatatcggatttatgttctccaatcccaaaacgcatctacatgataccatcatcaccatcataattattaccactaatcgattatcaatccataaaagatagattgaatctctcatatcttttgttctattttttgtttcaaatccagaaaaaaaaaagaagaagagaaaattggttaactttctctttctttgtatggtctaagatctttgttgttgtttatgttttcttacgatgcgtcaaagtgggaaagatgaccatggaatggtctaaagtttggcttttctccttcattaaaattgttaaaaagccattcgttttcttagataactaccgaattgccattggtttttacattttagtagataataatagtaaactagagcataccagattgaatatataatttaacaaaaaaattgacatggcaaattgattagatataacaattctaggcttgatccatatttatctttattcagtagataatttgagtaaaggtcagctctgatgtgaacaaatgaattcagatacaatttgttgtatgaaattttttccaatgaaaatgtatttatttattgattttcatcatttttattaggatggagattgaaaaatattaattagtgaataaatccaaaaggaaatgtaaaagttcttaaattttaaatttattggtttcaaaatagataattattgaaatgtaacttacattcgttctctcttctaaacattgtttgttatcactaaagatgttaaagaatctatagttacatttattactcaattaaaataaattttgttttgagaaaatctttattggagtaaaagaatggaatatagaaaatttcctttttttcaaaataagtttttttctctccgcgtttttgctgacagaaaaaaaaactcacaatccgatagcttggacttcacgaagctaagttgttatacatataaacggcggccactcttctataaaagacttgttcttatcaaacattctgcgaagtgcgaattcaacaacacagcgagcgaaagaaatcatgagtcacgaagagaatacgtaatgctttcttcttcttcttccttttgttttctatgaaatataatctactgtttatgcaaagaactagggttttcaagtttcgtttctgtatcgtagaagcggttctgtagatttcgtctctttatgttcgagtacaatactgagaattagggttttttgatcatcaatacttcattcgatttcgcttcatagaaacatagctacttttaagtttgatgacacgatacatcgatttttttttgttcttcattacaatatctagggttttaacgttttccttgttctttctctacttatgtgcaggatgcaagagttagactcttctaacgatgaatgggtgaaagaacttgaaggagagaacgaggaatcgaaattcacagggaggagattagttaaaaagtcgatttctgttcctgaattggtagacgaagttgaagaagatctcgacgattttacagaacctgcggatgattttaatgacaaagtagggaagaagagacagaggaagaagaaagatgagtctggtcttgagaagacaaaaaagaacaagaagcaaaattccgaagaggttcaagagatgtgggattcaattacgaacaacactaactcacaggtttgtttgttgtataaatctttggctcattgttctgttctcttgagattcataagtttgattctctctgtctttattgtttaacagtatggtgataaggtcgtagtaaaacctcctaagaaaaaagatgaagatgctgaggagataaaaaaactgttcagtcttaggaaaaagaagagcaagtgcgataaaacctccatggagattgggatgcaagtagaacaagtgatggcgaatcttgaaatcgcggtagaagacgacgtaatttgtaacagagaaggaaaacccgccattaataaactcatgaagttacctcttctcaatgaaactctctcaaagtaagtaacacaagattcatcaaactcttctttaatcttttgagtgattaaagtttctctatctttaactgaaatttcttatctttaacaggaaacctcttcaaggtgagttcttagaccatggagtacttaaccttctcaagaattggctcgagccgcttcctgatggtagcttgccgaatataaacatccgcagtgccgttttgatgattctcaacgatgtatgaacctttttctctctctcaatccataataataagctctagatatcatttactaagaaatatcagatctcacctttgtttcgttctgtgttgcagtttcgtatcgatcttgatcaagactctagaagagaacagttgatcaagagcggtctcgggaaggtcataatgttcttatcaaaatcagatgaagaaactacacctaataggagactcgctaatgatataatcaacaaatgggtatgtataagcagtttttgaggtttggttctatcggtttctcgttgcttacctctgttcttgattttacttcttattttgcagggccgtatcatttataataagagcacaagatatgataacatgtttactcaggaggaacttgatgagcaacggcaaatactattaagaagacagaccaaaacagctcctaaggtgtctggaacaagagctagagactttaatacagatattgacctttatgagtaagtttctatttgtgtttaacttggacttgtaccatcatttcagcttaaaaacaattttgtttttggtaatctgaaaaatctaatgggggaaaaaatgcaggaaaccaatatccaggctaggaacttggacaggaagagcaagagcaaaaataccaacaacaatgtcgatggactttaagatccgtcctccatcgaaggttgacattaaccaagaagaggaaccttgttccaagtggcaaatggaaaaaagacataaaaacgtaagtttcctgcattaacatatagaagatgatcactacttgcattgcatcatgatggttttctgcatcaatgactatttttgatttgaaaactaagagaaaatatgatacctttgtgacagctaaccgtaaaacagaagcagcaaaagaacatcaggaaagggggcatgcaagcattgaagcttagtgtagacggacgcactatgctcaagtacttgtagagatcatttaccagagatgttttggacacatcaattgcaaaatccatggtgaatttctacacacattgtgtttagtgttttatgtagtgagattattcttagtttatagaactcaaaagtgtgactagagtgaatgagtgttatcaaaaacataaagagttaatatatccatttggttcgtaagatttttccaatagaagttattaccaaaaacgtttacacagagtagcatcagacagagaacttgacgccttcatcatctgctgatgttcccttgaacaatgcaagcttgcccttgttctctagcagctttaaggccctcattagaatcgtccgatcaatcccttgaagttctgaaacatcaaagagaacatttggttaccatttcacattgtgtgacacaaacaaaatcatattagaaaaactagaattagagttaaatacctgttccaagtgattctgtccctgaacgtatttcttcaacagtcataacactgtcctctaatccattatctctcacctgatacatgacatcgattagagaaaccgatttttttgaaagtttctttgattaattcacatgtgactcacaaactgaagaacaatgtctgcccaatcttgaatccggtgccacagaataagacatttcctatgccctttatctaaccactccgcacgccctgacaatagataaaaaatgacacattcaaatgaaactatgagactaagaaacctcattctaccaccggaaaatgaactcataaaaccaaaaaaacgtaaagacacaagccgcttgaacgactcagaatctaaccttcaccaacaatggctgaaagaaatgtttcccttgcttcatgacttagagatcctacaaacgaaatgaaactaatgctttaaaacacttcccttgaaaacatagaaaaccacaagattaacagcgaaacgataagacagaaggatcatactatcaatggcagagtttgagaagagagggaaatcttcttcaacaccaatcaagaaaatcttttgggatttgcagtaatccaaaataagctctttccagagctgtatctgtttctcacgagtgtccctcacaggctgcaaactgaaaagagaaacatttcttcaatctataatctttaagagaaaaaaaaaaagagaaactttgaagaagagtttgatacgtgaagtatggaggataattgaagaattgaggaagcttgaaatcagccaatttctgcatctttggacctcaatatctattcacaaataaaaacagagctcattggattattctgcaaatatgctaattcgaattaacgcaaagagattcccaaaatagctctaaccgattcaattttcgattttgaagcattattgagaaatcgaatcaccaaaaccccaacattagaaatctaaaacccagaaacaacaatcaaaatctattgttcccagagaagaaagctatgtttttgtagaagaaatcagatctggattatgtcaatccaacagcatctaccgatgatccctaaaatctattccccagaagacaaaacatttagagagcgagcagcttacgaagcagacagatgagctggagtctttgagacttgactgctctgtttcaaaatctcaaaatcggaaaattttgattgaaacgaaacgatggtgataattggggtttaatatgttttgactattttacccttacacttttcatttcagaagttgacaatttggattcattccactatttgagatttatgagtttttcacacgtctaataacaaaagttggaccatttgttatgcaaataggcttaagccttaaaggcaacactaacgatgaaactcaacttaataggatagattcatgtgtctgtggagaacaaagttcaaaagtataactgtaatacctaaaaacttaaaaggaagttgcatttaatcctcagagaatgttacaatctgtagcttaaacgaacagtgaaggaaaaaagaggaaagaagagtttaagctgcaacaagatcaggtgtctcggcctcaacagataacaatgtggtgtgaaccttatcgacccagctgtctagctgatccctcaatgacttgatctgcggtattcctaacaccctcggttgcgcccatgagacgtaaactgttccattcacctgatctagtattccctctatcaagtgcacctgcaataactcattctcctcagttttcacaatcaaccaatacagaatcacacattcaagaagatttcgagtctgcgtcttgccaatcttctttagatttttaatgttactgatagaatgagatagagagaaagagagaggaaagaaaaaggtactcaccgataagctcttcatgagaaggtgctcaacatcttcgattgaaagtttagtacgctcggcaatgacactcaaaggtatggtcctatcttcagcaggtcggctgtggcaaagatgttatatacaagttaagtactaagtttgttttcatctgtatatgggtataagatgactcctacagagaatgaatacctgaaaatgatctcaataaggcagagaatgttgatcttctctaatagtttcttctcattctcaaccagtgctggttgagcactcaacgatgcattgtgcacacgacagagttcttggtactgaactaaatctccgtggttgaatgcttgtagaatgtggtaaagccattccacatttgttccaagcagacttttcaactgccataacatatataacatgtcagtgttcttttatctataatggtgaataaatctgtggtttgctaatttggaggatgaagggaaacttacaattggatgggctaacagttccccaaagttatagatattctccccaagtagagctgaaagcgacaaatcaaaagccaaatcctgaaagaaacgaaagtatatgatattaacattttgattggaacacaaagcaatttacagagataaagcatttttcactgtaagtttcctttcatagagtgctaatacttatccaaaattgctaaaagaccatttggtaacgtaacgactacatatatcatatatgaatgattagaacattcagagggacgtaccagcttaaatgattccgagagtgagtccacagacgtataagcgaggtaaagaagagcatttttatagaactcagagaactcttgacggactttatggtactgagaagagacccaaaagaagttggcataaactgatggatcaatgtcagtcatactatcaagcaggctttttccatcgtccaagattttcttgcactccttctggtcaccttgctcaagcttgaacaaagctatttgtgtttctatatagctaattggttcatttatccttgactctttagtagctttaagcttctcaatcactccttcaagataactaactgcagcttctttctcaggatactgtcgggagactacaacagcgaaatgcgcaagcttcagaagattgatcctcgtctcaaagtcagtgatgaaattgttgtaaagctgtattaaagcatctccagcctgcaaagattatgaacataaacagggggaaacacgtcattaacaaatctgtaaaccttgtaaagctgagtttttgggtatctctgagctaaaatattcgaaagctttggtcacagaagtgcgataattcaccaatacaaagcttttcaatgaatctgaaaaatcacctaagagtcggaacgaatccttcagatctctctataaacccaagtctaacatgacgactcctattaactttctcgagatctatgaaccctaatcacacagaagaactacgaaacgatgaaaattcaagagattgacctgaaagacagagagagcgatgaactgctcgagcttaagagtgagctgatgccagagcttcttctggtacagatctgcgagcgaattgtaccactcaccaagctctgggtgcgcatttttctgcgattcaaggtattgtagagcagccatggtagattttcgaagaaacagaaggcaaagcttcgatcttgtatcggtttgggagtaagaaatccagaaaaacccagccttttagtaaactatatttcttgagctcaaagacaagtattgggcgataaatgcaatagccaacgattaaaaggacttttatgtaaataaaatactaaggctaaaattacattttgggctcagaaagaatttttgtttccgtattgggttacaatgctttattcactgagaatcaaagaatgtgtctgtttatttcttttgatgctacaaaaccaatgaattgagttatgaaggctatattagtggatctctctgtctgctacttattaccaaacaaatgaagaaagaatcatagtcttgaagaaacagagtttgtaagaattctctttagttcctttctcaatatcttcccagttggagattttggtatagagttgaccatcaccactttcctcaccttcctgtagggtgcaacctagaacacgtaatgtataataatgtattacattaatgatcagtgttttgaaatgggaaaagccattttgaattagtgggaacctaacctgagaagctacatagcttattacatcttcttctgaaagtgttgtttcttgtctccggacaacgaatgctaccggaatctctccacattcttcatttggggcactgaaatggaaagtttggatactttcagtagagtaacagactctgtcgaattctccaaaactggatttgcagtatctttcacttattaaactagtttagtaaatgatcaagatttgttttttcgaacttacgctgttactgcagcgtcgataatcaagggatgtgaaacaagaacagcctccaaatctgctggagcgatctgcaaaaaccataaatgcaaagaattaatatttcctaatttagagttggctgaaagagaaactgctgttcctttacctgaaagcctttgtactttataatctccttaatacggtcaacaataaacaagtaaccatcttcatcaaaataagcaatatccccagtacgtagccaactatcttcaactatactcatctgagttgcttttgggttattcaagtatcctgacagacaaatgaacggtgttcagattctctccaagtaaaattaaaactgttccataaaaatatgtagcacaaaatcaagaacaagataataagcctaatctatcaacacaagcaccaaataagccccacgaaagttggaagatccaatctatatttacatttattaggatgcaagtgtttctcagtgatttgaaccattgacaaaagactttattcatgaactgagaaggaaaatctcaactattttggtaaagaagtacagtaggaagaatctatctacctttcatgacaccgggaccttgtatccagagctctcctcggtttcctggtggaaggaaagaaccagagctccaatctactaccttggcttgcatattaggagccagtagtcccacagaagaatacctactaagcttttccgagttgaagccccgtgttccaactgcagttgattcagtcattccatatccctgcaacaaaatgtgatccattttatacacactttcagctaaatgtaaagaaaataatagtgtgagtcaaaaagtcatggcctcgttaaatcaattttagttgtttcttttgggaagagatgtcaaatttttctaaaaaatgtagattctacttcttattgagtttatgaatgaataacatttaattcagttttctaaaacgacatccaaaagtaaaattcagagacctgaatcaaatcgacatgaggaagagtctgaaggaaatcttcaatgaacttcctactcaaaggagctgctccagaagaaacttgcttcaaacttttaaacacttcaccacaaactccttttgccttctttgtcaatgccatcaacataggtggaacaaccgggaaatgagtgatcttaaacctttcaattacattaacaacatcagaagcatcaaacctcttcataacaacaatagttgatcccagagacaacaatcccatcacaaagagtgataacccgtagatatggcacaaaggcaaagctgctagataaacattactcgatcccggatattcgtactgagaagcttcaaacctcacaaaaagctccattgatgctatcaaattcctatgagttaacaaaactcctttactagctccagttgttccagatgaatacataattgcagctacatcgtcttgcttaatcaacggttttggtacaaacccaaaactttctttcataatggagtaaaacttcgggttttcgatacgaatcgaatcaaaatcgtaactttcagatacactaatcacactaacccccaaagaactcagcttctcaacgttttcagtagaagtaaaagctaatccaacactacactcactaacttgcttcttaatctctcctaaactactcgaaggattcatggtagtaacaatagcaccaagcgagatcaaagagaggaaaatcatcggaaaatagacggaattaggcaagacgagtgatacaacgtcaccttgacgaacacctaaaacgtgatagatcccagccgccattgattgaaccataatctgtagctcagtgtgagatattgagaacccggttaaggaatcgatgagcgctgtatcgccgtggtgtttgtgtgagaaaagagcggagacggcgtcgagatttgggtcgacggggaggtgtagggaagggaatttgctggtgtagattcctgttttagaagagaaccaaaagggagggttttggtgagacgtttgggttttaggatttggcggtatgtgaagatgtgtcgccgccattagagagaagcagagtttaagattctgcagcgatcaatatttacttctgatcgggaaataaaccaacgacggaatagtttagtaaaataattaatttagttgtaacactattattatgtactaattgcaattaattgatttcgaagaacagagagtgcaagaagatcacgtgtgacacgtgacagtctgttagcaaaaaaagtacaatagtcaaaaaatacacactcacttgatttcttccctttttcagttttgtttccctattggctactttggatcccttttagattctttatattctctgatgttatcgccggccaaatgtgagtcagaagaggctcaagctccattggatctccattcttcttctagatctgaaccggaatgtctctctcttgtcctctggtgtcccaatcctgaagaagctgctccgtcctctactagagaactcataaagctccccgacaacggagagatgagtttgaggagatccacgacgcttaattgtaattcgcctgaagagaacggaggagaagggagagtttcgcagaggaagtcatctcgtggtaagtcacagccgctgcttatgttgacgaacggttgtcagcttcggaggtcgccgagatttagggccctgcatgcaaatttcgacaatgtatgctcggttccggttaccaaagggggagtttcgcagaggaagttctctcgtggtaagtcacagccgctgcttactttgacgaacggttgtcagcttcggaggtcgccgagatttagggcggtggatggaaattttgacagtgtatgctcggttccggtgactggaaagtttgggtcgaggaagagaaagagtaatagtgctctcgataaggttactcgccaatttttttgtttgttcttgttagtagccacgcaatgcaatgcagcttagttagagattggaaagtataatcgtcgttcttttttttgggttgatgcagaaggaaagctcagattctgagggactgacattcaagtaagtaaaaaagcttcacagcatttgttattgtattttttgcttgggaaatcatccttgaaatggggattttagttctcaaatactgttttatgttaaaattgatgcagagatatagctgtaattgccaagagcctggagatggaaataatttccgagtgccaatataagaacaacgttgctgaaggtagatcaagattgcaagatccagccaagaggaaagttgatagtgatacattattatattcaagcatcaatagttctaaacagagtctcggaagcaataaacgaatgaggagatctcaaagattcatgaagggaacggagaatgagggagaagaaaatctaggcaagtctaaaggaaaagggatgtctctggcatcttgctcatttcgaagatctacaaggctatctggaactgtggaaactggcaacacagaaactttgaacagaagaaaagattgtggcccggcattatgtggtgcagaacaggtgaggggaactgagaggctggtgcaaattagtaagaaggatcactgttgtgaggctatgaagaaatgtgaaggtgatggcctagtttcatccaagcaagagctattagtttttccttcgggttgcatcaagaaaactgtaaatggttgtagggacagaacgttaggaaaacccagatcttctggcctaaatacggatgatattcacactagctctttgaaaattagcaaaaatgatactagtaatggattaactatgacgactgcgttagtggagcaagatgcaatggagtctttacttcagggtaaaactagtgcttgtggtgctgctgataagggaaaaactcgggaaatgcatgtaaattctactgtgatctatctctctgacagcgatgaaccgtcttctattgaatatttaaatggagataatttgacacaagtcgaaagtggatctgccctctcctctgggggtaatgagggaatcgtttcactggatctgaataatccaacgaaatcaaccaagagaaagggtaaacgggtaacccggactgctgtccaagagcagaacaaacgtagtatctgttttttcattggagagccactttcttgcgaggaggctcaagaaagatggcgctggagatatgaacttaaggtagttgattaatttctttgcacttgactgctttagcttaaaaaattgttaagttagtttgagcagtagagattgcatagtcttaagtatatatttgtaatccaacataaaaggacctcatatctttcttttcactctcaaaatatccgcttcatttctgattatgaatttcactaattttcaggaacgcaaatctaagagtagaggccaacaatcagagtaagtactggttctttgtcaactcactgttttttttctacaatattctcttccttcatatgtggtttgttttactgtatattcaatatcctgagcaatgtttttgaagggatgacgaagacaagattgttgcaaatgtagaatgccattattcgcaagcaaaagtcgacggtcacacctttagccttggagactttgcctacataaaggtaaaccatgcttatcatgaatatggtattttttagctcagtatccctgcgctgcttttcactttttcattggaccaaacaactttttcattcaagagccttggattttctagaatgtaatgcgtttgtgagaagaacatatatagctaattacatgttcatctccaatatggtacagggtgaagaagaagaaacccatgttggccagatagtagagttttttaagacaacagatggagaaagctacttccgagttcagtggttttacagagcaacggatacagtgtgtatacaagttcttctcttttgtttgtctaattgtttgcgctgcaacaactagttactcatttgtctaatgtttgtagataatggaacggcaggctactaatcatgacaaaaggcgtctcttctattctaccgtaatgaatgacaatccagtagattgtcttatttctaaagttactgttttacaagtttcacctagggtatgctgagtcaagctcattctctttctctctctctctctctctctcttttttttggttacaatctcaacagagttgatcagtttgttacaatctgcattttaagtgattttgtttcatgactttgcaggtcggattgaagcccaattctataaaatctgactactattttgatatggagtattgtgtggagtattcaacatttcaaaccttgagaaatcgtaagtgctcatgtaatatgtttatgagttattaattggaaacggatatagctgttttctctttatttcttttaagcaaaacagatgccacagtttatgagcagtttgacacagtctttatataagatcctaggtacagaagcttgagcattcttttttcttctttttttggtctcagctaaaacgtccgaaaacaagcttgagtgttgtgccgatgtggtacctacagaatccactgaatctattttgaaaaagaaaagttttagcggagagcttcctgtgcttgatctttacagtggttgtggtggaatgtcaactgggttaagtcttggagccaaaatatctggtgttgatgtcgtgacggtacttgctttaagtaattaatctttatctctttaacttaggatggaaagctctttcttcactcactttcatttaatatctggattcgtttttatttttctctttcagaaatgggctgtggaccagaatacggctgcctgtaagagcttgaaattgaaccatccaaacacgcaggtcagaatactttcggcgacaactgctagatcatttttggagaattataccaaatctaatgatactgtcgttgtttacaggttaggaatgatgctgctggagacttcctccaacttttgaaggaatgggataaattatgcaagcgatatgtgtttaataatgatcagagaactgatacattaagatccgtaaattcaactaaagaaactagtggaagcagctcttctagtgatgatgattcagattctgaggagtacgaagtggaaaagctagttgatatatgctttggtgatcatgacaagacaggaaaaaatggcctgaagtttaaggtatgccctgttgcccttatattgttgatctaaccttacttcttagggttttaagagtgttcttttcagcttttataacttccaagacatatttttgtaattctttgctagctttatgacgttttagttttctgaagacgaattatgcccatgactttttcattaggtgcactggaaaggatacagaagcgacgaagatacatgggaactagcagaggaattgaggtatatgcttcaaaacaatgttaaaaagagattctgttgttatctggaactaattaattttgtttggaattttagtaactgtcaagatgccattcgggagtttgtaactagtggatttaagtccaagatcttgccacttcctgtaagaacttgcttctgaattgaattcttgatctttgaaagtcgtatgattgtaccatcaacatctatttgccatgaacatttatttgcactgaaaataaaaaaatcttgtcaatgattgtaactagggtcgtgttggtgtgatatgtgggggacctccatgccaaggaattagtggctataaccggcacaggaatgttgattctccattgaatgatgaaaggaatcagcaaattatagtttttatggacatagtggagtatctgaaaccctcatatgtgttgatggaaaatgttgttgatattctgcgtatggacaaaggttctcttgggcgatacgctttgagccgtcttgtgaacatgagataccaagcaaggttaggtatcatgacagctggttgctatggtctttcccaatttcgatccagagttttcatgtggggagctgttccaaacaaggtgaatttataggcctattaacttcctcgaggtgacggtttcatacttacattatttggtatttcatttcagaacctacctccgtttccgcttccaacgcatgatgttattgtcagatatgggcttccacttgagttcgaggtaatcaaattgtaaattgggacttatcttatactcttttcattaagcctgtcgttcttccaacttaagccaccttggctttcatgtttcagaggaatgtagttgcttatgctgaaggccaacccagaaaacttgaaaaagctcttgttctaaaagatgcgatatcagatcttcctcatgtatgtttcatttccactagatccatctgcaattcagggttaatatatatttataatttcttttcacatatctaggtatcaaacgatgaagaccgggagaaattgccttatgaaagtctcccaaaaacagattttcagaggtacattagatcaaccaaacgtggtaagttggatctggattctgtagttacggtctctttcacaacaattgtctgataagccatgaccacttgcatattacatatggtagctcacgcgttagtgttttgctatgtcagatttgacaggctctgcaattgataactgtaacaaaagaacaatgctactgcatgatcacaggccgttccatataaatgaagacgactatgcccgagtttgccaaatccccaagaggaaggtactcatttcgttttactaattaacaatcccgatcctctagccgaaagattctcatgtcgagagaagtgtttgcagggagctaatttcagggatcttccggggttaatcgtcagaaacaatacagtatgtcgtgatccatcaatggaaccggttattctgccatcaggaaagcctttggtaaagaatcctcttatatgaactgagccataccaaaattacatgagttatcgatgaaactacacattagtgctgaaattctcaagctaatgtcattctgcttgttaagtctgctgtcaacagttctcataatcccaaaaattaatatatgtgtactgaatcagctcacttgtggccctccttaggtaccaggatacgtctttacttttcagcaagggaaatctaaaaggtatactcttacactcctccgcctgaaactatttgttgaagctttcatgtttttaagtctctctggatttataaaattcgcagaccgtttgctcgtctttggtgggatgaaactgttccaaccgttctaacagtcccaacatgccacagtcaggtaccctcaaagccattccaggttttaacataataccatattttaaattcttaaaagtttctataagaagtttgctatttgcaggcgttattgcatcctgagcaagatcgagtgctaaccataagagaatctgcacggcttcaaggtttccctgattacttccagttctgtggaaccattaaagaaaggtacttgcttttgttcatttggaaaaaattataagaaccaggacaatagtttcagactactaagcaaatgcgaatatcatttcacttcttctcactatctacaggtattgtcagattggaaatgcagtggcagtctcggtttctcgtgctttaggttattcgcttggtatggcttttcgtggtctagcccgcgacgagcatcttataaaacttccccaaaacttttcgcattcaacttaccctcagcttcaagaaaccattcctcattgaagcagaggacattaaacaagtttgttattagttcctctccatgaggcttcgtcaaaatgatcaattttgttctttagtttttccttgtgttagtgaattgtgacatcatagcggctggccagctcagtctactatgctcgatcgaaatttcggtttgattaggatttttcgattagtaaattcttcaaaaattaatcttattttagccaactaatatgtaatttattctttgttgggtaattagatgaataataattggtcttctttctcacattttagtggatgaaaagtttcctcattgttttcttctttattcatcacaaatgaaaagtttcctgatgttgcatgagaaaaatatgaggtgaatgatttgggatgtgtgccattcgttagagattggtatgtggtggatgatgtttagttttgatctatcaggtcaaaccaacacgtgccgtgcccggcttttaagttctatggacaaaagtattgccccactaggcaaatgattgtgactccggatcttgtgctttcctttgacaaattccaaattctacatattcaacaattttgcttaaaactttaaagtttgatctttctagaattgaattttattatttaaaaaatatacgatacagttacacattaataacaagatagagaatcttggcgttaacaataaaagagataaacgtagcaattaatacaaaggccatatacgtaaggtgtggtgaaagttgttacattcatttgaaaatactccatcaactccacccatgttttcttttctcttatcaagtgctaccgattctcacggtctttagaaatgaaccacttttagtgatttctcgcaatggtttatcggtatatctaactgtgttataaacccatgcacccgcaatcgcaccaagagttggcgcaactaagtatatccaaattcctttgtagcaaccatagaccagtgcaggtcctaaacttcttcctggattcatcgacgcactcgataccggtctaataaaattgatgaacataaccgtataaatcattttttggaattcttactctaaaaaaaaaaagtataagcacaataatagaaatggtaactgataacttacgcggcaattagcacgttaagtagcaccgttgatcctattgctaatccagcaagttctccgatctgaatattgcagcatttggtcccaatgttaagtttctcgtaaatttaaagaccacagaaaacaaatgtaacttctgagagggagcagtaattaataacactaatataagccatcgaatttgacaacataagaagatatgaaaatactaaccgctctattatcggtagcaacgccagaaatgatgaacattagatagaaagtgacgataaactccatcgtaaacgcctgaagatctgatcccactggtgatgatccgataaacacatcgtgttttccgctacaaacgtcgtgatcaagtccgaacaacaaccgtaatgtcgcagccgcgagcgttgatcctatcacttgtgatatgacataagctggaacctaaaaaaattcaaagaacaaaaataaaataaattaattcaccagttcacactaactagggaagggacccaatcttggaagatattttgacgtttatataacaaaatatggacgtgtggaaaaactatatacatacaaaagttacataacattttaatttattttggaaactagcaaaagtagatttgtccttacgtatcttcactcatctatagtaaacgttgcattaaaaacgctacgtatttgaataacccaaagtctcgtgtgcaatacaagcaaccgatagctaaactagatcaatggaaacaaaatacactaatgttctttaattagtttgttcatgaaactcaaaaacacacataaaatacaaaacttgatcgatcattatataaaggctatatgtaattgtgtatgtgttaaggacctgtttgagagggaaacggccacaagaggcgaaggcaatggtaacggccggattgatatgagcaccagagatgtgaccaagagagtaaatgaggaccataatggtgagtccccaaacgatagcgatccctggaagagtcacgacattgtcgttttgcatgtttacaaccaccgatgcacaaccggtgaataccaaaaagtaggttccaagaaactccgcgatcaactgaaaacatagcgtaaataaaaccgagatgtcttgtgaattggtacaaaacagagtcttttcatttataacttgtaaaacatgttggatatggagagttaaaagtaaaaaccttttgtaagaaagggacagagactgagagtagagagtcttgtttcttcaagggtcttgggttatgaatgtcttccatttcttgttgatgttcgacttcatccttgagattcaccattactacttcttctctggcgttgccatagccgtttcccgagatatccgccataagtgacttttctctttttagaaacaaagaagaggaaaaggattgaactataaacgactgtttatgacttgtgagaatgagaagtttggtagcgattatctcctatttattggcaaacatgggggagagagagacttctttgacgattttaatattaccagtttattaattgaaaaaaagaagaagatgatatattgttaataaagcttttttaataataataaattcctatgtttgtggagattctataccaggtctcaaattcaattttcagggattacaattttttcttagatcaacaaatataaaatttatcgaaaattttagaatgctacatgcagaatttgtttgttttgatcttgtgtgttgtgcagagagcctatatcattcgtgcatgtcgtacatgcataaccatccgcgcctaggattcaaatgttgcatacttgcaatctactttttgtttttaaatttttattctactttccaaatattcatttataatcacataagtatatatacgtcattttatgcgttgtttgtatttcacataagtattcatttagaacatctcatatcgaattctgaatttcggatataaagtcaccggtcatatgttgttacacccaaatttgttcgtatcatataaacaaaacaaaattatgtcatgcaaactatagaataaactatatcatttatgagaaattgaaaaatgtcactagatggaattgatgatggcctctttaagtcttcaactaccaagcgggtaatacggacatactttatttagcttatagttgtgcatgtgtacatatgtacacaacattataaaaattactaaaaaatttcaagatattttatatataccttgatgccaacgtaacaatcttgattgcgatccgtaaacttaatgtagtgtactgtttggatccgatcatatcaacctcaggtttgaatccatactaacatataactaaatgttaattatgatcagaatgttttatttgcgacaatactcaaaatgtcatctctagattaggttaagttcgaaccctctttaatggatgttagaatgtagggttgtggccacgggccaccagagaaaaaatgaagtttctttataatgtacaatttgaattatcagtaaattagcaatgttaattccacatgtaaacacgtatgctggttaatggtgacaagacaaatcttaaagactttcatgttacgtatcgatccagatgtgcatgatgtatggtgccaaaaaaataggaggagtgaatatgaattgaaattgagaacatacatatatgcaaagggaaggtaaataaagaatatttcagaaagaaaaagaaacattgatgtaaatgtaggagtatcaaagtcgatcaaaattagtagatcattgacttaactcaaccaatgaattgactatcattttatattattttaataagttgatgaaataaatgagttgaatggactgatgaattatgggggctacttaatgtttccaccacgacactcggattcaattcattaacttttttacatcatcataactttattataatcgatgatatcaaacccatcatgatataatcatacaccatcatattcatcatcatcaacatcatttcatcagcatgacttccgaagctattatacgtgtgctagatctatatctttgtacgatgtgagagtgttacgagtagtatgtgtgcataaagtaaatgagacataaatttgttaacgggtctgttcacaacttacatgtcaaaaatttctaccaaaactatgtaactttttttattatgacgctccacaatttctcgctacaatgttattccgtaattttatatttttaattgcaatatatctggtttacgtatcaaagataatgcaaaggaaaattttatatagatattatcttcatctaaaatggtttatcagtatatgtattaatgttaaaacacattatcaatttcaccaggttttaaatagaaattccaaaaaaatatatatctaaatttgttttttgaattttatctaaaaatcttatgtgatttcttaaaatgcagatattgtaattcaaaaccattaattgaattaaaatatattttaattttttgtaatttttggaaatcattgaatgagataagattttggttctatgtccaaattagtgcaaaatcaggaacttgtaagttgtaactaaaagaagccaggaaggcaatttttttttctaacttcagaatgcatacttgtaatattttattaagtttggtttaaatttgaaggtgccacggatcacgggaaatcgtttttattactaatatgtttgagtcaaatttcagtcacatgtatagtaactgtataattcaagatatgctaaatatcttttaaaacttttgtacaactgtattttaaaatcatgaattggattgacatgtaattttcttttattttattcggaaattattggtcgaataatatgaaatttgtagttatatataattttcaaaattagttcgaatcatcaataaaaacctccattatttttttgctgaaaagataattttattttaattaatcaggccaagctttgtaagccgaaagacattgtcgggtccaaaaaatgaaacagtacacgtacattaatcgaggttatggttacgtagaaagaaaaatatataatctagtttttcgttaacattaaggctcaaaatagagcatttcgtctacacaaccacacttaaattcagtttttttaccaattagctaaacaaattatatttgaatatagtttatatataattttcccggcacttcggaaatgcattgtagtaaaaccatcgtatattttgacatattaatatattatgttcgcatgagaaaggaaggtttttaacttcatcatacatacttgtaatattttattaagtttgatttaaaaggtgccatggatcacgggaaatcatttttattactattaagtttgattcaaatttcagtcacatgtttggtaatcattctaagatatgcttaatatctgtacaaccatctttttgagttttgaccatggaaccaaaattcgataagatttcacgtcgagaacaatagtataaaattgatgttacatttatttcacaacttgaaataaataatgctacaccgaataagatatattttgtttaataaatagaaaaaatgaaacctctttcctgtagaggtgaaaataatattattgtatatgagtgttttttctttgcttaaactttttcttgttttgttttttacatgttaaatttactgaccaacaaaaaaactttatgtacaaagttttgaaagaaaatcgaagacatgtaatcctatttgggatccacttatcaatcacacggatgaggagggtaaccgacctgtaaatatgattatggtgcctctcatttcgttcccttaaaatgtcatagatggttatctcgaaggtcatacgaattaagagataaaagatgcaagtgtatgtcaaaaccgttaaacttactaaattataataatactctagaacattttacatgccactcttattatatatttttggataagccaatgaaggagttttggatgctttaagttccgcacactcttagattttcttcgtttatattgtaactattcatacaaaatgaaaggtgagctctctaatcaacgttatattttcagtttcgatatgtttctttgactttctttttttttttttttttttttttttttttttgaataccaggaggttctgggccgaagcccgtaatccctccaggcccgaaaccacaacatgtaatattagtttcgttccaagcattactcgaaccggcgacctctaagcttcgcctagggtctttaccaattgagctaacgacacttggttttctttgtcgttatacttaaaccattaatacaacaaatctcttatacatgttcttcaaacttgtgaattgacactaacaaatttgggtatccatcgggcagtccattggacgctagatggatgtccaggaaaataatggggacccaaagagaagcagataaacaaacttgtgttcatcagaacatatatagatgagagtattttcaaaaagaaactttaaaggttgtctaatataagtaagaatccaaatattgcattataagacttgttagttagtagtaaagatgtatctagtctaaacccgtataaaaccggctttaattattatgttatatcaaaacataccgggtttctaaaacgcgttgagacataaacgtagattgctaaaatgtctagcacacgataaaccagcgtttttatcaatagtttgttcttatcataaaatataaataggatttaaggattttcatttgtaatattaagagcgtaagcaagtataatagcaaacgcaagcagggcgattatcgtaggccttaatgcaaccacccttgccatgtctcttgagtgcacatgaaaaggcacagttgtcaggtacacattctccccatgttagcatatcataacacctttccattgtccccaatggttgtccctttgccatccttatctcccctattacagtaatagtccaaacacatgaaataatctcagttacttattaaaaaaaaacaaaaaaacaaatattcgcttgatgataggtgtttaatttgattcaacgacctcggttaggtatttttctctaacataaaactatataggagaacggttaagaaaagttatggtgttataaatacttgtgttgctttcgaatacaagtgagaaacaaactaatgaatttttgttattgttttcatgactatttacagagtagaaagcatgaaaacattcaatcatcataattcataatctatggagtattggagtttcatgaacgtaacaactttgagaacaaaaatggtagtatatatatgaaacatgagaattttataccaattttagagaggcatttggggtacgaaaacccttaatttctcaaacatacatcgtaccaaaaacataaatcgtaccaagtccagaaagcaattttgaccgccgtagatagaaaaaaatctgattacttggttccatttacttataatatttcaagaaagtgtaactaaaatcaaatagaacaaaacgacaaaacataactcagtttaaatacaaatctcttaaaaatactaaaacaaattttcttctctaaatttccaattcaaacagcaatttgtcaattacctcaattctctaaacatgtttctgcatcgatttagcttgtattgtcatctttaattcataaaaccacataaaagaatttagcttgctattacgaaactctataatgtaatatagaatctcaatatctaattatgactcataattgacgtaacaaacttaatttttattgtagaaaactaacttgtttttaataattagtttattttggatgattataataatatattatgacaattataaaaaatacaaacctaaaacaaggatggtgaagatgcatagaacggtgacagagagttgcaaggatttactcatgttgggtactccaagcgaattgataatgtcttacgaataaaagaaatgaagaacaacttgtacatatgtatataagaagtgatattgatacacattgtgataacttagagatgcattttgatcttgtacctaatttaagacattgtcttaattagaaccattagatattttccctttattgcaatgcattcttttccaatcaaacaaagaaaatcctgttgaatttttgtaaaagaagatcatatatcttgtttaggataaaatagcaatttaatatataaaaggtaaaaaagaagaatatatatatatatatatatataataggagaaatatattctcttaatattactatatttttgctatacaaatggaatcaagaaatatagaggcatatgtatctcttgtaaatggtagggcagaacatttacattttatcttgtaaatgtgtcattcatttagttacagtgtgctaactaaagagaagaaaagtaaccgcttttcagtagtgatgaaaagaaaacatggtagggcgtatatgtgtttttcttagattgaactactttttgttgaaatgtaaaatttttatacttgtacaaaagagttcatgtataaagttttgaaagaaaatcgaagacatgcaatccaaaatagccaaccgattattgtacctctcatttttgttccctacaaatggcatagatggttctctagaaggtcagatgaattaagagataagagatgaaatcgcgtgtgtttgtagtctcccaatctggtttaggatcagacgtccccaacaatgtatctccaaaccttaaacatactaacttgcgttcaaagaaagaaaaaagaggtaagaactcggaatcaggtgtcacgtttcgattccaatttctccagattactctaaaccgggataaatcctgacgttttctgttatgttatgtcaaaacgtttcgggttcctaaatcatgttgtggaaacataaacggagaatgataaaatgtctagcacacgataaaacaatgtttttattaaacggttattcttataataaatataaatatgacttcatggcttttcactagtgaaatacaagtattaagagcgtttgcaagcatactggcagatgcaagcggagcgataatcggggccttcgaggcaaccacccttgccatgtctcttgagtgcacatgcaaaggcacatgcgtcgtatttacattcttccggccataggacctccttacactctaccatttcctcaagtggttgtccctttgccagacatatctcccctattacagtaatagttcaaacacataaaaaacaatctcactttcttatttctgtaaaaaaaaaaaagagactattttcttgatgatagatgttttaattcaaggacttcgtttaggtagcttctctaacaaactactcagtatgagaacgagaacaaaaacaaattatggtgttatatatatatgaatacttgtgttgcatccttagataataactcacaagtcactttaaaaacaactacaaccttctccatctgccatctggcttaagtctcaaataaataaaaatctctcaaaatacctgaagaacaattttttttttttttttttgttaattgccaaaaacagtttataagaactttaacatacatacacttattagacgattcgagcatcccataatttgaggatacccaatcaattacctcaaattctctaacatacgtttctgcatcgatttagcttgtattgtcatctttaattcatatataaaattgacattcaagaatttaactcgctattacgaaactccataatataatatagaatctcgatatctaattatggctcatagttgacgtaacaaacttaattactataatatataataccggttataagaaatacaaacctagaacgaggatggtgaagatacatagaacggtgacaatgagttgcaaggatttactcatgtcccgatgctgcaagcgaattgatgatgctttacgaataaaagatgatgaagaacaacttatacatatgtatacaagaagttatatctttgatacactatgataacttagataggcattttgatcctatatctaatttaagacattgtcttggaaccattcgttagtttccctctattgcaaagcattcttttccaatcaaacaaaacaaacaaaaaacacaatgaaatttcgtaaaatagaagacaatctatctcgtttagaataaaatactcgcatttttagcaaaaaaatatgtataaccatgtcatgccgggcagacagttcttagaaagcaaacgacttgtcttcaatgtttaggatggatatctgtaaccatatttcatggaccacgagtaatttttgtgtttagagaatcattgatccaacctcttaacgttacatgccgaactagaagaatcattgatgcaacgtttggtaaccaatgatatatgaataagctattctgagaatttagttaaagatatataaaactctgcaaagtgaaaagacattcggctactaatttgtcatgtcgactttaatggcgcaggtatcatgcatgataaaggcaacgcattacaatattgacgcaatgttaatagatagatacataacaaactacttttaactataaattttttgacattactaaaaaaaagaaaaagatgtattgaaataaaggaaaactaaaagtagacgcaagataaagaattgaagcagtgactattccaaagaaccaccaaacacttaatgtgacagaacttatatatgaagtttgatgataatttctcaagggtttattctgactccagattcggaactatagccgaagagagctcaatatgcgaaacccgaactgcaccgataagcctctctggctgttcttccgctgtatttgcctgttaaacccaaacatgagttgtatgcataataacagcctcagttacctgagtaaatccaaatgttatgggtcagtttatcgataaattacctgtacaaggaaagccatttccacaaccagagacgtgattacgccaatgacgaggccgagcactccatttgcaacggttgatgaaccaatatctacgtcaatctacatcaacaagataaagtattttgagttatttttggttctagaggcactcataaactagatctatgggtctgctcacttctaagtatgtcgggccacggatgtagttgcagtccactgctttcccaaggagacaaggggtgcttcccacactttgccgtactatccatgagccctggcatagagtttagttctacgtgaaatccacttcctatagaatctccatataattgtagcagtaatcacaaagagataaacataccttaggaactaatggtataagctttagcctactatttcggaattcatcatcaccatccacaaaccgttgcaagagggacccaggtactagttctttcatcacgaaataaaacaccatactgtagtgtgttgatcctggaacctatataaacaccagtattaaacctatataaatatgactttggtttgtactcaatgttaggaatcttaatgacagttgatgggctaagcttacttgaacatttaccaccattgagaatagacctttttctgcagcaacctgaacatgtgtatcaaaagactcaataatctttctaagtgattaagattcatccacaagctaaggaatagcatgggaagaatattgagtcattgagtggaatattctctccattaggtaactaaaattaaggtgcttgtgtatcttacttgtgctgcgcagcctttgcgtctagcaacatgatctattcttttactgtctttgaaccagtcaacagcaacgagatccataagatgcttgccagcaggtatcttccgtatagtgttaaatggacagaaacaaaagttagttggctgtaagaacctaaccattctatattaataagatgaaaattttgccaacctttcttttctcttgaccgaaattcttgccccgaactttgaagttgttaccatcagaaatcctccagcagttacgggcgttttcgttttcattgcgctttaggttacccgagaagcatgacagatcaatgttgtgagcaggttcttcttctgtagtttcaaatcgcaccaaaaatcattgctattagatatcctaattggctcaaatagcattttcacacttactgatagggtgcacacctggtctcttgacatcggtctctggtttacttgtttcaggctgaaatagtacacaagaatgacgattcaatttcggatgctgattaagattttaaaatcaaaatgcttgatattcaaacctcttgttctgattcagcaatctgaaattcatcatcatcatccgagtcttcatccataagcaaggagtttctgttaacggaatttgtttgatcaagagaaaaggcagacttatgcagagacttcccactcttagtcaagctcaaggaagatgatgccatattaaccatgacagggatccgggtatgaacacctctctcatctgtctgtgaaaaccattcccgcaaacctgtgaaaagcagttaagcacagtaccatgaattaagacggaggatttttaaatagccaatgaaattacttttctgcaaggacctaaggaaaccagtggaaaggaagcatgaaagcacttaccagcaacactattcagcatttgaagaagacaatgttgttgaaatgctggaagatagcctgcaccccacccttttagatcaatttgtattagatgttgcacttgcgttctaggcctcccattccgaggctttagtggggaaatattatatcctccacctacgcgaaacaaaaatagccgaggttagatagtagtacatcaaagggtagaagtattttatcaagcggttaaaaccaattagtttgcttaacgtactctcaagatgagcccgaacacatccaggttgtggaccacaattctcatgctccctagaacggaacaacacaacttcacagaaagagcaagataaataaccaacaagttttataaaactaatctttccagcagattctagatgagtaaagaggaaagaaagataccataactcccatcatcattacggcgccaatagcggacataacagaggtcgcgaggccacacaatcctgaaccatttgatttaataatcaggataaagcagagctcgtggaaacagtgaactaaatttcaaactggaaacaggaaatatcacaaatgaaacaaaataataactctgagctgtttttctgtccccagtcttatacagcattgtattatggcaaaaaagaaagacacctttgagagacacagtctattttcctaatgatgtagtagtaaggtttaattcatttggaataaaatcatcacattttgtcagcttgactataagtagacaatattttttcaggtgcaaccttacattggaaaccagtcgagcagaagtctgtgatagaggactgctgtgtgaccatcgacctcttccactaagctaccaaactgaaagctgcagtcccacctgtatcgaacaggaacacagataacttcagatacagataaacactaaaatacaagacttttggatacatactttaaaacattggacaagcaaaactgttttttcagggaaagaaacagaaaaacatagaaccaacattaaaaggcataaaactacaaggaaatatttaacaatttttccaaataatagtgtctaactgcaacaaaatgaagaaaaaggaacactgtacaagccatctcctacagtaaggaaattagtcgggaaaatagaaggcagagaagcacctactcataacgagtgccgtccatgctcatcagaagctcgaatatttcctcacatgttgcctccactacaccaacagccttcattgccctgctacagcttcttggctgcacatgtagcactataatgatggttcttgtctatatagagttactatgtaatcaaatgggaatcacgccataataaataaggtattcgagatttccgtacaaggtaatcaacttcaagaagctcttcaaaaatccgaagacctgccaaatgtgtagaaaaacaaaagttaattcaaaccaacttctaaaaagcaataatcaaatatatatgttcctaaaaaaggattaagagccttgagctaatgaaaacttgaaaaaatcactcaaaaacaattaaaaatgaaagtaaaagcaataacgaaacccatgaagatagaagattgtattgattgatcattaaaagcgatcttccagttcccagagcagatataactaataaaggcactggaatccacatgttccaaataagatctcataattgttgtagtttatcgaggggaaatagtatactaaattgcatttcagatatagcagcatcttctagagcccctgtaaaaccactaaccattttggcactgaaggagacgccagtgtttcctggaaaatgcttggttgtcggaattctggttcgccaactctgcatcaaattctttggtccagtcaagtacagattctggaggacctgcaagtttttttgaggtgatcaatcagccaggatcgcagtaccagattaggacacaaataagtgaattcgaaaataaccatttccaatagttgtcctcctcattaagctacgtcgagagtcctcttcatcctctgccgcactaaatctaaaggaaattgcagatcttgttttgcataagtatatgcatatcaaactcaaaagataaacaacatagggacaaacatcaaaaagaatgatatatgatgggtactctctacatgcagcactttgttagcctcttctggcctttgtaaattctgacagtcttagaatgactgagacaggcggttcgggataggggccagacacggattatgattggtagtttacttccaatatttttttatctaatagaatgacatttttcaattatttactaatcataaattgccgccacaaaccccttaatttgaacaatctggacggtcatcccataacaaggagatcaagtctatgaacaatgagaataatcagaacataatttgttatgattgagtcaggaaatcctataagtaagaaactttagccattaagttgttgggaaaatgattcgacgtggaggaagtaatagataagtattttaaaataggcacttactggctttcatggtctgaagatgaagcagtccttccagtatccattccagatttatattcaaatgaaacatactgctgaccatttggaacttgggactcttgatgctgcaccagtgcaaaacatagttagggaatcagataaattactaatctacaaatgtttaaacagtgaaaggggaggaagcttttgtaattcaggtattggcactttggcaggcagatggctcacctggtctataacagactcaattttttccttccacattagtgcttcctgaatgttgaacgctgccatctagcaagaaacatactccacattaacgaacccaaaagcatgaaattgccaagtaacacgaaaagtccagtgttagctaatcttaaagtaaagataacataccgtaattctatgactcttttcttttttgttatagacagacaaaacgtaaaccatctgcaaagtggagccgacaagcccaaaagagattgtatatgcataagtgatatgtttataagaaatctagcattagataactcatgtaacacactcaatggaacacatcacatacacatcaataagcacttcaagtatcaacatggtaatagaaaaggttaaaacgaagactcacatgtccatgatgtgttttcaagcctcgatcctcaactctgcagttaccatcaattaacatggtcttgataggaacctattttaacattccaaaattcatctttcagctaaaacctcgcaccatttctccagctcataacaaaggaaatacaaattgaagcagacagaacaaaattcgctaaagctgaggtataatttcacctgataatcctgaggtttcttcttgtaatacgccaaaagacgaggctccaacacaaaatacctcatatgaatatacgatcgtccgatcttcctccttccatacctaaccatccatccttcgtacactaccttagacattgtttctgtccccagaaattacaaaaaatctccaacggggacgaacgaaaacaaatcaaatggcacaaaacttccccacggaaatcgaaatcgaatctaattatttccgcgggagattcatcgaattttactaaacgacctgattgttcatcggcgctccggcgccggaatctggtgttggaattttcgcagattcgtctctgcgattagcgaagatttatgagctcacagattttcaaaattccggaaaaaataaaatcaaattttccacttcgacgaaaaacaagagaaaaagcaattcaactttgacagagaaaaaaaaagaaaaaaatccaaagctaaattaatattttctataaaaaaataaaacagcagagagagaaatatctgtgtatactcaaaataaataaataaattaaaataactaatcacgccaaagacgtaagtttagtcagttaaacaaacataaatgatgaataatgttttaatttaatttaatggaggagtcattaattaattaaagtcatgccaaatcagttcaaaaccgcattttggtattttgtcgttaggtgacgaagcaatccattgagaaggtcgctgacggccatcttattccgttaggcagagaagaaaacgacgccgtatcaacaaaatagctgacgtgttaaccacatacacgtgaaccacaataattggctgacgtctttattcttagtttttaagtaagacaacagtacaacaccacaacatttatgcaaacatacaaaaagttagtcttttccttttcaacgaaagccaaaacttcaaagttattgatcaacaaacttcatagcaattatgtaaacgagtcatatatgtaatccagtgaaatttcgaatgtaaccatttaaataaaatccaaggttcagcagtgtattgcatattctttttttacaaacagaaacagcaattttttacagttggggttaaaacttattaccatgaatgtgattgaaaaaaaaaagtcttgtaattggacagaggatttgggttttgtttggtttagtaaggtgcaatgatagattctatgagttcttgaagaggagcgagttctttcttgtcaatgagaacaaactcctgcaaaacaaaaccagaccaataaaaatcaaaaatcaacaaactcagtgactgataaaagactagaatggaagattaatgatgagtaaaagagggtttatagatacatgagtgaagaggatgaagtgtttgaagcaagtgttgagatgagcttcctctttgagactaactattttctggaaatgagagtggtatatgtgtgcgtaaactcggaatagtcgtttaaagattgtcttcaccacttccttgaagtttggaggaaaagctgcacctgtcagaatttaccatggattgagaccaatgtctttttatccataatcatcaaagatatgccagagtaaggttattttaccaagtttttgaggaaatatggtctcatcatcgagttgtgtctcgatccaatccatcaagtattcaacatactttggagctgaaacctcaataggcttcttgatttgtacaccatcggcccatctgtattcgtacctgaaacgttgcaaccgacgcatttcaccaatggaatagttacatatgagtcagtagttgatcatcgagataattgtcactcaaaaacaaagactcttttccactttacaaatgcccatattgctccagcagtttcaaagttttttgtattcaagatcttaagagaaaacagtgatcaaattactatatcaatcatgagcaccaaaattacttatataatgaagaagagaaatctgtacttgggaccagcagtcattgtagaacagttctccggggtgcaaaactcggtaagtgtaccaaataacagattcacctgattgaagaaatccacagctgaagaaaaacaacaacttaatcaacagagtgaaaccatgaggaaaaagtgatggtgtagttataagctcactgttaactgcaagccattcgtttaaatcctctcccggaggaagtttgacggcttctctaagattaccactacctaaagttgcatctatatgctttcgaagctctgctccctaaaaagatcaaaacaacacgctttataaggctacaaaaacatgaatcacatttgtaaaagaaacaagtcaaataatcgaatctacaaaccttggttcctgatggtgcgctcttcttaggacggaaagtcttttgatttctaatcagatgaacataaacaatgcaaattcatagaatcagataagcaaattctacattaacttgaacaagattttgacaagaatcattcaggacacattgacaatggtagtaagttaacattggttccatcaagttctgaataatagaaaaattgaacaatcaaatcttcattcacaaccattactcagcaaatccacaaaaatcaacatattgaaatattaatacccaatcaggaataactattcgaaagatctgagataacaaacaatctcgaaatctctagaaaaaatactctcttttttcggacaaattacggagaggaatcagtaattcaccttccaagcccgaatagactcattgctttatcggagtgagacacgaactcgaaggtgactcttttatattgcaatgttttcttcgattctgatctctctctgcgtaaatttcacgatcgcagaccaaaacttgaagacgactaaaaataaaataacattcatttattctttattttaagagttcacacaacacaacacaaagtaaccattttgaaaagtttcgaattacaagctctgtcaaagttcaagacttggataattattaacggtgagataatataagatcagcggaaattttgtttcttcatcctcgtcgtgtgaagaagaacagagagattaaactgtgtctgtagcttttgtgggctgggtaggagtttgggtttcaggcccaatagtattcctgcacatgaagaagaacagaacagagagtgtgaaaacaaaataaagtttcgatttgtttagttgttaacttcacttacttgtgaggttgatcctctgaaatttcatctgtaatccttgctccaatcctcggttcatcttctctagctttcaatttcggacatttctcaattgtgcatttctccagattcgggaaattagctccaagtactgataaaacaggcaaatcaagaaggtgaagcttacgaagcttcgataattctcctgcttttacttcaaacaatctctccaacttatcacagaacttcacacgaagaatctcaaggttatcaggaatctccgggaatagccatttgatgcttggacaacaatctacgcttagcttcttaaggttcttgaaaatgaatcctcctttactactgtataagcttgttagcaatggaagatttgagatccaaagagtctgcaatgatggtgatgatgatttctctttctctagttgttcatctgattcgaagagaacatccatgttcttgcacctctctacccaacaaccttttaccgatgccatctgcaactcgtcgaagagagaagatacgcttttggatccattctctgctatagagacatactctgctttggctatatactctgttttaagatcagtggatcttttgatgtcaacaatatcgatattcaaaggaacttcaggatcaataactctgtatctattgccgtgataaagaagtttctcgcgggttttttcccctacattagagaagctagagccctctgacttacttgttaaacactcttttatttggctccactggtctcgctctatacaactcgaatccgcgagaacaatacgttttgaagaacagaggatgctctgttttggcaactcaggaaacgttttcagattagtcccagagagattaacctcgcaaaggtaagacatactctcgaatgattcctcgattttatccagattggtgcatcccgaaacatcgaagatcactagatgtgttagcttctcaagatttggaagagcctttagcttagaacagtttcttaggatgagctctttgaggttagatagctctgagattttgttaggtaactcaccaagattagtttccgaaagattcactttgtggaggcaagacagattctcgaatgatccctcgattgtttccaactcggtgcagcccgaaacatcgaagatctcaagatttgttagcttctcaaggtttggaagagtctttagcttggaacattttcttatgatgagctccttaaggttagatagctctgagattttgtcaggtaactcactaagattagtttctgaaagattcacttcatggaggtaagacatctccccaaaggatccattgatattcttcaacttaatgcaaccagaaacgtcgaaaacttcaaggtgtgtcagtttctcaatgcttggaagctcttcaatcagtgagcaattccttaacagaagcttattgagattgacaacatcagcaatcgtgtcggctaactcgggaagacttgtctttgacatatcgaggatcctaagctctttcttctcctctaaacacacttcaagcatctccactaagtctgtagcaccacatgcatcaagaatctgaagattagtcaaaggcctaagctgtggcaatctcttaagccttgtacagtttctcagcaagagccgggtcaagattggcatagtactgaaatcgttagtagagtctttgagatgaaatatcggcagacggatgattttagtctctgagaagtctaggtgttcaagcagctgaagctgagcaaagttcttgttcttgcctttatagtccttccaatctttaactctatcaaagtaagactcaagtttcctagctccgtgaatgtcaataacttcaagttttcttgtttccacaatgaagttaggcagatcttgtagctcagagcagtgccttaggatgaagcaacgaagcatgcttagcttttcgattgtggaaggcgaagatttgattgcaagtcccgaaagattaaggctttgaagctgagtcatgttcttgaagaaatcatcagggatgttaactagagagctagcaccagagacttcaagaacatgtaggccttgaagaccactgagcttatcgatgttatcgattagatcacagtctctgataacaagtactcggagtttctttagcttagataaagacagaacaagttcatggaacgttggctcaaagaggactacaacttcaagatcttgcatctctggtttctcaaagaacttcccatgaacctctctacgtaaacggtttccgctagcgataatcgtcgtgatattcttcttcttcgattgaattgtctgtatcatatcatcgatcaagatgattttccctagcccctttctcttgtctccaccgtaaactctgtcaaatccaagagaagatcttccaaagaatccacaatcttgaagatctaataggttgctcatggagaactctggaaccaccatgttgtcttcttgtattttcaagattcctctgttcataaagtccattaaaatggaatgtccttcttggtaagctttgtcaactgacttaaccggatcaaaatacccttcaagcatccaatgcactattaggtcacggtagtaagcgcatccagagtacttgtagaagtccaagatatgccaaaagcaagcaatcaccggacgtttgaccgtctcgtcaggctttaacagctcgtagcttaattgcaagacaggattgtagcggctgcgatctatagcgttcttggaagcagctgcttcatctaatgacttggaagatagaatcagttctttaaagatcttcctctgcttcgcagacatcgacttaatgctgtttaaagacttgattaagacaacgatcgcagctggtaagcccttgctcttgcttaaaatgcaagacatcaaagtaggttctttgatctctttgttatcgcaaagtctctttagcagaacaggccaatcttcagaggtaaatgatgtaagtaagtcctcggcatcgtggagtaagtccaatgactccttttctgtaagcggaccgactttgatcgttgtggattctttctcctctctttcatctcttcttgtgactagaatcttcacagccgagtactccttaagaaaatcttggaggtttaattcttgcatcacatcttcttcagttgtcatacttccttcatcatccaaaatcaacagaagattatccttcttgtgtttgatcatctcttctttaatcttctctttcaagctctccaatggataatcaagctcatcaggttcttcgccttcttcaaactcgtaaattatcgacaactgagcagctagaatctcgtaaagcgacttctcgtcttcaatctttttgttcaggtgtaaccagaggacattgtacttttcttgagtaacacgttggctgacttcttttgcaagccatgtcttccctataccagcttcaccaacgaggacggtttttgaaggtacaccgtcttgtcccaatgaatccattatcttcttcagaatctcttctctgcttgtttgatcttgcttctccatctctaggaaaataaaaaatgagagaggaaatatttaaacctttgatttgagttttcttgaagagatcattgttaaacaaaattattgagattgctactaggatagtaactttatttttatgaacttaagagatgtattcagagagtataccacactacccctatatatccatgcaatatatgacaaatatcaactaacaatacaaaactaaaatttaaaattcgaaacaaagagagaggtatgagaagaaccttaattgtttagagtgacttaatcagattagttttctccactgatagttttttctttctagtttttgtttatgttttgttttgttatccttcgttgattgattcacttatttatacaagtccagctccgataacttccatgtcaagcctatcctgattttgtaaaacaacaataacaaaattcaagttttagattacactctgtcgaaacaaaaacgccaagtataaatattagattcttccaataattattcacccttattatttcagaattcagagtaacaattatgcccctatatttttcgaatatatgacttttggaattgtttactacacaagcaaaaacttttctttccttattacatacaaaggaaaaagttacatgctaatcacatgtattgctctagtttttttgtcttttgatgatcctttgttctacttatgtttggtgatatgtgatacaggttttacaaaagtgagggtacagatgtttaacttaacatatttctagggagaatctgccacttctcttaagctgaaaggaaattaatattctaatactgtttcattacttctttcaaaattgaagtactttgaaagatcagtattctttaagaggaattttcacacgtgatagtaaaaaaataccattatcatttttccaaatttccaaaataactagtagttttagatatgtataagtaaagtgtctaaaagcttagaaatgaaaattatccaagaggtcctctgtcaaatcggtagttcaagcagcacttccgcaatacgctatgtcgtggtttttaatccacaaatcatcatcaacaagctacgaggatcaatctcaagaaaatcgtgaaactctaagatgataaaaatatgtattaaaatctctttttaatctttattaactgccataggtttacactcacacaagtgacaactcttaacagtttctagaacaataaaataactttatatagtaatcttgaatagcttccttatatcagagagtaaatagtaaatacatagatattgcgttagaagttagaagctctgcttcctatctatgtttccaatttcatccactttcacaggctcaatcttcgccagcattcgagcagccaaaggaataccacaagacttatccataagctcttgtttgtatcttcccggatacctcggattcactttcggggctactgcatcgcccgcatttgtggctactgcatcgcccaaattcgtggctgctgcatcgtccaccttggtgggtactgcatcaatgtaaatctcccacaagctctctgcatcggatcttggaaacaaacgctgcagattctcttcttctccgactatcgccttcgccaatctctcgtctctgctagtcataatcactttcccaccaaaccctttaggaaacccacaagaaagatgtgatttttcctgttgcttcttctcatcatcgagcctttgatcccactcgttgtcttcccaaacatcatccaacactatcagatacttcttcccaatcagattcaagtgaagagcatacaataatcgagcaagctccttttctttgaccgtctcttcctctctttccccagcttcatctttgatactcttctcttcttctgcttctgttttgatgtgtttaaacatctcatcttcaactccaagggatctcaagatcctcttcacaacatctatcttgggatcttcgtcttcttttgtttctttgctgtacatagaaacccatatcctcgggaaataaacttgcttaacatcttcgtcgttgaacacagcctgacacaatgtcgttttcccaactccgtatttccccacaattgctagagtcttgaactcttcggattccttttgcttcagcaagaagttcttcaagaacagtttctcgttaatgaaaccacgaatgaggtgatccggaagctcagagcttgtctccacacggttcgccttaggccgcccttttttactgctgccgctgctgttacgagttggtgatgaatcaccatgtgtggactggtttccatgcttagaggaagatcccctctgttttccagacgaccatttctcatattcttcattgaaggaagacttgattttctcgagctctttatcaaattctgatttagactcgagcttgtcatcaatttcagatatgaacttcttagcaatatccataagctcttcttgtgtttctgagaaaaaaacactacaatgggaagaatttctgtgtttcaaagtctgcagctttcactttggggtgacacaaatatataacaagtatacaggtaaaagtgtatttattcagtcgaattatctttctctgcaaacatttaatccccacaagtaaggaataaagcaaatggaattaaaaaggacaaataacaaaaaagagaaagataaatatttgattaagagcaaagcataaacctgtggtgtgacctcaactacacttctgttttttttctttttgtgaagcacgtttaactaacctgaactgtctatgaatgctactgtgaaatcccgaacccttttaatgtatctctgtaactctaaatcacaagggcttcaggtttggttcatagtgcttctccaaacaagacaggaaccatgttctgatttgtgctgaatatttcagtcacattcacaaattccatcaaagtaactatctcgaaatgcgtctcagatgcttaagatcctcgtggtgggtagcattacatagctgatgatttattgtcctccgaacctgcaaagaaaaatgataaatctaactgttctctatccactttgttctaaagaatataggggttgccattgaataacagaaacattttctatctagagaaacattaacatgagactgaaatgagtgttggagtgcaagctagttatatgtaagataaaggcaaggtaaatgctcagactagcttctatttgaaatactaagactaacgtaccttatcattgacaaagaaaacggatagagaagaactttgcacagtgatatagcaaaatgttaagactaattgaatttgtacctttgcgcacatggagaagatgacttccaaatttgccacaatcatgtgaaatgaacaaaggaaaactttttaggtcaatggcattatttaaatgaggcttcttgttaaaaccagagcatatctcactgacttgtctctgcaaccccgcgatttgaggcatcaaatcactccaaccattggttgagaggtttttaccaaagaaattaaaagcaccctttctagttgcttccacagctgaaaataaaatcagcagacaaaagattactacatgacctgtgcattcaagttgccaaagacccgaatcaagaaagttcaaaactaagagtttacttggtatggagaatacatatttatgaaaaaatgtgtgagagaaagagagagagtctgaggtacatactgttataaggagctgcaagaagaaaatttgtgggaagaccaatgccgagaccagcaagtgttataccaacactaaaaccaacaccgcagccagcaccgacataaccaatgacctcagggccaaaaccaggtccccatccgacgccacaaccaatcccaatccccattccccaaaatgctccataagtaggatgcacaggattccatttttcatatctccgaaatatacctttaatgatcatcaagacctgcaaaattggtaaagatttgaaaacggaataagtttacattgacccaactaaattatctttcagtacccactgaaactaaatcaaatccaatgcacattgaattgagaagctgaatcaatggatattcaacagtgtcaccaacaaaacataaagctcatatttttcccacagattctctcgaaacccccataaaattcgaaccttttcaggatcgcgaacaatccaataagtactaatcaataaaccaattccagctgaaacctggggtatgtataaacttggataaacctacgaaatagaacaatatctacaaagaacaaaatttgtaaaatttaccatcaagagatttgctatttcgattcttctctcttctttgttctcaccttaattcgatcctcaagtgcacacactcttcgttcgatttcttttgttttctcagacgaattcactaagagaaccagtggatcaaaaccactcatcgttttacgcttggattaaaaaataagaatcggaccgaacagacataaccggtacaatctgatccggtttactaataaaaccaaactacggcagcaacatatataatcgatttcagtatccttcttctccggcgttcgatgcctggttctcggagtccggcgtttcgaaaccctaaagtttgttcagattcgtcactcaaatctggaaggctggaacaaagctcgcgaaatctcaagaaagtggtaatgcacgattctctcaggtgaaagtgacgacgatatcagtggtggctctgattgagatttttgctcacaggatgaacacgatcaggttaagcccaaaaacaactcaggattaatctgatcttagaagctaaattctctgttttgaaattagagttagaaaagttagcaaagctacttctggattctctggtttgaatatggagcaggagcacgaaatactcaggcagtaaggcaatttaggttacatatagcaaattagggttttaaagaattgagacgagttgtggattatgattagtcaacaataaccaaagatgttgaagacaaaagacgagagatacaatgtgttacacaaggcaagaggtgcttgttttggtaagaatcagtgtggctctagaatcttccttggtggtcctgaattgctctccgagtccgaaatgagccatcaatagccaaacaaagttgatcagttcaccacctttgttgagttgagctgcatgttgtttagaatcacagtgagttgctgcgtagcaaagcatctccacccacactttgctcactactttccacattgcatcattgcctctttcatttgttatatgcagaagctccttcgctagcatgctcgcttggaacaacatggacttgctttgataccgtctggcgttcccattccctagctcaaattccgtaaaggaatccacaattgctgcacaggccttctttgcatctcttgaaccctcaacatgcatcttctgaaacagctttttagcctctttagagtttttggcttctgctatagcgtctttgaattttatcttatcaattcctgcaactgttgacataagagaggattgtgcgactaagaggtacatcatgtagtctgaaatggttttgctgtactctttgcttctgacatttcttgctgcattgtctacttctgtttggtgtaagagctcagttgcaacgtgccacaccagaatgccctgatcatactccacttcagtgacatatggcaggagtttctcataataatcctcgatttgcatatcgcgcagaatccagtcgcctctagccgaatatatatggctggcactttccgatccaacaactaagagcgatctatgcttgacctcttcaaatatgaattcccagagctctttggtgaggcgtgtgcgggatgtgaacactatctcatttacctgatctgagatgctgaagaattctaggagatagttgatcaacggaattcctaagcagaatctaataaaaagcctgaaagggtaaagagtccgacgagtccacggaaagttgatgaacagatgaatcatcttagagtctatattcttgcggatgccattcgaggctttggaaactaacttcgttcctctgatgatgatatcaacaacaaaatcaatgtgcaaggttcgaatgatggcgtcaacggaacaatgtatgtaaccccttgtgtaatggatactcttgggttttatcttcagagaggagccaatcaggttgtatgcatatacgtactcagaccatctccgaaatataaagagtctaccaggcaccttgtgacagagttcttcttgctcgtgacacatgcatttcttccagttcaggtccctgaaactgaggagccaattgagaaatctgtcaaacctggtatctttcttatccagctcctccttaggcttccctaatctagcaaatgtccagtcagatacacagaatatgaggatggaaatgaaatcgagtgcgattccaccaaagatcaaagcatatgtgaggcaaacatcaaaaccgtcgtatccatcttttttcgttactttgaatatgtaaagggatgaaaataggcatcccaagcctatacagcggaaagcagctccgatccaagtgtggaggatgtcaactttggtgaataaagttccaaacatatcaaagatgtttgggacacatggaatattaggggagtgataatcctcagtctctcgcttcagaccattctcattttctttgcccccttgaggaaacgaacgcccaacaagttcctgatcctgctcttgtggtcatcgtatctcctggcagatttgtctgcgaattttgcagttgcattgattgccaagaaccaaggtaaatatcttaaacctgatgatcctcctcaaaacaagaagctcgtcgccttgtgggcacctttcttgctcttacaccttggtggaccagacaccatcactgccttttccctcgaagacaatgctctctggaacagacattttcttgggcttgtctttcaggcgcttgcaggtgtatatgtagttgtccagtctctacccaatgtactctcggtgataatcttgttgcttttcattgctgggacttctaagtatttggaacggacaattgcgttgtacctcgcgagttcagacaagtacaggaactcgatgttgcaggcgtccaattcaaggtttgactacaccgatcaaacaagggacttagacatggacacgaaacttgcttctgagatgaacatgaaggagcatcgcggacaaccaaaacctctgaagttattgcaaccacataaagagttaacccaccttgagattcttcaatatgcattcttgttcttcaaaaattttaagagtcttatggtcaataacatatttagcttggagctgcgcgatgaaagcaaggccttcttcagtgcattgcaactaaaagatgaagctttctgcattatagaagccgagctcgattttatctatgaaggactgtatacaaaaggttcggttcttcatagttgggttggacttgtgtcacgattcatatcactgggatcccttctgtcagccttcaccatctaccattacagacacaataagatccaagaatttcacaaagccgacatcgtgatcacctatacgttgttcttagttggcatagctctggatgttatatccatccacatgttcatggtttctgactggacaacagccatccttgctaagctaaaggatgaccccgacgaaaggtattcagggaaagaccacatactcaactggatactttttctgaagaggccaaagtggaagtggcaaacatgtcgtgagggagatcagcaggaggtgcttaacacaccgtttctactcagaagatggactggaagcatcacaatgttaaactttctcacatactccatgaaggcagatacagaaaggatccacgaccccaggagtagagcatgccagcttttatggaagatagcagtttgccctttcagtttcattttctccatcatccagacttggtttagtaacatagccaaatggttttgtgctcttcactggtatatcatccaccatgtgattattctaccgccagggcaaaatcaagttgctcgttctattatcggcatcttcaaggcttttgttgagttttggttcaatgtacctaactttttcgtgtatcttgtcacctccgtcatcaacttcctaggcatcaatgatctgttctatgagataagactggtaagatctgtacaccgtgaacccttgacaagaaacctatggtctttcatattttctgagctgcaaaaaaattcccagattctatacagcctggagaataccacaacaaaatcatcggctaggagagattgggcatctagccatacccagattcaaatagcagaccatgatatgctgctacattacataacagatgttgattatgaacacagtcttttgatttggcacatcgccacagaactctgttaccaagaggaagattctgctaaagagaactgcgacaaatctgagtatcacactaaccgcaagatcagcaaaatcatctcggactacatgatgtatctcttgatcatgcagcctaagctgatgtcagaagtagctggcataggaaagatcagattcagagacacattagccgaggctgataggttcttcaagaagatgggtatcatcagagactctagaaatgtgaaattagccagcaaggaaattctttcagccgatacaagtatcgaacctagggaagtcaaaggaaatcatagcaaatcagtgttatttgaggcaagctcactggccaaagaacttcagagagtggaaaagaactttggagaagacaaatggaagatacttagcaaagtgtggttggagttcctcttccatgcagcatcacattgtgatgcaacaacacgtatggagcttcttagcaaaggtggggagttcatcaacttcgtttggctactaatggctcactttggcctagggggttgatttgattagctcagatcaagaatggcggccattcagagccgccacaacttaaggtttctcaaattttcttctgtttacatgatttgtgtgtttctactattaagtaagcttcacagcctaatcaaatgcaaaatcctgacaatgaagcaaactcatacgggttatcactagcatcttaggtattgtcacagtgtaacactatcatgatccaacagaaactcactaccaaacgaaagaggaaattctcagatcaaaaaaggcaaattagattcgtgttacatacctaattcgtagttgcgctgatataacccagaacgattgatcaaactttgccaaaactggaaaacgataacacgaaatccaaaatcttcgtatcatagtacatcaaaattcgccagtaatcgagtacaaagagaaaattattcacctcgttaaatctttccgtcattttcctcgctcttccgatcggagaatcctcctttgaatctcccgacgaggaaggtggtgaccggagagccgctcgttaatcttcttcgtcttgttcaaaagtgcaaaaattaattttaggaaaaccattgaaccggatgaaccgaatgcgtaccgaactggattaaagcggtattaagcaattggtaagaaccttatccattttctcccactcgaaagtcgaaacagaacatagaacgaaagaaagaatggcttctgtaccatgttccttcaagctctctgctcatcgtagatcttcttccaaggtaatcatcttctctctatctccttcaatctgtgtctctgtatagttcacttatgctgagtcaactcgttctctcttggtatcgatcaaaacttagtcaaatcgttccttccattttctttcagtttgattccactttaatggcgtcataatcatctcttaaatcaaacaatgactccactatctcgtttccgatctcttgttacataaagttttctgtagcattgagattgtccttttcggaattgcttttatttgcgcagcttgatggaaacaacaaacagtgtagtagtttagtagaaagactgagagataaaacgaagagtcaagttcctaagtccattacttgcattaaccgcttagagatatcgcgtatagcaccattacacgcaacgatgaatagcccgaaaggatttggacctcctcctaagaaaaccaagaagtcgaaaaagccaaaacccggaaaccaaagtgatgaagacgacgacgatgaagacgaagatgatgatgatgaagaagatgaacgtgagagaggtgtaattccagagatagtgaccaacagaatgataagcagaatgggatttacagtggggttaccactcttcattggtcttttgttcttcccattcttttactatctcaaagtgggattgaaagttgatgtgcctacatgggttccgtttattgtttcgttcgtcttctttggtacggctttagctggtgtgagctatgggatcgtgtcttcgagctgggatccgttgagagaaggttccttgttaggctggaacgaagctaagaagaactggcctgtcttttggcagtccttttggaatt

SEQ ID NO: 596 - DNA, 96574 bp, Arabidopsis thaliana
aagctttagcctactatttcggaattcatcatcaccatccacaaaccgttgcaagagggacccaggtactagttctttcatcacgaaataaaacaccatactgtagtgtgttgatcctggaacctatataaacaccagtattaaacctatataaatatgactttggtttgtactcaatgttaggaatcttaatgacagttgatgggctaagcttacttgaacatttaccaccattgagaatagacctttttctgcagcaacctgaacatgtgtatcaaaagactcaataatctttctaagtgattaagattcatccacaagctaaggaatagcatgggaagaatattgagtcattgagtggaatattctctccattaggtaactaaaattaaggtgcttgtgtatcttacttgtgctgcgcagcctttgcgtctagcaacatgatctattcttttactgtctttgaaccagtcaacagcaacgagatccataagatgcttgccagcaggtatcttccgtatagtgttaaatggacagaaacaaaagttagttggctgtaagaacctaaccattctatattaataagatgaaaattttgccaacctttcttttctcttgaccgaaattcttgccccgaactttgaagttgttaccatcagaaatcctccagcagttacgggcgttttcgttttcattgcgctttaggttacccgagaagcatgacagatcaatgttgtgagcaggttcttcttctgtagtttcaaatcgcaccaaaaatcattgctattagatatcctaattggctcaaatagcattttcacacttactgatagggtgcacacctggtctcttgacatcggtctctggtttacttgtttcaggctgaaatagtacacaagaatgacgattcaatttcggatgctgattaagattttaaaatcaaaatgcttgatattcaaacctcttgttctgattcagcaatctgaaattcatcatcatcatccgagtcttcatccataagcaaggagtttctgttaacggaatttgtttgatcaagagaaaaggcagacttatgcagagacttcccactcttagtcaagctcaaggaagatgatgccatattaaccatgacagggatccgggtatgaacacctctctcatctgtctgtgaaaaccattcccgcaaacctgtgaaaagcagttaagcacagtaccatgaattaagacggaggatttttaaatagccaatgaaattacttttctgcaaggacctaaggaaaccagtggaaaggaagcatgaaagcacttaccagcaacactattcagcatttgaagaagacaatgttgttgaaatgctggaagatagcctgcaccccacccttttagatcaatttgtattagatgttgcacttgcgttctaggcctcccattccgaggctttagtggggaaatattatatcctccacctacgcgaaacaaaaatagccgaggttagatagtagtacatcaaagggtagaagtattttatcaagcggttaaaaccaattagtttgcttaacgtactctcaagatgagcccgaacacatccaggttgtggaccacaattctcatgctccctagaacggaacaacacaacttcacagaaagagcaagataaataaccaacaagttttataaaactaatctttccagcagattctagatgagtaaagaggaaagaaagataccataactcccatcatcattacggcgccaatagcggacataacagaggtcgcgaggccacacaatcctgaaccatttgatttaataatcaggataaagcagagctcgtggaaacagtgaactaaatttcaaactggaaacaggaaatatcacaaatgaaacaaaataataactctgagctgtttttctgtccccagtcttatacagcattgtattatggcaaaaaagaaagacacctttgagagacacagtctattttcctaatgatgtagtagtaaggtttaattcatttggaataaaatcatcacattttgtcagcttgactataagtagacaatattttttcaggtgcaaccttacattggaaaccagtcgagcagaagtctgtgatagaggactgctgtgtgaccatcgacctcttccactaagctaccaaactgaaagctgcagtcccacctgtatcgaacaggaacacagataacttcagatacagataaacactaaaatacaagacttttggatacatactttaaaacattggacaagcaaaactgttttttcagggaaagaaacagaaaaacatagaaccaacattaaaaggcataaaactacaaggaaatatttaacaatttttccaaataatagtgtctaactgcaacaaaatgaagaaaaaggaacactgtacaagccatctcctacagtaaggaaattagtcgggaaaatagaaggcagagaagcacctactcataacgagtgccgtccatgctcatcagaagctcgaatatttcctcacatgttgcctccactacaccaacagccttcattgccctgctacagcttcttggctgcacatgtagcactataatgatggttcttgtctatatagagttactatgtaatcaaatgggaatcacgccataataaataaggtattcgagatttccgtacaaggtaatcaacttcaagaagctcttcaaaaatccgaagacctgccaaatgtgtagaaaaacaaaagttaattcaaaccaacttctaaaaagcaataatcaaatatatatgttcctaaaaaaggattaagagccttgagctaatgaaaacttgaaaaaatcactcaaaaacaattaaaaatgaaagtaaaagcaataacgaaacccatgaagatagaagattgtattgattgatcattaaaagcgatcttccagttcccagagcagatataactaataaaggcactggaatccacatgttccaaataagatctcataattgttgtagtttatcgaggggaaatagtatactaaattgcatttcagatatagcagcatcttctagagcccctgtaaaaccactaaccattttggcactgaaggagacgccagtgtttcctggaaaatgcttggttgtcggaattctggttcgccaactctgcatcaaattctttggtccagtcaagtacagattctggaggacctgcaagtttttttgaggtgatcaatcagccaggatcgcagtaccagattaggacacaaataagtgaattcgaaaataaccatttccaatagttgtcctcctcattaagctacgtcgagagtcctcttcatcctctgccgcactaaatctaaaggaaattgcagatcttgttttgcataagtatatgcatatcaaactcaaaagataaacaacatagggacaaacatcaaaaagaatgatatatgatgggtactctctacatgcagcactttgttagcctcttctggcctttgtaaattctgacagtcttagaatgactgagacaggcggttcgggataggggccagacacggattatgattggtagtttacttccaatatttttttatctaatagaatgacatttttcaattatttactaatcataaattgccgccacaaaccccttaatttgaacaatctggacggtcatcccataacaaggagatcaagtctatgaacaatgagaataatcagaacataatttgttatgattgagtcaggaaatcctataagtaagaaactttagccattaagttgttgggaaaatgattcgacgtggaggaagtaatagataagtattttaaaataggcacttactggctttcatggtctgaagatgaagcagtccttccagtatccattccagatttatattcaaatgaaacatactgctgaccatttggaacttgggactcttgatgctgcaccagtgcaaaacatagttagggaatcagataaattactaatctacaaatgtttaaacagtgaaaggggaggaagcttttgtaattcaggtattggcactttggcaggcagatggctcacctggtctataacagactcaattttttccttccacattagtgcttcctgaatgttgaacgctgccatctagcaagaaacatactccacattaacgaacccaaaagcatgaaattgccaagtaacacgaaaagtccagtgttagctaatcttaaagtaaagataacataccgtaattctatgactcttttcttttttgttatagacagacaaaacgtaaaccatctgcaaagtggagccgacaagcccaaaagagattgtatatgcataagtgatatgtttataagaaatctagcattagataactcatgtaacacactcaatggaacacatcacatacacatcaataagcacttcaagtatcaacatggtaatagaaaaggttaaaacgaagactcacatgtccatgatgtgttttcaagcctcgatcctcaactctgcagttaccatcaattaacatggtcttgataggaacctattttaacattccaaaattcatctttcagctaaaacctcgcaccatttctccagctcataacaaaggaaatacaaattgaagcagacagaacaaaattcgctaaagctgaggtataatttcacctgataatcctgaggtttcttcttgtaatacgccaaaagacgaggctccaacacaaaatacctcatatgaatatacgatcgtccgatcttcctccttccatacctaaccatccatccttcgtacactaccttagacattgtttctgtccccagaaattacaaaaaatctccaacggggacgaacgaaaacaaatcaaatggcacaaaacttccccacggaaatcgaaatcgaatctaattatttccgcgggagattcatcgaattttactaaacgacctgattgttcatcggcgctccggcgccggaatctggtgttggaattttcgcagattcgtctctgcgattagcgaagatttatgagctcacagattttcaaaattccggaaaaaataaaatcaaattttccacttcgacgaaaaacaagagaaaaagcaattcaactttgacagagaaaaaaaaagaaaaaaatccaaagctaaattaatattttctataaaaaaataaaacagcagagagagaaatatctgtgtatactcaaaataaataaataaattaaaataactaatcacgccaaagacgtaagtttagtcagttaaacaaacataaatgatgaataatgttttaatttaatttaatggaggagtcattaattaattaaagtcatgccaaatcagttcaaaaccgcattttggtattttgtcgttaggtgacgaagcaatccattgagaaggtcgctgacggccatcttattccgttaggcagagaagaaaacgacgccgtatcaacaaaatagctgacgtgttaaccacatacacgtgaaccacaataattggctgacgtctttattcttagtttttaagtaagacaacagtacaacaccacaacatttatgcaaacatacaaaaagttagtcttttccttttcaacgaaagccaaaacttcaaagttattgatcaacaaacttcatagcaattatgtaaacgagtcatatatgtaatccagtgaaatttcgaatgtaaccatttaaataaaatccaaggttcagcagtgtattgcatattctttttttacaaacagaaacagcaattttttacagttggggttaaacttattaccatgaatgtgattgaaaaaaaaaagtcttgtaattggacagaggatttgggttttgtttggtttagtaaggtgcaatgatagattctatgagttcttgaagaggagcgagttctttcttgtcaatgagaacaaactcctgcaaaacaaaaccagaccaataaaaatcaaaaatcaacaaactcagtgactgataaaagactagaatggaagattaatgatgagtaaaagagggtttatagatacatgagtgaagaggatgaagtgtttgaagcaagtgttgagatgagcttcctctttgagactaactattttctggaaatgagagtggtatatgtgtgcgtaaactcggaatagtcgtttaaagattgtcttcaccacttccttgaagtttggaggaaaagctgcacctgtcagaatttaccatggattgagaccaatgtctttttatccataatcatcaaagatatgccagagtaaggttattttaccaagtttttgaggaaatatggtctcatcatcgagttgtgtctcgatccaatccatcaagtattcaacatactttggagctgaaacctcaataggcttcttgatttgtacaccatcggcccatctgtattcgtacctgaaacgttgcaaccgacgcatttcaccaatggaatagttacatatgagtcagtagttgatcatcgagataattgtcactcaaaaacaaagactcttttccactttacaaatgcccatattgctccagcagtttcaaagttttttgtattcaagatcttaagagaaaacagtgatcaaattactatatcaatcatgagcaccaaaattacttatataatgaagaagagaaatctgtacttgggaccagcagtcattgtagaacagttctccggggtgcaaaactcggtaagtgtaccaaataacagattcacctgattgaagaaatccacagctgaagaaaaacaacaacttaatcaacagagtgaaaccatgaggaaaaagtgatggtgtagttataagctcactgttaactgcaagccattcgtttaaatcctctcccggaggaagtttgacggcttctctaagattaccactacctaaagttgcatctatatgctttcgaagctctgctccctaaaaagatcaaaacaacacgctttataaggctacaaaaacatgaatcacatttgtaaaagaaacaagtcaaataatcgaatctacaaaccttggttcctgatggtgcgctcttcttaggacggaaagtcttttgatttctaatcagatgaacataaacaatgcaaattcatagaatcagataagcaaattctacattaacttgaacaagattttgacaagaatcattcaggacacattgacaatggtagtaagttaacattggttccatcaagttctgaataatagaaaaattgaacaatcaaatcttcattcacaaccattactcagcaaatccacaaaaatcaacatattgaaatattaatacccaatcaggaataactattcgaaagatctgagataacaaacaatctcgaaatctctagaaaaaatactctcttttttcggacaaattacggagaggaatcagtaattcaccttccaagcccgaatagactcattgctttatcggagtgagacacgaactcgaaggtgactcttttatattgcaatgttttcttcgattctgatctctctctgcgtaaatttcacgatcgcagaccaaaacttgaagacgactaaaaataaaataacattcatttattctttattttaagagttcacacaacacaacacaaagtaaccattttgaaaagtttcgaattacaagctctgtcaaagttcaagacttggataattattaacggtgagataatataagatcagcggaaattttgtttcttcatcctcgtcgtgtgaagaagaacagagagattaaactgtgtctgtagcttttgtgggctgggtaggagtttgggtttcaggcccaatagtattcctgcacatgaagaagaacagaacagagagtgtgaaaacaaaataaagtttcgatttgtttagttgttaacttcacttacttgtgaggttgatcctctgaaatttcatctgtaatccttgctccaatcctcggttcatcttctctagctttcaatttcggacatttctcaattgtgcatttctccagattcgggaaattagctccaagtactgataaaacaggcaaatcaagaaggtgaagcttacgaagcttcgataattctcctgcttttacttcaaacaatctctccaacttatcacagaacttcacacgaagaatctcaaggttatcaggaatctccgggaatagccatttgatgcttggacaacaatctacgcttagcttcttaaggttcttgaaaatgaatcctcctttactactgtataagcttgttagcaatggaagatttgagatccaaagagtctgcaatgatggtgatgatgatttctctttctctagttgttcatctgattcgaagagaacatccatgttcttgcacctctctacccaacaaccttttaccgatgccatctgcaactcgtcgaagagagaagatacgcttttggatccattctctgctatagagacatactctgctttggctatatactctgttttaagatcagtggatcttttgatgtcaacaatatcgatattcaaaggaacttcaggatcaataactctgtatctattgccgtgataaagaagtttctcgcgggttttttcccctacattagagaagctagagccctctgacttacttgttaaacactcttttatttggctccactggtctcgctctatacaactcgaatccgcgagaacaatacgttttgaagaacagaggatgctctgttttggcaactcaggaaacgttttcagattagtcccagagagattaacctcgcaaaggtaagacatactctcgaatgattcctcgattttatccagattggtgcatcccgaaacatcgaagatcactagatgtgttagcttctcaagatttggaagagcctttagcttagaacagtttcttaggatgagctctttgaggttagatagctctgagattttgttaggtaactcaccaagattagtttccgaaagattcactttgtggaggcaagacagattctcgaatgatccctcgattgtttccaactcggtgcagcccgaaacatcgaagatctcaagatttgttagcttctcaaggtttggaagagtctttagcttggaacattttcttatgatgagctccttaaggttagatagctctgagattttgtcaggtaactcactaagattagtttctgaaagattcacttcatggaggtaagacatctccccaaaggatccattgatattcttcaacttaatgcaaccagaaacgtcgaaaacttcaaggtgtgtcagtttctcaatgcttggaagctcttcaatcagtgagcaattccttaacagaagcttattgagattgacaacatcagcaatcgtgtcggctaactcgggaagacttgtctttgacatatcgaggatcctaagctctttcttctcctctaaacacacttcaagcatctccactaagtctgtagcaccacatgcatcaagaatctgaagattagtcaaaggcctaagctgtggcaatctcttaagccttgtacagtttctcagcaagagccgggtcaagattggcatagtactgaaatcgttagtagagtctttgagatgaaatatcggcagacggatgattttagtctctgagaagtctaggtgttcaagcagctgaagctgagcaaagttcttgttcttgcctttatagtccttccaatctttaactctatcaaagtaagactcaagtttcctagctccgtgaatgtcaataacttcaagttttcttgtttccacaatgaagttaggcagatcttgtagctcagagcagtgccttaggatgaagcaacgaagcatgcttagcttttcgattgtggaaggcgaagatttgattgcaagtcccgaaagattaaggctttgaagctgagtcatgttcttgaagaaatcatcagggatgttaactagagagctagcaccagagacttcaagaacatgtaggccttgaagaccactgagcttatcgatgttatcgattagatcacagtctctgataacaagtactcggagtttctttagcttagataaagacagaacaagttcatggaacgttggctcaaagaggactacaacttcaagatcttgcatctctggtttctcaaagaacttcccatgaacctctctacgtaaacggtttccgctagcgataatcgtcgtgatattcttcttcttcgattgaattgtctgtatcatatcatcgatcaagatgattttccctagcccctttctcttgtctccaccgtaaactctgtcaaatccaagagaagatcttccaaagaatccacaatcttgaagatctaataggttgctcatggagaactctggaaccaccatgttgtcttcttgtattttcaagattcctctgttcataaagtccattaaaatggaatgtccttcttggtaagctttgtcaactgacttaaccggatcaaaatacccttcaagcatccaatgcactattaggtcacggtagtaagcgcatccagagtacttgtagaagtccaagatatgccaaaagcaagcaatcaccggacgtttgaccgtctcgtcaggctttaacagctcgtagcttaattgcaagacaggattgtagcggctgcgatctatagcgttcttggaagcagctgcttcatctaatgacttggaagatagaatcagttctttaaagatcttcctctgcttcgcagacatcgacttaatgctgtttaaagacttgattaagacaacgatcgcagctggtaagcccttgctcttgcttaaaatgcaagacatcaaagtaggttctttgatctctttgttatcgcaaagtctctttagcagaacaggccaatcttcagaggtaaatgatgtaagtaagtcctcggcatcgtggagtaagtccaatgactccttttctgtaagcggaccgactttgatcgttgtggattctttctcctctctttcatctcttcttgtgactagaatcttcacagccgagtactccttaagaaaatcttggaggtttaattcttgcatcacatcttcttcagttgtcatacttccttcatcatccaaaatcaacagaagattatccttcttgtgtttgatcatctcttctttaatcttctctttcaagctctccaatggataatcaagctcatcaggttcttcgccttcttcaaactcgtaaattatcgacaactgagcagctagaatctcgtaaagcgacttctcgtcttcaatctttttgttcaggtgtaaccagaggacattgtacttttcttgagtaacacgttggctgacttcttttgcaagccatgtcttccctataccagcttcaccaacgaggacggtttttgaaggtacaccgtcttgtcccaatgaatccattatcttcttcagaatctcttctctgcttgtttgatcttgcttctccatctctaggaaaataaaaaatgagagaggaaatatttaaacctttgatttgagttttcttgaagagatcattgttaaacaaaattattgagattgctactaggatagtaactttatttttatgaacttaagagatgtattcagagagtataccacactacccctatatatccatgcaatatatgacaaatatcaactaacaatacaaaactaaaatttaaaattcgaaacaaagagagaggtatgagaagaaccttaattgtttagagtgacttaatcagattagttttctccactgatagttttttctttctagtttttgtttatgttttgttttgttatccttcgttgattgattcacttatttatacaagtccagctccgataacttccatgtcaagcctatcctgattttgtaaaacaacaataacaaaattcaagttttagattacactctgtcgaaacaaaaacgccaagtataaatattagattcttccaataattattcacccttattatttcagaattcagagtaacaattatgcccctatatttttcgaatatatgacttttggaattgtttactacacaagcaaaaacttttctttccttattacatacaaaggaaaaagttacatgctaatcacatgtattgctctagtttttttgtcttttgatgatcctttgttctacttatgtttggtgatatgtgatacaggttttacaaaagtgagggtacagatgtttaacttaacatatttctagggagaatctgccacttctcttaagctgaaaggaaattaatattctaatactgtttcattacttctttcaaaattgaagtactttgaaagatcagtattctttaagaggaattttcacacgtgatagtaaaaaaataccattatcatttttccaaatttccaaaataactagtagttttagatatgtataagtaaagtgtctaaaagcttagaaatgaaaattatccaagaggtcctctgtcaaatcggtagttcaagcagcacttccgcaatacgctatgtcgtggtttttaatccacaaatcatcatcaacaagctacgaggatcaatctcaagaaaatcgtgaaactctaagatgataaaaatatgtattaaaatctctttttaatctttattaactgccataggtttacactcacacaagtgacaactcttaacagtttctagaacaataaaataactttatatagtaatcttgaatagcttccttatatcagagagtaaatagtaaatacatagatattgcgttagaagttagaagctctgcttcctatctatgtttccaatttcatccactttcacaggctcaatcttcgccagcattcgagcagccaaaggaataccacaagacttatccataagctcttgtttgtatcttcccggatacctcggattcactttcggggctactgcatcgcccgcatttgtggctactgcatcgcccaaattcgtggctgctgcatcgtccaccttggtgggtactgcatcaatgtaaatctcccacaagctctctgcatcggatcttggaaacaaacgctgcagattctcttcttctccgactatcgccttcgccaatctctcgtctctgctagtcataatcactttcccaccaaaccctttaggaaacccacaagaaagatgtgatttttcctgttgcttcttctcatcatcgagcctttgatcccactcgttgtcttcccaaacatcatccaacactatcagatacttcttcccaatcagattcaagtgaagagcatacaataatcgagcaagctccttttctttgaccgtctcttcctctctttccccagcttcatctttgatactcttctcttcttctgcttctgttttgatgtgtttaaacatctcatcttcaactccaagggatctcaagatcctcttcacaacatctatcttgggatcttcgtcttcttttgtttctttgctgtacatagaaacccatatcctcgggaaataaacttgcttaacatcttcgtcgttgaacacagcctgacacaatgtcgttttcccaactccgtatttccccacaattgctagagtcttgaactcttcggattccttttgcttcagcaagaagttcttcaagaacagtttctcgttaatgaaaccacgaatgaggtgatccggaagctcagagcttgtctccacacggttcgccttaggccgcccttttttactgctgccgctgctgttacgagttggtgatgaatcaccatgtgtggactggtttccatgcttagaggaagatcccctctgttttccagacgaccatttctcatattcttcattgaaggaagacttgattttctcgagctctttatcaaattctgatttagactcgagcttgtcatcaatttcagatatgaacttcttagcaatatccataagctcttcttgtgtttctgagaaaaaaacactacaatgggaagaatttctgtgtttcaaagtctgcagctttcactttggggtgacacaaatatataacaagtatacaggtaaaagtgtatttattcagtcgaattatctttctctgcaaacatttaatccccacaagtaaggaataaagcaaatggaattaaaaaggacaaataacaaaaaagagaaagataaatatttgattaagagcaaagcataaacctgtggtgtgacctcaactacacttctgttttttttctttttgtgaagcacgtttaactaacctgaactgtctatgaatgctactgtgaaatcccgaacccttttaatgtatctctgtaactctaaatcacaagggcttcaggtttggttcatagtgcttctccaaacaagacaggaaccatgttctgatttgtgctgaatatttcagtcacattcacaaattccatcaaagtaactatctcgaaatgcgtctcagatgcttaagatcctcgtggtgggtagcattacatagctgatgatttattgtcctccgaacctgcaaagaaaaatgataaatctaactgttctctatccactttgttctaaagaatataggggttgccattgaataacagaaacattttctatctagagaaacattaacatgagactgaaatgagtgttggagtgcaagctagttatatgtaagataaaggcaaggtaaatgctcagactagcttctatttgaaatactaagactaacgtaccttatcattgacaaagaaaacggatagagaagaactttgcacagtgatatagcaaaatgttaagactaattgaatttgtacctttgcgcacatggagaagatgacttccaaatttgccacaatcatgtgaaatgaacaaaggaaaactttttaggtcaatggcattatttaaatgaggcttcttgttaaaaccagagcatatctcactgacttgtctctgcaaccccgcgatttgaggcatcaaatcactccaaccattggttgagaggtttttaccaaagaaattaaaagcaccctttctagttgcttccacagctgaaaataaaatcagcagacaaaagattactacatgacctgtgcattcaagttgccaaagacccgaatcaagaaagttcaaaactaagagtttacttggtatggagaatacatatttatgaaaaaatgtgtgagagaaagagagagagtctgaggtacatactgttataaggagctgcaagaagaaaatttgtgggaagaccaatgccgagaccagcaagtgttataccaacactaaaaccaacaccgcagccagcaccgacataaccaatgacctcagggccaaaaccaggtccccatccgacgccacaaccaatcccaatccccattccccaaaatgctccataagtaggatgcacaggattccatttttcatatctccgaaatatacctttaatgatcatcaagacctgcaaaattggtaaagatttgaaaacggaataagtttacattgacccaactaaattatctttcagtacccactgaaactaaatcaaatccaatgcacattgaattgagaagctgaatcaatggatattcaacagtgtcaccaacaaaacataaagctcatatttttcccacagattctctcgaaacccccataaaattcgaaccttttcaggatcgcgaacaatccaataagtactaatcaataaaccaattccagctgaaacctggggtatgtataaacttggataaacctacgaaatagaacaatatctacaaagaacaaaatttgtaaaatttaccatcaagagatttgctatttcgattcttctctcttctttgttctcaccttaattcgatcctcaagtgcacacactcttcgttcgatttcttttgttttctcagacgaattcactaagagaaccagtggatcaaaaccactcatcgttttacgcttggattaaaaaataagaatcggaccgaacagacataaccggtacaatctgatccggtttactaataaaaccaaactacggcagcaacatatataatcgatttcagtatccttcttctccggcgttcgatgcctggttctcggagtccggcgtttcgaaaccctaaagtttgttcagattcgtcactcaaatctggaaggctggaacaaagctcgcgaaatctcaagaaagtggtaatgcacgattctctcaggtgaaagtgacgacgatatcagtggtggctctgattgagatttttgctcacaggatgaacacgatcaggttaagcccaaaaacaactcaggattaatctgatcttagaagctaaattctctgttttgaaattagagttagaaaagttagcaaagctacttctggattctctggtttgaatatggagcaggagcacgaaatactcaggcagtaaggcaatttaggttacatatagcaaattagggttttaaagaattgagacgagttgtggattatgattagtcaacaataaccaaagatgttgaagacaaaagacgagagatacaatgtgttacacaaggcaagaggtgcttgttttggtaagaatcagtgtggctctagaatcttccttggtggtcctgaattgctctccgagtccgaaatgagccatcaatagccaaacaaagttgatcagttcaccacctttgttgagttgagctgcatgttgtttagaatcacagtgagttgctgcgtagcaaagcatctccacccacactttgctcactactttccacattgcatcattgcctctttcatttgttatatgcagaagctccttcgctagcatgctcgcttggaacaacatggacttgctttgataccgtctggcgttcccattccctagctcaaattccgtaaaggaatccacaattgctgcacaggccttctttgcatctcttgaaccctcaacatgcatcttctgaaacagctttttagcctctttagagtttttggcttctgctatagcgtctttgaattttatcttatcaattcctgcaactgttgacataagagaggattgtgcgactaagaggtacatcatgtagtctgaaatggttttgctgtactctttgcttctgacatttcttgctgcattgtctacttctgtttggtgtaagagctcagttgcaacgtgccacaccagaatgccctgatcatactccacttcagtgacatatggcaggagtttctcataataatcctcgatttgcatatcgcgcagaatccagtcgcctctagccgaatatatatggctggcactttccgatccaacaactaagagcgatctatgcttgacctcttcaaatatgaattcccagagctctttggtgaggcgtgtgcgggatgtgaacactatctcatttacctgatctgagatgctgaagaattctaggagatagttgatcaacggaattcctaagcagaatctaataaaaagcctgaaagggtaaagagtccgacgagtccacggaaagttgatgaacagatgaatcatcttagagtctatattcttgcggatgccattcgaggctttggaaactaacttcgttcctctgatgatgatatcaacaacaaaatcaatgtgcaaggttcgaatgatggcgtcaacggaacaatgtatgtaaccccttgtgtaatggatactcttgggttttatcttcagagaggagccaatcaggttgtatgcatatacgtactcagaccatctccgaaatataaagagtctaccaggcaccttgtgacagagttcttcttgctcgtgacacatgcatttcttccagttcaggtccctgaaactgaggagccaattgagaaatctgtcaaacctggtatctttcttatccagctcctccttaggcttccctaatctagcaaatgtccagtcagatacacagaatatgaggatggaaatgaaatcgagtgcgattccaccaaagatcaaagcatatgtgaggcaaacatcaaaaccgtcgtatccatcttttttcgttactttgaatatgtaaagggatgaaaataggcatcccaagcctatacagcggaaagcagctccgatccaagtgtggaggatgtcaactttggtgaataaagttccaaacatatcaaagatgtttgggacacatggaatattaggggagtgataatcctcagtctctcgcttcagaccattctcattttctttgcccccttgaggaaacgaacgcccaacaagttcctgatcctgctcttgtggtcatcgtatctcctggcagatttgtctgcgaattttgcagttgcattgattgccaagaaccaaggtaaatatcttaaacctgatgatcctcctcaaaacaagaagctcgtcgccttgtgggcacctttcttgctcttacaccttggtggaccagacaccatcactgccttttccctcgaagacaatgctctctggaacagacattttcttgggcttgtctttcaggcgcttgcaggtgtatatgtagttgtccagtctctacccaatgtactctcggtgataatcttgttgcttttcattgctgggacttctaagtatttggaacggacaattgcgttgtacctcgcgagttcagacaagtacaggaactcgatgttgcaggcgtccaattcaaggtttgactacaccgatcaaacaagggacttagacatggacacgaaacttgcttctgagatgaacatgaaggagcatcgcggacaaccaaaacctctgaagttattgcaaccacataaagagttaacccaccttgagattcttcaatatgcattcttgttcttcaaaaattttaagagtcttatggtcaataacatatttagcttggagctgcgcgatgaaagcaaggccttcttcagtgcattgcaactaaaagatgaagctttctgcattatagaagccgagctcgattttatctatgaaggactgtatacaaaaggttcggttcttcatagttgggttggacttgtgtcacgattcatatcactgggatcccttctgtcagccttcaccatctaccattacagacacaataagatccaagaatttcacaaagccgacatcgtgatcacctatacgttgttcttagttggcatagctctggatgttatatccatccacatgttcatggtttctgactggacaacagccatccttgctaagctaaaggatgaccccgacgaaaggtattcagggaaagaccacatactcaactggatactttttctgaagaggccaaagtggaagtggcaaacatgtcgtgagggagatcagcaggaggtgcttaacacaccgtttctactcagaagatggactggaagcatcacaatgttaaactttctcacatactccatgaaggcagatacagaaaggatccacgaccccaggagtagagcatgccagcttttatggaagatagcagtttgccctttcagtttcattttctccatcatccagacttggtttagtaacatagccaaatggttttgtgctcttcactggtatatcatccaccatgtgattattctaccgccagggcaaaatcaagttgctcgttctattatcggcatcttcaaggcttttgttgagttttggttcaatgtacctaactttttcgtgtatcttgtcacctccgtcatcaacttcctaggcatcaatgatctgttctatgagataagactggtaagatctgtacaccgtgaacccttgacaagaaacctatggtctttcatattttctgagctgcaaaaaaattcccagattctatacagcctggagaataccacaacaaaatcatcggctaggagagattgggcatctagccatacccagattcaaatagcagaccatgatatgctgctacattacataacagatgttgattatgaacacagtcttttgatttggcacatcgccacagaactctgttaccaagaggaagattctgctaaagagaactgcgacaaatctgagtatcacactaaccgcaagatcagcaaaatcatctcggactacatgatgtatctcttgatcatgcagcctaagctgatgtcagaagtagctggcataggaaagatcagattcagagacacattagccgaggctgataggttcttcaagaagatgggtatcatcagagactctagaaatgtgaaattagccagcaaggaaattctttcagccgatacaagtatcgaacctagggaagtcaaaggaaatcatagcaaatcagtgttatttgaggcaagctcactggccaaagaacttcagagagtggaaaagaactttggagaagacaaatggaagatacttagcaaagtgtggttggagttcctcttccatgcagcatcacattgtgatgcaacaacacgtatggagcttcttagcaaaggtggggagttcatcaacttcgtttggctactaatggctcactttggcctagggggttgatttgattagctcagatcaagaatggcggccattcagagccgccacaacttaaggtttctcaaattttcttctgtttacatgatttgtgtgtttctactattaagtaagcttcacagcctaatcaaatgcaaaatcctgacaatgaagcaaactcatacgggttatcactagcatcttaggtattgtcacagtgtaacactatcatgatccaacagaaactcactaccaaacgaaagaggaaattctcagatcaaaaaaggcaaattagattcgtgttacatacctaattcgtagttgcgctgatataacccagaacgattgatcaaactttgccaaaactggaaaacgataacacgaaatccaaaatcttcgtatcatagtacatcaaaattcgccagtaatcgagtacaaagagaaaattattcacctcgttaaatctttccgtcattttcctcgctcttccgatcggagaatcctcctttgaatctcccgacgaggaaggtggtgaccggagagccgctcgttaatcttcttcgtcttgttcaaaagtgcaaaaattaattttaggaaaaccattgaaccggatgaaccgaatgcgtaccgaactggattaaagcggtattaagcaattggtaagaaccttatccattttctcccactcgaaagtcgaaacagaacatagaacgaaagaaagaatggcttctgtaccatgttccttcaagctctctgctcatcgtagatcttcttccaaggtaatcatcttctctctatctccttcaatctgtgtctctgtatagttcacttatgctgagtcaactcgttctctcttggtatcgatcaaaacttagtcaaatcgttccttccattttctttcagtttgattccactttaatggcgtcataatcatctcttaaatcaaacaatgactccactatctcgtttccgatctcttgttacataaagttttctgtagcattgagattgtccttttcggaattgcttttatttgcgcagcttgatggaaacaacaaacagtgtagtagtttagtagaaagactgagagataaaacgaagagtcaagttcctaagtccattacttgcattaaccgcttagagatatcgcgtatagcaccattacacgcaacgatgaatagcccgaaaggatttggacctcctcctaagaaaaccaagaagtcgaaaaagccaaaacccggaaaccaaagtgatgaagacgacgacgatgaagacgaagatgatgatgatgaagaagatgaacgtgagagaggtgtaattccagagatagtgaccaacagaatgataagcagaatgggatttacagtggggttaccactcttcattggtcttttgttcttcccattcttttactatctcaaagtgggattgaaagttgatgtgcctacatgggttccgtttattgtttcgttcgtcttctttggtacggctttagctggtgtgagctatgggatcgtgtcttcgagctgggatccgttgagagaaggttccttgttaggctggaacgaagctaagaagaactggcctgtcttttggcagtccttttggaattcctcagacaagagatagactatgcaataaaagctctttggttttataaacagatgtaaattttgctgaggatttactttggagattttctatcgacgggcttcttctgcatatctcttcgaaaatttctttaccgatcctaaagggtctgaattagtgaatagtatcaaatttattgcaaacaaatagacccaagtcgatctttattgcaaaccaaattgtcacacacgcaaaaaacaaaccttaacaatacagaaattaagaaaagaaaacaaaagcagaaccattgacgaggcaaagacgcgccgtcgaaaaaaaaagaaaaaaggagacttgttttttctgatgatgtataagattattagagagtttataaagtaaaatatttgctcagaagaggcatgcttgagttactattggtttaggggtcatccggcgactttcctagagtaggcattggtggtgggttgtgttggtctaaggaacatgtcacgtgtttctcctacccaacctgccttcatcggaggtggtttcagctgttgatgctgtccaaccacagacacagagtgtcttcgagatccagttgctccaatggtcatgtttgcgagtttatcagcagtctcggatacactactacgagtgacccggttcttgttcaacgatgctgctgctgcattatctccaattgaatggatttgttttgttagatgaagtaaaacaacgattgtacatgttaaagaaaaaaaggtgggtttatagctttttttacttacgaggactcttttttccgggtggtctgtatttggagtctctgacagaacttctcacgggtttagtgtttctcgtcccatcttgattaaccatatcaagtttccgctggacaccactgccaaaagcggcatttgactttggggaaacatagctattgaatggcttagcattggcaagagacactgggtaccgtttaactgattggtgctcgaatgatcccctaggcccgactatatgacataaacaaaaaaaatggattgtaacaatctcaaaacacatataacctgacattggtagtcaacaaacaatgaaattaccaggcggaggagttcttgcaacagaaggcttgggacgaagagatggtgggacataaaagcaactctgccatatgagaacggggttagataaggagtatagctataacagttgtcgcatatcgtccaatcaaaaactttctaggtgtacctggaagaacgggtgctgcagcacctctgcagcagtcggtctgctggatggatcccacgagcaaagtcgctgaatgatcatgttaaaatgtggagattaatgtcagagaataaaagaaataccttcttggattcatagaagatcacttttaagagttgttaaaatacctcaataagattaattgcgtcttcactagcagatggcatcaagctagaaagaggtacaccaggaagctacacgatgacaatcgttattgtctgatacaaaaaaaaacaaaaaaaaacaaaaaaaaacagtgaggttcaagacacaatttttcaagcttgagcaagtacctgagggaattgatagtttattgtgtttgcaagattaagtccctccaaccaggtctcctcagttggggtgcctatgacactgcagattttgtagatttcatctgcttcactgcaagaatgatacgacaagatttttcacttgtttattaacatttaattttgcaacgttttaaatcagaaaaaaacaaattaatcactgctacgttacctagccccaggaaaaatggggcgaagagacaacaactcagccataatagctcccatcgcccacatatctgaataaaaaaacaattatcaaattgttaagcactaaatcgcatcattaaagataaagaacaattatttcttgccatagtattgatactaaccaactttcgatgtgtatacatatgactgtagaagtacttcaggagccctgtacctattagaacaaagacttttgggtctataaggcagcactggtatagcatttcatcaacatatgggccaatgaagtacaaatatgcatagatattgatatatctgaatgactcattgcaataataaaaagggaagcgactcttaccagcgtgtagaaacatactcggtaaaaggtggactcgaattaacctcacgtgccaggccaaaatcagcaatcttaatgatgtctttagagactaacagattttctgcaacaaccaacacaatatacatattcagtgacaaactattaaacaaggattgttagaaagacagtgactaaactcagaattgctaatcttcagagcagatgtttgaagctatgtatctcacacctcaaggctatatcaattacctggcttaagatcgcggtggaagtaaccacgctgatgcatgtaagaaaggccttggaagacttgaaagcaccaatttttgatatcagcttctgcaaaaagcttttgtcgatccttcataagttggtaaagattgcactcctgatcaagaaagaatgacataaagtagattcagagcaatgaataaaagtatcagaaaatacctaacaacaagcaggaaagaagtataccatgtactcaaagacaaagtataggatatcattttcccggattacttccttcaacttcacaatgtttggatgattcattctcctgagcgactaataggagggaaaaggaggaataagtacacatacagtaaacaagaaaaaaaaaagcatttaaacaaaggcagttcaataccttaacttctctcagattaatacattcatcccaagagtagtacttctttttcattttcttaattgcaacctgctcatagaaaatttcacttagttaaaaaccaagtacagaacattctaccagtaatagatagctctccaagaaagtaacttacgacttcacccgtctgcttatttatagctcgccaaacactaccaaaagttccatcaccaacctctttaattaacttgtacctagaaattcataaggcattgagaactaaactcataagccacaaatcaaggggcccgatgaaaaagatattaaaaaacaagttgagagaaaactaagctacctgtccatctttttttttctggttaagcaaagtagcctctttatattatgtaagtaaagaacttctgaaagatttatatagcattaatcttccagtcgttcgtaggaagtacttgacaccaaggcagtaaaatcaatgattctccagctgggtagactgaccgttatttacttcgaacataaacgggttgaccatttaggcaaaagaaagagagcaagagaagaggaaaacacatactgagaactcaaagacgcgaaggaaccaacaagaaagactgttttggctaataggaaggaccctatgctcacaacatctcactcaggggttcagactcaaggaaacgacatttgtaaactgaaaaagaaaagaaattgatgtatctttcttcaaccagcacccataagaacaagatatgaaagagaggaacaaagaggtttctctaggactatgcgaaggaagaatttgcagacttcagccctgcaaaaaaaacgaaaatgtcggatatgtaaatatcctctgatagatatgaatatgtgcacaaaagatatcattaagtgtggggttgacgtgatggcatacaacacttccgtgttcattgtttgtttatatttttccttttcaaattgtccaaaaaaaattagcagttttaccatttctcaaattttcttattttgccactcataagaaagtctaaaccatcttaatgaaacctattaaaaactacaattgggataattacaagaaattcaacttgtaccaaatgcataacacgcactaaagttccaatggcaaactatctaaggagggaagactcgtgtagaataaaacaggtttaatcgaaagccatacctgtctcagaaatttgcctcacaccttcccctaaagatcatagaagagggtttgaccactaagtgcagttaacgaaagagcccacaaggaaatcagaacgtacaagaaaccgccaatcgagcgcttcttggaatgagaaaagccgatagtggtagcagcttggccagacaaaaacttgttccatatctcagaagatgacaatccacttaaattaaagcctgatataacctgatagcaatgaaaaagcaattaaaaaattataagaaatccaaagatggacacaacaatagctagaagaaaaccatccaaaagccaggcaagctctaaaaatggactcaacttacattacagtctcataaacaacattagcaaaagtaatcatcgttcacgaaaccataaaaacctagcagcaataattaaaatgcagataagataacaaagcacaatatctgaaccgtggtgccatcatcacctaactattggcccactttatacctcacagatctgaaaaaagctggaaaaagctggaaaacaaacatatccaattcgaggatatatcaatcaatactaaatcaataattctacctaagaaaccctaaatttcaatcaaataatccgaacacatcaaatccgactcaaacagatcccaaacagacgaatccaagcataccaaatgaatttatattaatcaaaacgaaaaattagatccactctgatcaaattcgagaccataaagagagaaatgaaatggagagatggagatctgcgaaagaaatacctcagagccaacgggcaaaaccaccgtcgccgacgacgggaagagacggaatccagagcttctctacctcttttacctttcaatttttcgatccaaagtccaacaaatatcaatccttcctccaacgttttctctctctgccaaatatctctcttccttcccttttcaatgtgcggttctctcgtgatgaccaaaaaaaaaccctacgattttatattcccgagctagaaaaagaatattttctactttggttcgatcgtcattgatgatattgtggtcgtgtcgcgttcgaaactgctataatcgtctgtgtctcactctacgaacttacggtgttcttttcatatataaccgtgggattatcacgtggttgtgtcttttctttattatggcccgctaaggattcatcggtatctttacgtggccgcctctttattcttgccttccacgatgtaacactggtatttttttttcttgacttttctatgagagctatatattattcatgattcatggggatttaccaaacataaaataaaattaccgccattattgttataagtttacatgtttataaaataataaatgttgatattatctgttgaagagttaaatacgatgatacaacacgtttggaattatcgtctttaattatcaaaaaaaaaaatcggtctttcatgttttaaaaagattgcaagatgctgaaatctagttccggtccggatcacaagttccaatttttgttggatataattagagggaaacaaattcaagttgtttggaaaaaaaaaggcgaaaataaattcaaattgtttccctctgtagaacttttaacttgttgcataatggtagggattagggaatatgcgatttttgaatattaaggagattgtttatatttgttttatagaaaaatatgtttaagcataatttttaatttgttcctgcaatcatatttaaaattagtttatcttattcgatttcggatcgtccacctaacgaacacgactagctagatttactttacaattgtatatctaatttttttgtcctaaaatatttttgaaacacgattttttttacaagcaaactgcaaatactttacatacggtgagtttgctcttcatccgtataaatgattgttgaaaaaacactcatattttattagcattagggaaacgaagagaaaattttataatcgcttaatctaaatggaccaccaaacatgttaacgtgtaaaaaaatacaagaagatctcaaatcattatacctaacattcgagaaatctcgaacatcaccgtttaaagtaaaatttaaagttacaatttaaaaataaaagaaatatataattctcaccaagcatatactaaaagcgaaaaaaaaaacgaaaattgataaatatgctgggataataaaattgaattggcagctttcaatagctttcttggctttgaagcaacacaaataacctatgcgtgttgttgttgagactttgttctcaagatacctccgaacaaaacaaaagctttaagcttaagctttcgatttgtcctattatttctttcttttttgtttatttaatttgtttctgaacttgcgttagatgaataccacagcttcttctggcaaatcaagagcttctcattggctgatgcagactctgtttgttctttacggcaactccatctcagctctttagcaacagaagcaattgaatctgcgaagtagctcgattcgcgtataatcgcatacccgctaggacgtaagatcctatccatttccagcattacatatttcatatcacacctgcccaaagccggaccattacatatcagatcatcaatggatttttaaagacctaagctgtgatatctctgttctatcattacctctggctttcagatgtaaacagcccatctacgtgaagaagatcataagttcttggatacgtcgaaaaagcttcacacctatgaaacaacagaccacattatgtatgcgagctcaagtgtttgaaagtagaaaaagattaggtggtcgagatgaatttaccagtcatgatatgttccgatcaatccacgatcaaacacaacgggaagtgtgtttgcagcataagaagagacgacattcatgacccacaaaggatcattgaccagagcagcagccaaacctccataagcagtgttcatatccataacattccgaattttgtcagaaccaatcgcgggtaacagcttcttgtaatgcttagcccttgttttccatttgctatcatcatgtttaaacacgttaccatttcctccaggaacatcagagattctttcaggagttgtgtgtaatctttctggccacttgggagtagattccaaatccgtcttctttagcttagggcttggaaccacaacgcaagggcgtaatggtgtataccaagcagaatctggctcaaggctgtcgtcacattttggcgggtatgcatcagggtcgttagacaacttgttatagcatagattgtctggagatttttgccagactgcgatatcgtctttcttggcatacattttgaagcacattgaagataacaattcctgcagcttctcgtagtttgatctctgctcttcaatggttgtgtcccaacctttccaacggttctcatagttgactggtggaccagataagacccagaagccaccaggtcttaggatacggtgaacctccagaagatatactccacctgagagagacaggaaagaaacaaaggttgtttaaagatatactcacctgcatttttcgatgatcaagaagattcaatatagcaattcaattgatcaaagccagttaaattaccaaattctgtccacggaataaggcatcttgagcaatgagccatatcaaatgaatttgaagggaaagggagacgttgagtggaaatgatgccaagaatcgcaggaattccacgttctagagcaaactggacttgagcttcgtgattatccctcggggcgagtgataccgtgaggataccccggtccaacaaatcgcctccccagctcgcaaccttaaaaacagatcaagatcaatggagttgaagaagagaacatctaatccgatatttgccaaagttatattctacaaaaatataaacttaccccacaaccagtgtcaatggctgtgcgtatagtcccatctttcatttcagggatcaaatcttgcatcagatcgacataggcactgactccatgtggaaacattgtacccccaccaggaaaaatgaacttttcaccctctttccttagccaattctggttagatttctgcttgttaatccaatcatatggcacattcctgaaatcaaattaccaacttacttcaaatagctgaagacaggagagatttagagatacaagtaattaagagatgcaatcataaggttgagaaaagggacaaacatatacctgtaccaacattcgtctttgctctttggccatcttatcggtggcttatagccatcaggaggaggaaccagacactgctttctatcaaacacaggaggacaatgtcgctccatgaaagtaagcctgtgagtaccatacttcttccatttctgaacaagcaaaacgaaatcaaaacattagctacactttttccaaattcaagcactcataccacaaaaatcagcaatttgaatatacccttggatcagtgcaaggagtgtaatcttggtagtcactgctacattccgagaaagaaacagatttgacttgaagagagtcatcaacatctaaggaagaagattcagcttttgcaacatcactaacttcaattatgttcttcccacaatacaaccctccaagatagaacgaaagtccacaaagaagaatcagtaaaactgtcttgggcaaaatccttgaacccttctcagctttctcgtacttctcatctttatacttcattgttttaacaaactccttttcttagaaagttaacacctacaaaattagcaacatgagattgaataaataagtcagtagacaagagcagcaaacaagcttctgccattaatgaaaaagttagaaaatagaactttatttggttaattcattgaataaacaaatgatgggccaagtgttactatttgacaaatgagtatttcgaaagttgaggaaacaaaggatgtatagaatcgagatctaaaaggaacaaacaacattgccgacaataatagattgttgctttaatgtaatctcacatggcgttttgggacccagattcgaccgctataacatgctctcacatttgtccatcaaaactcgagaacaataaacaatgaatcgatgaaataacaataaatgcatacacatgaatgaatctctatttaaagtcttattcactttcgcatttaaagtctgaaaacaaatctgtacccaaaaaaaaagcttgcagagagacagctaaaaagcataaaggacttcaaaaaaaaagtgtaagatgaagagaattagcattaatcattacttgccagagacggaatcgtctttaatcttaaatttcaccaaacaaacaacaaaatgtaatcaaaaacaatgaatctggaattgtgcacatacacaaagcgaaaaaatcgaaatgaatccaaattcgaaaactatatactggagattatccagattattccacagatttgcttacaggagattaagatagaatttgtttatacggaagcaaatgctatttgaatcagtgacaaatgaagaatacgaaacagagaaagcaaaattacgaaatccagatctggtttttaccaaaattcgtcgagcttcatgaaggaaaacaaaacagtaaactcgatctgtgcatatataatttgattatagagacgaaaggaacgtagaatttaccctagattctttggagtaagcgtcctctaaattctgagtttcagattcaaagcgcgatttccgatttcgaatagtctcgtcgaattcctgagaagaagatattccgatgaccgagagagacttttagattcttctctatctaacgaatttttgaagacgaattgagaaaaaaaaatggacgcgagagagtgagataaggagatttgcagagaagctaacgttaacatatatagcttccttctgcaatttttgggtgtgcaaaaaaaaaaaaatatttatttattttatcgtccatctttttttctttccgttcactctctgtctctcctttcgttttctatctttttcatttcttttaaaatctaactattattttcacataattacactattgttttggttttatttaattattatttttcatgaattttatttgttattgaatgttgatgaaacaaagaacaaaataatagtcacatgttgtttctttgttaataatgatgatggaaaaatcgttttctattgcaagatatttatttttcagtaggtatcatcactaaaatatctagtactaatataacaattatgagaattttaaaaaattgttatagaaaacaaatctgtgaaaattcgaaaattctataaattgatagatcctccactctagaaaatcgtaaaagattattatagattgtagttcccggaattttaggtttgttgccaaaaagtagcaagttgtttttccttttactaaagtcaccaatcgttttttagagttctaatttagattttttaaaatttataaataagtaaaaaaaaaaagagatgaaaatggaacccaccaccgacaaaacgattcaccgtcggcgtcacgactatccttatatcaatcctcccatgcaaatacccatatttccctatattcttggagtgatgatataaattacttttttttttttttttacattccacaatagtttaaaaaaacaaatcacataaattaagatttcaaggctcgagtttttttcactttgttttcagttattattgactactttaaatagcaaaaatacgatttagtgtataatcttaactaaaatattctcattcatcaaattagctctttatgtttaatttccacttcctttggttacacaaccaataaaaaaaagtaggattggatgaaaatcggaacaacgttataacaaaaaaaaatgactatgttaactatctgattaaccacaatatatgaaaataacacgaaaatattaaaagattccaaatttaattaattagttgaagttagccgagttttagtcggtgggtttgtcacttgtgaattccacgacaagactgaattattattaagtgttgactaattgagacgcgtttaaatttaattcctcttccaacagtatactactgtattttgcatattccatactgtactgttatctagctatttaaattcatcgtcgtacatagtgtagtatcggtctcttagctaaagaaattatattattggaaggaatataattagcacttatataaaaccggtcacttgtgtatgtttttttgtttgtatctcaacgtggaattggaaagtttttgtctagtcaaagtaagaaaccaattactactaaaactgaagtatataggatcagaagtgtgagaagtcataacgtaatttgtagtgttgtgtgacttaagagccaaatacttttgaataagtctaataagttggaaaatggaaactcaccttctcccatgtggaatctgttaatggtgcatcatcttcccatgtgtcatttaggtcttttacaccaatctcatcactctcttttcttaattaaagaatactcaaaaaccatataaagtatgaaaagttgaaaatgtagcaataaaaaaaaattcttgtgtgttcggctgaattacacctgctttttttccttgaggtttgatgtcaatcataattgcaagcaaggcaatgaattccaacaaaaaaaaattgtgttcatacatttcaatatcatattattacatcaacatttatttattttctttatctttcaaaatgttgccatagaggtgcatttacaattgatgtattagagcatggaaaattgagatggaagattgttataccaacaaaagaagtcatgaatgtgattctacttctcccgtagttaccaatggtcatctaaaatttgtcatgagctatcaaggcactaatattagcttaataataaattcaaattatgttcttaatcctactattcactaaaatagttaacttgtcacatgattctagttagaggagcagaaacaattgaaggatttcagtgtttgcacggtgaagtttttggttgataagagttcataatcaaacacttatgtttcactcttcccaactgacaagaacacacattgagagaaaaaggcattcttcactaaaaacttttaaaaaaagatatcacaaaacgagtttgatattttcaagaaaccaaacaagagaacctaatatgcttaaataaccttaaaagacttcagaaaagtttggcattagttaattctaccaaaacaaaagtctacaaaaaaaaagagtgagagcatcatcagatgatgatgattatgactctcagtagcttccaacatgttgtctcggtagtcctcctccataactccccgtcgtgcctctgtaagagccacccatgtactgcccttgctcttgcggcttagtagcgcctggacactttgcagaaacatgaccactgtttccacagacattgcagctagtagtagcaccaccaccactatagtgattcccagattgacccgattgatgcgcatgtaaaccgaaatcccttctttggaccgatgagggatctctggttcctgagcttcctataccagtattaaccacatcagcattgtaatcggatccttctgggttaatgggaagagaatttgcatctctggtcctgagtttatccatagcacctaacatagtcctggtatctgctgaatagtttagcttgtccactttcacaactgttgctttcacacgctgttcgtcgctgaatgtttcttcttttaccttcagcttgaagttgtacttggtaaaagcaaccttacggatgatatcttcgaatttttcctcatccttgtgttcattcttcacataatacaaatctttagcagatatgcccattatctcttcaccagcctcctggaatgctgtgacgcaagtaagatctgtatggtcctgtatctgaagctgcagtatatacctgtagtcacattcatcaacgcttttatcacacttttcgcaccgccatgtcccatctccattgtctgttacctttttgctgcatggacgatcaccgttcatgataggacaagctgtgtagcagaagttatcaaacttcaagtataaaattgtggcactgactgtgatccagtctggtttttcggaggttcctagtttctcatctttaatttgagatattgtcttacgaacatctactttgccactgccggaaaactcccgagataaggagatacaagggacactctttccttctctctcaaaccagttcttcagtttctcagcttcaacaaaatctgggtcaatgaacagctgacttgatccaatggtgctcactgtctttccattaaattcactaatcctgcccgccttaacagcaagaaccggaaacacaccagaatcacaaagactttgcagcctttgtccttctgcattgcagaagtcaccccacatagttacctcaacacttcggcctgacatatccttcaactgaagtgatcttttcggtgttgcagttccgtttttcctcgttattgttacagtaggactgatagatgacacaataccaattacatcaacgatgcagttattctccatgctctcaatatccccaatggtacggaaatggaactgatggcgcggaattgcagcatcctcttcatagcattgttttatagttgatgcattatccagcatgatctcgtaatcatttcgaagatgattaaagttcttttgtgcaggccgcaaacttcccctcgagataagataaagattaccaacaacaatctggtcatagaattgatcagccacagcgttaaaacaagtaacacgtatttctccgccatcagcatcaagaagatcaaagttgaacactttcccttccccacggggattactgtattgcttaagtgctgctttattcgtgactctggccttgatggtccacctacctgaatatggactaagagcattaactggaattatcttaggaggtgcttcattcctagccactggtcccctgtttgcatacatcggtggtggtggttgaggctgatgaggataacttgttggaggatcacgagcatagtcctgcctagtgactccattacctgaagacggattgctgtatgcccgagtggaaggtgttgttgatgcaggaacactagaaccagtaccaccaacctgaggtgaaatagctgcattacttctccctggctcgatattgtttacttgacggataccactaccttgttgctcagttgtattaaacttaataccagaatctgctccacgttgatcattatgctttcctcctggaacaggatgcccgataatatcagaaatctgttttaacacctccagttgcggaacaataacaatcctggcatcaaaaacaaaactttataagattatgtgaaattttggtaatgtagtctctaacatgaagcaactatcattggctatatatccaaacttcaaaatcatgttcacaaccaattaccttcgacccttgatgacatcaccgacgaaacgagtaagtctaacaatagaaccgggttgaagagtcccttctttgacaagattgttgagatcagttcctagcattccttgatgcaagtatgtcccatcagataacaccatcctaaacctctctcttgttggatcttgttgagccataatctgcttcaaatccgtcacttgcaacaccggaatcatatctgcttcagtcgtcacttctccattcattatcttcccgattgctcccgccgtcaaacttacctccatcattacagattgacactaaaacccaaattcaaaagcgttacaaacctcaagaaaatttggataatcagtagaagcaattcgagattcgaggaggaaaagggtgaaatctttataaatgaattcaaaattgaggagacgaaaaacgatttgtttgaattgacagagaccagaggttgaagaagatgaaggatttgagattagcccctagagtgaaaggtggaaactttacgctccctttgagagggaaactaaagaaggagggtttcaagaatttggaaatcacaatcgagccacgatttggtgttattacggatctaccccttcacaaaattcccttacaagcttcgttaagatgtagactggtaaggctcaaagcacatatataggcccatttgaaggcccaaaatggcaagtaaacgaacatattacgtggaagacgtggcaagtgtactgctgagtcagcaatctctctccatcacattcacattgatcaaccctgtccgaaaaaattattttattattattttttgttgtaattgcatttaacacactcgcatcatagtcaaagactcaacgcggaagggaaaaaaaaaaaaggcgcaattgaaagaaaaaaattgataatcggtaagatttgatgtcccggcgtccgtcgttttgatcaccgtgagaaatggattcttcgaattgttgttctgagtaaaactcactcaccgtcaccggagaagaaagtgtaaatggattccgaagaaacgacgtcgtcggtaacgactacaaagaagcaaaagagggttttctcttcgttagctttgcgattccgtacagtgatagttttctcgatcattagcttcgtcgtcttgtcgtttctattaggaatcttagtgattttcatcggtgaattgtgggtttattcttcttcatctgcttctgcttctcttcattctcgctgcaaaattgtttccagctgtaagtttaaagctttgattctatttactttatcatcaattgattgcagaaattgataggtttcttgtgttaaatgatctcacttctaatgattgaaatggaaagtcttcacaatgattttgggggttttgataaagaaactgatgttggttttttaccgaattgtgatgtagctgttgatcttaggtcttctaaagtgtgtggcattggactattgaacgtcaaagcacaacatgtgttttacccttttgagagagataaattcagatgtcgttatgattactactgggcttctgtcttcaaggttgtgagctattttacagcaattttctgtcttttgtttttcaaactagagcaatttactaactccattgtatatcgtattcacaggtagagtataaagataacttaatgggtcaaacacggttagcgttttcagaagcaccaaatgaagctcttcctcctgagtgcagacctaactttggtgctgcattacttaccaaagataacttcaaggtaagttttttgactatattgactctcggacttgatatcagtttgtttactgttctgaatcgcaatatgtttttgtttgtccaggttaatgagacttacgattgctggtacacattagggattccaaagataaagctttatcgggatagctttttcggttgccaagcagatgatctttctttcactgacattgctaagcaatactctattgtgtaagttcttctgttttctctcattattatacatttttcattataactaaacacatacaaactgtaatagcacaatgattgaggtcgaagtgatatacgaatgttctatcatctgtttagtttctcagtcttgccttgtcctggcattgtttttttacagaattgatcctctttcattggttttttttcagaatctctaaacttttacagtcatggcttaatggagaatcaacaccaaagtactggaaatatgatgtgatcgctggcattgtctctggcttcgcaacttccataatcacagtcttcatcataaggatcttaagacatgcaaaatcttggttccctcaagcttgttgttcagttaagagacagttttctaaggtgaatatattggtacaagtgaaacgtgcatgtttgcttcttgtttacttctcggttctcggatggatggctacacaatacttaaaaattctttttccaaatgcttaggaaaaaacattacttgagagtcagtgagtatgtaatgattcgtagacagttgtgtgatgtaatcttaaatcatttacagaaaaagaaagcaatacagagaaacagctttaaagtttgaggattgatttgacagctaaaaacaatctgttttaccaaccaattctaaaatgcaaagtgatggattcttctacaggcttttacggatctcggaaacgaacaaaagttttggtgaactacgacctatctcatatgatggaggatcttacaactcttgttaagaaacttctgatggaatagaagagttactcttcttcttgatcagcttctgtgtcgtcaatgtcctgaagatgagaaagagcaacttttggctttttcggtttcgaagaagcttcttcttcctcaccctcgtttccatcctcagagtcctttcttttcagatccttgacatctccttcattgctacaactctctggtttcactatttccgtctttttctcattgttcaccttagctttccttgcttgctcttcacattcttcaaggaaattttgcgtttctgcattacccgcaacatcagctggactcttcccagccttagtcgtagctctgacgcttgctcctttcttaaccaagtacttgacgatttcaaagtgagaaccttgagcagcgtagtgaagaggagtgagtcccttgcgagtgatagacttcacagaaccaccggcagataataaagttctcacaacttccaaatgccccttttgagaagcaaagtgaatcgcacccatgtcatctcctgctgcagcaccaacatcagctttgttcttgcataagtagctcactacctcgttgtgccctgcccatgctgctaaatgtagtctatttccccaagagatcatgatgttaaggacaaaaaaatgaacaacaaaagactgcaatgaacacgtaaagtagatcagatctatcattgctctagctgtaatctacaaaccatcattctcctagcaaccaaatcaagtgtgacgaatcaaaatgtaaaacctagaaataatgtttagcattgaataaagttgtataagctgatactaaggttttaagaaccctaattaaggccgtagcaaattacattcagcaaacatcggaaaatttgtagtcaaacagagaaaagcgagtcgagagaatttaaatttcatgatcaagcagaaactaaaatcgaagaagattgattttgcgagaagaaaggatacggagtccgagaatgcttatccctagaattaacagccaaaggattagagctgataatagattgaactgctgctaaatcaccggatcttgccgcggagtgaagatcagccgatgctcctcctcctcctcctcctcttccgccgccgcttctgcctgccatttttgtttccttcagagctccttcgccgtctctctctattcagctgaattcgtaccagtgattatggcggttcgggtggtctaaacgggtcggttttaattgcagaaattttgagcttaagcccaaactaagcccaaattaggcgaatcatctcattctcagcggaccgttcccggttataaattataaaattaataacgtatggttagcgagttcttacgagttgaaaacggtcaaaatggtaaaagcaaaagtaaatgataatgttacttaaaaaatggttacttcatagttcataaaattatccaccaaacacacagtttttcaaataaaaatgtgaaaaaatcatacaatttatagcttacaaattactacatttagtttcccatagtttagttggtcctagtatttttaatacatcaccttgtaaatataaatatgcataatgcatgttgttagcataagaaaaaattgtcttttaaaacctctataggccagttataaataagtcaaatatcacattagaattgtcttttaggatgtattcatgcaatggtggcaaacgaagagagtacactcgtgtctacttttcttatatatatagttataaataaattaattagtcatggctttttattatcattatttaatacttataaattccaattggtttcggacgatgcattttgactgatctgttcgaatacaacatctgtcggaggtaaatatgacaatttcataaatggataattaattttcttataaatgttaaattcattgataaagaaaccaaatgtttatgtgcaaaggtaataccgtagaaagaccactcgtttacgtatcgataatacagacaagatcgagagctagtcggatgttgtatattgctatactgtctatcttttcgttctttccaattgtaatagattaattattacttttatttttcataaagtcgatcgattaaattaatttgatgtacttgttgttgcaagtaacaacgtaactcaagttgattcatagtactttttataaatttacatcgacaatctaacaaaacatataatatcaggaaactgaaacttcgtgagtcatgcctaatgtgaaatcaaagataattttggtcaatcatttaataagagtgcatgatgacatatatttttttatgtagtaaactagttatattgtataaaaacaaatttatccgagggttttatttgtgaccaagacggtgtgaacaaatatattttgaatgaatcgcagaaaaagtaataaaaaaatagaatgaaaatatgagaaaaataaaaatatgataaattatcaatatatccatggaatgtgatgcaattcatgggacaaaaagattaggtaagccgaaggataaagggatgagattgccacctttgaatatatatataaataagtccaatcttcatgggaaggttcctcaatcaatatttatcgctttttacaccattccaagatttcagatcagactatataaaaacagaaaacattttgtctttccaatatatacaatattaaacagcaagcaacttgcacataattgaagttatgcgtcctgcgtagcgtggtgatatcatatgattgatccatactaaaattatatatattcgaaacatcttgctcgttataaattctattgacgataatatattttgtgtgttatttcgatattatcatttaaatcccggttcatcaaataattgtattcagtgagcaaaacaacatattatagttttacatgtgattttgaaggaaaaatcttggactattttatcatataatcaaattataaacctctaaagaatttctaaaccaataaagtttaatatcacaatcagtttgaacatagtgtttatttttacatttctgttttgacccataaattatttttacagttatcatttatgcaggcctgttattaattataatactgcaaatctcaaattcacaaccagccaaattcatcatagtcatacatacgtgttatccttccaattatggccttctgtatatgaaaaaataatataaactccaatcaaaaggtcaagaacaaaacatataaattgacaaaacaaatcgatacatggataatggggttattggatatattgtagccaattctatacggatagggagccctacgtttccacaaatatattgggatggatattaaagcattttaaaaacttactgaaaataaacattgaatattatatagtcaatcagccatcgtcatggggttagaataaaacaagcactcctttcaagttgatgctttgttttaatcaaacgtcatgatcccaatactaatattcccattttaacgtcacttaataacgtaattaagtcaagataatttacgattgatttttttagcataagtttaacctaatcttcaaattatgttgataatccccgcttaagttcttctttattttaatcaagtctactaaaactaataatgtattatgactcgattgccttgataaaaaggtaaaactgaaaagcacaagattttctcttctcccacctaacttttggatttctctattgtttttccacaaggaagacctaaatttcttagtttaatggatgattaattgttttgccaaaaaaaataatatcacaatggccaaccatgataaaaatgactgaaaagaaaaaaaatcattctatgataattagctaaaagccatttgagcaccaaaatataatctacagcatgtatttgtaaataattagtacgattatatggatttgattaagtaagagaaaacatttattcaaaacgtaacataattatttattaatggatcatatgtgtgttattcacgtggttgtatagtaacgttattgcgtgaaattcattttatatgcatacttgttggaattcaatacgtactgcataagtgcatagatatgccaatattcaagtgccaatgatgattgtgccgtgttcctaccaatcgttgtggatgagcatatataccatccacttacgagtaaattaaaaagaggcaaaaaaactattattggtttatcttaaatcgtttcatgtaattttcataagattcgtctatcagaatcgaatcttattaaaggaaaccacttaagaaatattaaaattgagtagacaaactaaaatatatagcactcgtaaaatataattaagacaaggagcaacattatccagttttctttatacatgggatctgcgggaatatatgcttatgttctggaaaaataatggagtaattgagttttataaaattgcgtgaacctccaaaatcaatgtatcaaattcagatccacataaaagttatcaacataatcaaaattatctttcaattatattagtgcttccaaattcctagtagtctaaatatcttgttctttgacaaaaaaaaaatatatcttgtaggttcggctttgaggaatctaagaaaattaccggacccaacttaagatatattagtatttagtgacgtgtaaaactaataccataaaaataaaatcaattatggtgatttagtagaatataaataaaataatgttaagtagaatttaatgatgatttatgatatggccaaatgaattaacttataaaatagttaaaaagttgttttgtttaataattgaagaaaaattaagaaattatttaatagattggtaaactaatttatctaaatataattttcaaaaataatataaatgatataaaactttggctaccaaaattgaactagtcctctttgggttggtttgactgtttgagaaaattgcttcttacagtttagctttgttgtctatgcttggccttggctgatcgacaaagtgattcgcataatcgcatcttttggatgcaaagacaaataaagatatactccaaaagatgcgactataacattcttttcaatattaacgctactttatcatcaacataaattacttaatcaacaaaacatgaaaataaggaacaaagctcgaaacgcaacatgcactacggaaaaagaggaattaaaatgaacatgtctacaatttgtcagtgaagttttggatgtttctactatgatatggcttgtttcatgcctaccatatgataagtgttctcgtgattctcgctttatttttgcatttttttcatttgtttgtaaatcacttattattgttgtttttcattttttttttctgcgtttggcgttttactggaactttaagttacagaaaacatgaatagggaaatttgttaatatgtaactaaggttagatattttgtaagtgacgtaataagtaaacagattattccatatcatttgtattataaaaatatgaaaattgtggtataacaagtaattttttaaagtttttttttcagttgttttatgttgctttccaaaaatatattaacacaaaaaggaggcaaaaataatctttaaggaaaaaaaaaactttttttaggaaatttttgaagaattaataaaaataaaagaccatttttcatattttcacttaattaaattggcttaactctgcaacaagtgtcgtcatcagtccttttaaaacaccttgtatcttccttttaccaaatccgccattgaagaataagagagagagaagagaactactcagatataaaaaccctagatttcttctcttaaaacccacatcgaatctcaactcagaaccaacaatgctccaacctttctcttcctcctctgttttctcgagaatcctctggactttcttggtttaagaagattcgttgttgaatcagagagaaagaaagcatccatttttctatcattgcttgcttgctatggaattgggtaaatctcgattctacttatgttgcaattgcttttctcctgttagattttccgattattctttagctggaagtgattatccagacgccatctccatcactttcaattgtattcctataccttcttctgaagattcttcgtatttctcgattcgatgtttataaacttcaaattctcttccaaatcttgaaacgaatttctcccaaaaatctctgtttcttcacaaaaaaacaaaaaaacaatgttgtgtgcatcatcttcgcttgctcttttgggtcctccttcttcagctatggtgactatggcttcttcaccagtgtccagatttgttggatttggtcatcatactattctcaggtgatttactcaatctagtcacttatcttaagttcatgtactttgtggtagatatttctgaggtttgtgttctttgacgatcctcaggtatgataatgatcaacgtcttcgtcgtggttgttcttggactggaattgaaaagaagatcccttttcctcggaagaagactgcctctgcttctgcttaccctctctttcgcagtcagcatactaaagactcatcaagacccaaaaattacaaagaggttcaaatttgtaatccataatgattcttccctaaatctgaattcatgattgttgttttggttttcttaaggttttctcatgttgctgtttcttgatttacttcatttacaggttactaagtcagccaggcaaatgtttgctcgagagatctctatccaatcgaaagacagtgaaatttcgattgcaaaggtatataagaaatttctcttgttaaggtataatctctgactcttggtgacttgcttcacaccattattcaacatgttatgactatgactcttagagagtttctattattaggtctgatgactgatgcttttggtaataaaacacatttggtgaagttttcatttatgtcatatatcattgaagctttcgctaatatacttgtggaaaatggactcacaggttctcttctacattgctgctgaagatgaagccttcttggctgttaaccgagagagggatgctcagtcactcatgaaggagagggaaagtgtacaagatcagtctgatccgagtgagacagactctgaggagctattgcagttagatggaaagagtatatctgagtgggtgagtgaaatagatgcaatttccaaagaagtagaggcagagttagtctcacgagatatcggctgtcacttggttcaagttcttgaagctgtaaatacagttctcttcgatctgagaggcttcaagaggacatctattactttagacccggagaattcctaccttcactctgtacttaactgtagatgcagcactggtaagagtctttctttaagctttctcagtaatcatttttgtctctaatctttaatgaattttgttttcttccatgtgcagcgtttctgattagtgtaatatacattgaagtttgtaagcgcctgaatgtaccaattgttggatctccagttggggaagattttctgatttggcctaaaacggagtatcctgaggaactctttaaagcaacttcaggacagagcttgttctctattgtcaatggaaggtgtgttgatgatcctggatcaatggcatcagacttaactgcaaaatcacttcaagacctcgacatggcaacaaacagagacattatagggattgctctagccaatttgattgtaagcccttatcacttataactaaactacaaatcattgactccaaaagatttcatattgaaagaaattatatattgtgccttttgatcattttcagaggcttcactggagacgtgcttctaagtcatcccatggacttatgctgacttctcctcttagtcaacttaacaacatcagtagttctaatttcccattgttgcggcctcaagatcttaggtaaaaacgtttttcaaaaaacaaagatcttataaaccctttagtattattctctgcctcacattcggtttctgctgatcgaaggttggctattgcggctgcagaaaggttgttgattttgcaacctcataactgggcacttcgcagagaccttggtatgatgctgtactacgacaggtacagtaaacttagatttaaatccttacattaagtggttctttgttgcttgtcccggttctgtgagtattggtctgtttagtttgatcaaatagaaaatcttgaattgttgagatatggtttattgtggagcaggcaatatggagaggcggtacaagagctgagcatatgtatggcatttgctcctcctgaagaagaagctgtgttggagccatttgtagaaagacttcatctccttcgtctcatatcttcattgaagcctcttggttctgatcgcttgaccgttccttgacttctctctctctctctctctactccacttgtaaattcactctctttctttctctgttgtgtgtttgaagaacctttgtagtaggagacatggagcttttgttgtttgttgtaactctactagactactactgttgttttctaatcagatctaatggatttgggcctccagctaaattttgagtttcccgtgaatccatatttcaaggttttatctatttgggcctcaacagcttaagcttatataagacgagccgattcgatcatggtttagtgacaactgacaagtgtacttgctaagaaccaagtaaccgaatgagatttggatttttagaaatgatttttcagttttactttggttcaaaccgaaaaagtaagccccgatcgcattcaattatccaaacacgataatcttgctcaattctactcttttaactttggtcctgtctgtttaaaagctaaagaagattggtccctaccaaaaaaaaaaaaaaagcttagaggatttgttttttgatttttttgctaaattttgcttagaggattggctgggactttaagataaagaaagaagaaaaaattacagttacagtttaatcaatcgacttaaatcatataaacttaatttcaatagataagtttgtattagtttagcttgaaaaatagaagtagtaaagagttcgatattatctagaaaactacaacgtaggaacaacacataaacatgtgaattgtgcatgcataaccccaaagagtggcaatatcaattatcaaatatgcaacacttgtaccattacatgtcattctatctttcatatttttgatgattttgcactttgaactctgaaccatccatgatccattcccttgacttgtaaaggttatcaatcaaacttaagtttttaaaaattaaatttgtagtcaagaatagtagtcatatatatatatatatatatacaaaaaacaaaaatttccccgacccaagtgaccgaaaataacgactacatgttttattcctcctttagtataatgcgacattacagtttggtatcagtagttttgtatccttctcacaatcacgattgttggtgtaataaactttattctttctatccaacatgttatagtttccacatttgtgggtgctgaaatttcgaccaatgtcactcgtagactcgtatacctaatcgagtttacttttatatcaacaactacagaccaagattcccatttcacgttgttgtttttttttgttttttttataaacatttttgttgttatcgctaaatcattagtagctagaatgccccgtacacggtcttgaaaaggagtcaaatatgtttttaccaaagaagaaatgtaagaaacataacatttaacaaaattttaaaatatattgactaacaatttgacccaaaaaaaactatcaaatttaataaaatacttttatgattatcatagtttttttccttttcaacaactttataatactgtagtggctcaaagaaaccaggtcggagaaattgttcacaaacgagataatatacaaattcaaaatatttcgatgaaacatttttgtcaaagttgatgaatagttttgcagcacataaaatacaagataattcgtctgatatttaggaaaataatattatcgtatgtgaaaataacaatatagacaaaccaatatttgtagattagaacttcacataaactacgaaccaaaggattttagtagcttcacatcaaagaataaaaatctaagtttcacaaagaaacaattaaatgatttttgattttgaaaatttaataaatagccccacacaacacactcatcttccttcacagccttaaacgtggagccaaagaaagtaaaaacaaaaggagagcaatggactctgtttcttcttcttccttcctctcctccacattctctcttcatcactctcttcttcgccgccgatcttcctctcctactctcctccgtatcaactccgccgtcgtcgaagaacgttctccaatcacaaacccaagcgacaacaatgatcgtcgtaacaaacccaaaacactccacaaccgaaccaatcacaccttagtctcatcaccaccgaaactccgaccagaaatgactctcgcaacagctctcttcaccaccgtcgaagatgtaatcaacacgttcatcgatccaccttcacgtccttccgttgatccaaaacatgtcctctctgataacttcgctcctgtcctcgacgagcttcctccaacagactgtgaaatcatccacggcactcttccactgtcacttaacggcgcttacatccgtaacggtccaaatccacagtttctccctcgtggtccttaccatctcttcgacggcgacggtatgcttcacgccataaaaatccacaacggtaaagccactctctgtagcagatacgtcaagacttataaatacaacgtcgagaaacaaaccggagctccggttatgcctaacgtgttttccggattcaacggtgtaacggcgtcagtagctcgtggagctttaacggcagctagggttttaaccggacagtataatccggttaacggcattggtttagctaatacaagtctagctttcttcagtaaccgtctctttgctttaggtgaatctgatttaccctacgccgtccgattaaccgaatcaggagatattgaaacgatcggacggtacgatttcgacgggaaattagcgatgagtatgacagctcatcctaaaaccgatccaataaccggagaaactttcgctttccggtacggtccggttccaccgtttttaacatatttccggtttgattccgccgggaaaaaacaaagagacgttccgatattctcgatgacgtctccgtcgtttctccatgacttcgcgatcacgaaacgtcacgcgattttcgcagagattcagcttggcatgaggatgaacatgttggatttggttctcgaaggtggttctccggttggtactgataacggaaaaactccaaggcttggagtgattcctaagtacgccggagatgagtcggagatgaaatggttcgaagttcctggattcaatatcattcacgctattaatgcttgggatgaagatgatggaaacagcgtcgttttgattgcaccgaatattatgtcgattgaacatactttagagaggatggatctggttcatgctttggtggagaaggtgaagatcgatctcgtcaccgggattgtgagacgtcatccgatctcagcgaggaatctcgatttcgctgtgattaatccggcgtttctcgggagatgtagcaggtacgtttacgcggcgattggagatccgatgccgaagatctccggtgtggtgaagcttgatgtgtctaaaggagatcgggatgattgtacggtggcccgtagaatgtacggttcaggttgttacggcggagaaccgtttttcgtagctagggatcctggtaatccggaggcggaggaggatgatggttatgtggtgacgtatgttcacgatgaagtgactggagaatcgaagtttctggtgatggacgctaaatcgccggagcttgaaatcgtcgccgccgtgaggttgccgcgaagggttccgtacggattccatgggttatttgtcaaggaaagtgaccttaataagctttaacaatataggtaactgcaatagttaatagaataattaagtcttaattacgtcccgtacaacaaatcgcatagtgttgttgcacacttgcactttatacattaaactaaagtacacatagtttggtggtggtcgatgtatataaaacataccaaagcttatgaatattatttttttcttttaaatatgcagcttctgttattggcaataaatcttataaatattcattcattccgagagttatcagatcttaacacaactctatttctctatttcatattagtggaagatgtagataaaaatatgagaatgctgagttttaatactcgaatatgacaatgtgggcaatgtgtcatgccaatattgtttcttaagcataaaaactgaatacattgttaataagatcatgagacaactatcagtcgaaatatgaatgatcagttaacggataaagaaaattaatgcacagaaaaagatttgtggtttagataaataaataggaacatgaaaaagattgtgttttagtgatgggaccaacgagacatcattgttttgagcaaaacatgaggtatggatatggatatggcccaacgtcatttatagcatatacaacgacctttagaaatgtaacctcttaaaacaaatttaaatcttttaattttagtagtattaagaaaaccttgaaattattgtgaattgggtgtagtggaatcaaagcaaacgagtggccaaagcaataaacgaacgagagtgacactgacatagatgtagatttatcctttcgttttgagaccaaagggtacaattatttacatttgttcgagtatatatatgtctgtccaaattttgggatcaagtttcacgtgagatgggtgagacttgatgaaaaaaaaacaatattgacatttatggcaatgaaaactattgagacagactcgtttcgtcacataattttgaatcgatcagaccaaatgttttctatggtactcgagtcttaagaaccaatcgtacctaaactatagatctattatcactagaccagttaaacaaaaaaaagttatacgatgcgactaataacaagaatcaatatgtaaatcttgaccaaacctattgaaatagagatcattagggtaaacatttttatttggtaatcaaattttctgaactgaacttattaccacaagttaaacattaggagtggtttaatcaatctaagcattcgaccaatatgcaaaaatctaaaccatatatttttgaaatatgatccataggaagataacgtctttgttcaggtgatagttactatgattgctctatttatctaaatgccaaccacacacaatggtccccataggatttgacctctacaatctaacataaggacattgttgatattagatattttccaatttccatggtaaatgaaaatgatacttttagcctcgaatcttgcaatgaaatgatgtccaaacacataatatattcttttctttttttttcttccttttaagtatgatgataagaattaagaagcaaggagcagaaaatgagcacatacaggttttattttcaatctgggaatcgattcttctctctcaaacccaagacacttggagatgaaaagagaacttggaccagctctgtaaaagaaagaatttggagaaatacacaaaaagggtaaagaggaagagagtgattggtagttgaactgaggttaaattagtaatcatatataagtatatggtatatagaaagaattacatgtcaactgaaacaaggaaatttttgctcatgaagttttcccatttttttcctttctatattgtgattctcataaccggaaaatagaaaaaattaggctggtgtggaagtgacaaaagccgtaccaaaaatttctcctacattttgagcatgtgtgaatcagcgagcgatgaactaagatcttctcgagattgcgatcttcggctttggagacgcatttgactcctgcgaggggaggaccagaaggaaccagtactgtcatattgtatatcccctaagctatcagaagaacaactatgcataacgcagctactcgatgagtacaatgaagattccatgagctggatgctgcttccaaaactaaatggcctacgcggtgatccccgaactgttggactcaatggtgtctttacccctgaaagaaaataagctctaagaataaatatcttcccaaaaagaaaattaacgacacaaagaaagacaatgttaagaactgagaacagaagaactggccataactcaagattatgcatattgagttacctgtactcataggactccatcgctggaatctgaagggagacgggatgttaagaacagacgaagctgaggtgctattgtgtctaaaaagtgggagatatgactttctaaagaatcttggcaaacaattgctgacacgtgatagtgcacagagaagcagaagcagtgacaagatcaagatagatataagggcaattgggtttatcttcatgctcagagtctcatagctcttcagtcccaatgtagaagatagagccttccccgattccagaagagctactccaagtgtccaagttatactcccagacccaattatgatttgcttatctgtaatatataaaccttctcgtaacagggagactatgtatggcgctctaaagcagtactgttcaatgaagggttgtggagaaacactggttctggctacttgccaagccttgtcacaaaattccctacccttttccaatacatcatcaagggatgcttcagcacttaagttgaaaaaacggtacaccacgaagaatccggatacagcatagaactgaccatgaggacgagggtaaccatcaggaagagcacaaggctgcaaatcacaatcaactccatgttttgcgtttgaccattcagagctatttacagcattttttgcaagtgcgctgcactctccccagtttggagcaccaacgagcttgatagaaactcctgactttccttttttacctccttggacactggaagcacactgagaacatatgtactgtccattgtatccagaatttaagcacgggtgtttcatttccaattttccttcaatcaaatcagatttgttgacatttggtagcttctttaaaagatgaacaacagacctatcaaacgcatcattaagaccatatccggcaagagaatatgcactaagatgatggttaacagacccaattctgagatttaggttggtctcattatgcgtccgctcctcattctcaaaggttacctgcaatgatgagccacctaagtcaagtgcaccaaatgttgccttctttggtagggctcccaacatacttgtttggtaattaagggcggtccatccaaaataagcttcctcagtaccactgatgatcttaacccactccctccggcaagtgaagggagacttcgctagtatagaccacacattacctaaaatccagcttgaatcagcaggacgaagcctccggacgcctgctgttgcgtaaacaaagagagatgtggttctatgagcattctttgggatttgcttctctgcccactgaataaggggtttaattgcagttttcaggcctgttctgttattgacgagcttatcaaacccaggctctgtctccatccgatcataagcacgacccctactctttctagaaataccttctgtcaaagatttcataacaatggggagactactatctttcttgtagtttatggaagcctgataaacatatgcacgagtcccagtacttccacagtcaaacacaacataatatcttgatgctccccgtgaccagtttgtataaatatacatggagactatatacaccagaaaagcaaacagaaacaggcacataacaatcataaccgcgcgtatcaatttacggcgtgtagatggattggtcccattagggacactccccttttccttggaaaaacttgatccattttgtccccatgatatagcttcccgaggaagaatggattcttcaggatcaaacccatggtacgaagaaaaatcttggagagacgctgagtgtctcaaacaattcttccgtccaccattcccaatacttattgaatccgaaactgaggttcctacatccggtgatgatccagtaggcatatatggaacagatgattgtgaacccgctggtaatcgacttgacgcagctgtaaaaagttcagtgatcctaccaaaaaccatttctcttgcctacatatactaacaaactcaacacaaccttctccgttgtctttactcaaatgcagaagcacaacgaactcttcagattcttcattcttctgcagaaaatgttaactacacaaatcaaatcaaatgcattcaacaatgaatatcgacaatttatgtcttcaatcaaaaatctcggaaaagagcttgagtgattcacaaatcaacaaacacaatgaaaggagcgatctgcagttaaatcaacattgcgataacaacacaacgactcaatcataaaattggatagctagggtacaataccagaaacacgcattggcatagaacgaagacgaaacttcagccaccgtcaaagcttcctcagctcttagatctcgtatctcgctctgcgtctaaggagtataaaagcacatatacatatatgagttaatcaaccaatcgtcgtcttcgtataagaaaaatcgagaatcttaagcagatctgatgagtatcggggctaaaaccacacgactcagaccagaggaagacgaagacgttggagagagatccgttttgtgcagaaaagactctttccctttttgttctctgatttttattttctctcttcaacagaaaacgtcttgctcaattttcaatttccaggggaaatttagaatgtttgaaaacatttggggtggaaatgtaaatgaaataagtttatttctttcttagtaatttatttaacaaatcgtctatttgttggttaaaaaatgctaatggcgccgatattaaaatgctaatggtgtgtgtcactcatccaatttgtatacctttaagagattacctaaggctaaaaacaattttagttgccaaaaagaaagaataaagttccacgtttttttgataactcgtgtgatttttttgcgaaaaagttaaactagattgggataaaaccaacttcttttttggaattcgtacatttgccactactgttatgtgttcttaccaaataagacacagctttttcttggattgctttttccaactttatgatatcccccttttaacctaagactatattgtatatcttgcactgaatgttatctattgttaaaaaattcaaaggtaaagataaaatgtcatcttcatagctaatatatggtttagatatataaccaatgcgaattagatgagcttcaagattaaagagtaattaacaagggagcaagtacttgtgaatctgtgattagtagtaatcgaagaagatattaataagagatgaaagttaacaaaaagttatagctgttgtaaaatgggatctcgtctgaatcttaactttttggtatctttttagtctgcagatttcacagaggaactgggtaatccagaaaacaactgtcctagtctgttaactgtcccattaaatatcagaggctctgaggtttttagaccatggggcgcaatcccaatcccggaaaccgctgtttttcgctctctaaacgatgcccaagtgaccatatagagtcctagaatgatgaagaatccacccacaacgctgcgtagaggaaaagaaaccgagttagaaaattttgcaagtgaaaactgtgaaatggaacaagatgttgaaaagtgaaagtgtttaattttgcaagtgaagattgtggatggttgaaaaagattccagaaaatgtatctaaccttccgagataaatggggctaccgagaaagattctcgataggaaagctgatgcagcgggttgaagaggattgtagagagcaaccaaggcaggaccaataatcttattggaccaagtcaagagtccatagtttagtgctgatgcgataactccctagagagaagaaaaaccagatgaaattgtgtcaaatgattccacgagaaacatgtgagtagatgaaaaaaaaatcttgatgtaacttactgcatatataactgcaagaacctcagattgtgttagcttccaatccaatggctcctttaccataaagaaagctgttgtgcacattagtactgtgccaaagaagtatgataatgcagcaacagaaagatttgccggatacttcttcaaaagtggcgcctggagagtttccattatatccacattaaaagacacatgcacagaggttagtaggctgcagtttatgcgttggtctaaacctaaccataagaaacaaaaacaatgaagagatttacctgaatggcaagaaaagtagccatacacatgcagtttccaatcaagcataaaactccaatgtgccattgctcaaatccaagatcgagaaaaccagagactaaccaaccagtaggctcaggttgacctttagcactgatttcattgttcatcgcaaagtctgcatctttatctcctaacaaggccggacctcgaaatacaaccatgaagacagcacccataacacacacaagtgtgcctccaaccttagtttgaccttcgattctcaacaaattcactctttctgtactgcataccaagtaggagacatcaaaaaaccaaaactgaaggcatatctaagaagagaacccttataaagaatcatactcaccccatcatgacagccaagagaaaggtgaagaccgggatggatggttgaatggcagcagcataagtgggatttgtgtatgtaagaccgataagaaataacaactggttcccaaataccctatcaaaattgagaacaaagcagaggtggctttactgagatatttaacctctataaacatgaacacaagatattgagactggatagagatgatttcttaccctgctaagcccagaaagaagaatgacaagagaaggcttttattcattggagttctgatctttctacatacatgaaagacgaacactgttcactgattagattttgaaaacttgaacattcaaagtttgagagtggtctcgcttaaacttgacgcattacaacctcctaaaccattctttcatttactgatagaactagacaaccctagctcgagaaaccagatcctatttatcccaaaacccgaagaagagacatggaactcagagaacattatcaaagacattgtatctaaatctactaacagtggaagtaaacggaacacagatctcaacttaagtctaggcacattgctccaactctgaaatctagttcttctataatgcagatcacattgactttaaatcctcaggagaacttctacagattcatcagagaaaaacccaaaagcaaaatacgaaaatccatactaatggatcaggcaattacaaggggactgtgtatagttctcacttcatatataaacccacaaattgatcataaaaccaggaaaccattgaaacccatctcgagaattcagaactaaaaacagaggaaacaaaaacaagttgaaaaagaagagacctttcgcggaagtaagcaagaggagcgagaatagagagagcaagaagatcacggcatacacagaagacaagctggttgactccaacattaagagctactttagtaatcacatggtatccaccattaaagagctgaacaaacgccatagcagtgtgcgccatccgagcgtctctctccgccgccgatccacttccggtcaggatcatcggcgccgtcatctttccgatttactcggcccctctctgacttgtagttataagttatttctaaagcaaagactaaaaaagtaagatcctttacttcgttagcaacgaatctgcttcttctatttgtcgagtcctataggttctgtgcaaattttcatatacaatatctaggagatttaattctcaaatcgatctacttttatttgagtctgtatcattttatcaaaatatattcgtgtattattaaatctggttaggacatcaggctcatactcataggctgcctaatttaggcattaaaaattgaattttcataagtattttgaataaaccatttgactcaaattttaattgaaatacgttaaaatttgtaaataaagtaatcaaactagggccagaataaaatccgaaaaccgaaaaccgcatccgacgacttcaaatcttcaaaactgctcctctcttctctctttaaaatctttcagagaggtaatgttaatcatcggttaggaatctcttccgggttttcccggatctgtaaatatctctctttgtaagatttaaataatttctgactctttgtcggattctgaataccggctaagttcggttttttgtttctcgcttctgcgagatagatctcttcctttacgcggattgaagactctgttttactttaaatctctgccaatctcaccaacatttcgtggagtaatatcttcatcaattccttatgcccatagagtatggagcaaagaaccaactacatcaaatttggtgttgtcaatgatggagctttcctggagtttggatatgctcgaagatttttgaagccaatcctcattcgacccagagattctcgatgtcttagccttgggtttgagatcaccagaaggccggaggttttttatcgctatttggccgattgacggtggatcatcggactttcagcggcggtcggtaatttcagcggtggagctcaatgcctagacacgtggcgtaggatcgtgatacatcgttgatacatgatgtggatcgcgacacgtcatctgcaagtgtcattaaatcaatttgcgttaatgtttatcttttcttagattgattttgggtctgggcctaacttgctgtattcctctatggacttgtgtaacttgcccatttgggatttaatgaaataagccgacaaaaaaaaaaaaaaaaactggaaactgtaaaacgatatgaataatctggctccgaaaccgaacatataaagaattctcctatccaaattaccggaaccaaattcgactcgaatcaaaaaccgaacgaatatctgctaattcgaaataaaattatatatctaaaaatattagttatatttagttatactttatacccaaaaaatactaaataactaaaatatctgagataatttttatatccgaaatttttaagttatatttgttataattatacaatattttgcaaaattaaactaaattttagtaaaattaaacaatttttttgttttttctctctcaaaaactgatccaaaaacgaatcgaatccaacaccatccaaactgaaaccaaaccgaataatcatataattcaaacggataataaactccctcatcctgattattcgaatccgaaagtattcgagctaaatccgatccaaaatccgagtacacaagcttaaatcaaacaatagaaataaataactaatcacagttgcaaattagatattttttgaatataaagtttacaaattgaaattataaagaaacggagggagtaattaaaattaaattgaggtatttcaataaccaaaaagcccatcattgggtaaatcttcacatcgggacatggacggcgaaggggaagggagcggaatacggctgagcaagagattcgctggcgggaaggtcaccggcggtagcttagaagtcgattacaagaccaaatccggtaccgcttggagccactctttcctgaatcagaagccatggcatcctctttcttatcccaatcagcgccgcaaatggatcgccgagcagactcatgcccaacacgatcgaagagcggaagaggtggctcgcgaggtaattcatcgcacatcgtctccaatttctcgtgattgtgttattgattcaattcgtgttttccttactccttttttcgtggatttgcagtttgcgcaagagcaggaatttttcaagcaagcagctcttatctcgaagaaagaaagagagaaggttagtttttctgagtaagattagggtttatgttattcagatcttgttaggagttcagtttcgaggataactttgttcacaagtgccctaatgcatcagattaggtttctgtagtctggtgatgatagttttgaattcttaggctgaattgtaatatccacttgttgctgactcttaccaatcagaatccatttgagctatgtcttaactcttttgatccttagttagatgtcaaaacctatacaattattgaaatttggtgaaactagtgattttacttagttttgtgttacatgatgttgattcctgagattaatgcgcagatcgaaacgatgaaagctgtgagctttatgtatgttcgtccacctggctatgatcctgaaagtgccaaagcagcagaatacaaggatgagaaacacaagggtcagggttcttcaactcaggatccagtggcggacgacaatgttggttctaggtatgttgacagaaacagatatttggtttgacaaattattgctaggacgatattaagttaaatccttgtggttgaaatttgacaatattctctctttgacgcaatgtagaccagaagaatcacaaggtgggggagaacgcacacaggaaaggaagaaaccacgacccaaagatgtgtttggtcgtgctcttcctactgaagaagaatttgaggttcttaaaaatgcaccaaggtatgccatattcttttttactctttcaaatatgctaattgttaagtgctccagtgtcattgtgaaattttgcaacatgcaaatgaaaattttctcatcacatactatgattggaattgtgcaggatggagactggtattcctgggagagtaaagccatttgcagttgaagtgcgtaatgtgaaatgtctgagatgtggaaactttgggcaccaaagcggtgatcgtgactgcccattaaaggatgcagtaatgccaaatgaagaacttcgattgaaaagagatgacccgttgactgctatcattgcacatacagatcctagtgaggttggtcttaatttctcttaattctcatctttcagaatcgtttagctggcttaggtttcaacaactgaagtttgaatggtttatgtatcattaacctgaaatgctctttaacttcttgcagcctctgaagtgggaattaaaacaaaagccgggcttgagtcctcctcgtggtggttttgatcctgatgatccaaatcaacaaatcgtcgctgaagatatatttgacgaatatggaggtgaatattttaattcctttaattccttaaaggttttttttttcacaaatcccatctcattttctacatacttatttcttttgatacctcagggttccttgagggcagcatcccaatagaaatactgaagagtatgtcgtcggataagaaaagaaaatccaaaaagaacaaaaggcacaagaagcattcatctcggactgttgaggaaactgatgaatcttcaacaggctcagaagatagtagagagaagaggggatcaaagaagcgcaagaaacttaagaagaagagcaagaagcagtatgattctgattcactctcctttgaaggttcaggctctgatagttaccgtctaagtaggagaagacacaccaagcatgtagatccatctgcctcattaaaatctgaggtttaccatcaaggaaacagtcacagagaaaagcattactacgacgagaagcaccagaaacggaaggaaatcgtggatagaccgtctgcttcatccgatgattcagattattatagaagtaacagtagtagaaagaaaagatcagaagatgattacaaaagccatcacagggagagaaagcaagtgcatagtaacgatcctgtttcagagaaaagtcagaaacagcattattcggagtctggaaagattcagagagtcgagaaagagcatagatatgatgagagaagacacagatacgtcgatatggagtctgaaaatcgtaatagatccgagaagaaaccgagatatgatgatcgtgattctgagaagcatcacaggagtgtgaagggcaaagaaaagcatgtgtatgaagcatctgatgatcctgaagagttttctgacagatacagaagcacaaagaaaactgaatctgattcggaatcaaaccgtagaagtagaaagaagaagcatgagttgtcttccgaagaagaagaaggggagtctcgtaagcatcgatacagcactaatagaaggagaaactgagtctatgctatgtcaattgtcctggaccaagagttatggttccggtctgaatgagattgcgagataatgtagtaatgtacgattgttttttttttggtctatgtatactgggtttataaaagcttaatgagtccatgactctttttattattcgataaagctaaaaaaaaagattacgttcaggaacaacgaataaaacggtgcattttaactgttactttcccgccaggagtcattggagagcaagtgagaaaatccatgtccttgattcaccgacggctatatcgtatatctggattatcgtctgttaatgcttggaatttgcagatacgagaagcggttaatagaaatgatccggtggaatcacttcttctgtttcgagaaatgaagcgcggaggatttgaaccgaacaactttacttttccatttgtggcgaaggcgtgtgctaggctcgctgatgttgggtgctgtgagatggttcatgcacatttgataaagtctccgttttggtctgatgtgttcgttgggacagcgacggttgacatgtttgtgaaatgtaattctgtggattatgccgccaaggtgtttgagagaatgcctgagagagatgctaccacttggaacgcaatgctgtctggtttctgtcagtcgggtcacacggataaggcgttttctctatttcgtgaaatgagactcaacgagattacacctgattctgtgactgttatgaccttgattcaatctgcatcgtttgaaaaaagtttgaagcttttggaggctatgcatgcggttgggatacgtttaggtgtagatgtacaagttacagttgccaatacttggatttctacttatgggaaatgtggtgatttggattcagcaaagttggttttcgaagctattgacagaggtgacagaactgttgtgtcttggaattctatgttcaaagcatattcagtttttggtgaagcatttgatgcttttggtctttactgtttgatgctgcgtgaagagtttaagccggatttgagtacgtttattaacttggctgcatcgtgtcagaaccctgaaacactaacacaaggaagattgattcattctcatgcaatccatctcggtacagatcaagatatagaagcgatcaatacctttatttctatgtattcgaaatccgaggatacctgttcagcgaggcttttgtttgacataatgacttccagaacatgtgtttcttggactgtgatgataagcgggtatgctgagaagggcgacatggatgaagctttggccttatttcatgccatgatcaaatcaggagagaaaccagatctagttaccttactctccctcatttcaggttgtggaaaatttggttcacttgagactggaaaatggatagatgctagagcagatatatatgggtgcaagagagataatgtcatgatttgcaatgctcttattgatatgtactcaaaatgtggaagtatacatgaagctcgagacatattcgataacacgcctgagaaaactgttgtcacatggactacaatgatagctggatatgctttgaacggtatctttctcgaagctttgaaactttttagcaagatgatagatttggattataaaccaaaccacataacattccttgccgtccttcaagcttgtgctcattcgggttctctggagaaaggttgggagtatttccacatcatgaaacaagtatacaacatcagccctggactagaccattactcttgtatggtagatcttcttggaagaaaaggaaagctcgaagaagcattagaactcatccgtaacatgtcagctaaacccgatgctggcatatggggtgcattgctaaatgcctgcaagatccaccgtaatgtaaagatagctgagcaagccgctgagagtctttttaacttagaaccgcaaatggcagctccttatgtagaaatggcaaacatatatgcagctgctggtatgtgggatggttttgcgaggattagatcaattatgaaacagaggaacattaagaagtatccaggtgaaagcgtgatccaggtaaacggaaagaatcacagtttcactgtaggagaacatggtcatgtagagaatgaagtcatatactttacgctgaatggtttgagtttgtttgccaaagataaacacgtattgtataaagatgtgtacaaagaacaaagttatgaacttttcatttgatgacaatgactttttagtggatttgttgttattacttttaggatatagttttgtgatggggaatctagtgttatcaacatgtgtttgaataattaatattacaagatatgtaaaaggaaaaggtaattatgatttgtggaggaccagattcttttggcattactttattttattcaccactaatatatttctggaatttattaacttaaaaggataaagactttttagacaactttaaataattacataacattaagaaaatatatttttccttaaccatgttcttagaactccgtgtccattgcgcgttcccacgacgtagatattttctttattatactttaccctttttgattttcgtattctcgtttaaaccccagtactttcttaaacacccaacagagccacatgtatccaacaaaaactattttttcatgcatcataagtgcaaaacactcataaaaaataaagtgattgtattcatgattaatttgtaactgttttgttttacgtttttttgtatttggagtatagatacgattaaaattacaaagactacaatgctttttatttatgattgtcttaaaatacgaggactagaaaacaattaaaatataaaatagataagatatgcttattcaaaaatgtaacgcgttaagtaattaatatttttggatacatccatccatatatatccttctccattagcttttgttcttctgttccaattccaattccttctgaaatattcatcgcaattcgtatcggtaatttttccttttgatcgcattttttttttatctttgatcttccgtattaaacgtgctcgatctatatactcaatgatcttatatgtgtatgatcatgtaatttggaagttgaaatgtaaatcatctattccttggtaaattattcttcgattttttttctgatataggttaatggtaattcctgtgatttttactgatgtaatctggtgttgattgttgtgaattcttgatctatgagattatgtcttagatttgccaaatgttaagtttgtttgatctttgacaaaatattgtaggtttaaagtaaaaaagcaatgggaggtggtaaagacaagcatcatgatgagcaagagaaaggatttcatggttttccaggaggtggacattacccacctgctcaaggaggttaccctcctcaaggttacccaccacaacaagggtatcctccagctggaggctacccacctgccggatatcctcctggtgcttaccctgctgcgcccggtggttatcctcctgcacctggaggttaccctcctgctggctatcctgcacctggagctcaccattcaggtatgcattgtctcgttaaagagctcttctttgtagttttggtaaatgttgatgttttctatgcaaaagctatggagtgtccttgtagcttgcttggattatcaacctgctaaatattgttaatcattgaatgttaataggaaaagactttataaatgtttcggttttctatgaaaaaagctaaagattgtgcgtgaagtttgctggatcattaaccttcgaactttgaatgataatagaacaatagtttgtaaatcttactgttttctttgtaaataaagcttagaactggccttgttgtttgctggattatcagcctgctaagtattgtcaagtttgaatgatagtatgacaattgtttctgaaatgttgtttttttttctgtgataaaaagatgaggacatataaacttactgtcttctgttttggtgtatacattgatgttttaattttaaatctactaggagtacatgtttaatcgtgtgtgcttatcaatatgcaactttgtggtctcttatatgcattctgctactttgtggttctccatgtaatactattttcttttttccatcaggacattctggtggtggactcggaggcatgatagcaggtgcagctggtgcagccgcagcagcttatggagctcaccatgttggtcacgcctctcacaacccttacgggcatgctgtaggacatggagggtatggccatgcccctgctcatggctttggccatggtggtcatggtaaattcaagcacggaaagcatggaggcaaattcaagcacggaaagcatggaaagcacgggaaacatggcatgtttggaggaggaggcaaattcaagaagtggaagtaatctcaaaaaccccacctttgatcctctcctccagtatagtctcattacctgaccgatgtttctaataatcccccttcaaacatatttcattttaactatgtcggtttagagattactggttgaggaaataattggagagtgctagtataaaccttatggtatctgcagcagaggtttctttaatctctcaatagtagatgctttgaaacttatctataatttggtattgtaatgacagtttgtgtttggttttttcttcagtatcttctttgtttgatcatttgatgttggtggagttctccaaaatatttatgctattgtagatcctaacctttctatcttgttattcttcgttttttggccattattttcgtttcgctcccgatccaaattccaaagtacttcaacaatatcttatgcaataacgagacaaacacttaaggtcgtgcaagaatagtgtctgtttttcactgattcacttttacagagaacaaactgaattaattttgattattgaatagttgacatgcaataatatttgttaatccaaatgaatagataaaaaaaaaaattccttgagagtaaagaaactaaattttggaagacaatttttaactagttttctctaaaactaggaaagtcagaaaatgagaaaacaaatttgattttattacggaagtgaagggctttccgacaaattgctttgctcagaccaaactgtaaccgacccaagcccaataaaaaagcgaatcgggtcaaacgaaaacagataattcagaaaaccctaaattcgtttctctttttttttcttcattctgagcaaagcagtaactctcaggtgcgtgtgctctccgctggttccttagaacaatcggcacacgctttttcatttcaatcttcttcttctactcttaagtatctcaggtactaatctcgatttctctatttctcgtccatggagatttagatttcaagtcagatgcttttcgatttgttacagatgtataatttttgtaatcgattgattcgcagcttggattgtattgagccatcgacataccttcaaaattcttataattgtattgaaagtgtttgaatttaatgtttttttttttctttctctcgattgttttgatttctgggcaagtgtcaacttttgtaacagattagtgacctttctctttatagatatgtggaagaatttggaatttacaaattcggttcaccatttttatctgaagcactgaatttgcgtttttcaagcttgagtgaatattatttcttggctcttaagattttgcatgtcaactattatttcatcattgttagcatcttgtggtgttcaagttattattttaaatattgtttgtgctactctatagttattccctatgttgttatttcgttcctttgccttagcgtgacatctttatttggtatatttgtatctgtgtgatttagtttcttcaggctgttaaactatagatttcatgtattttgtaggtctgttgagagatggcagatcgattgacacgtattgctattgtgagttcagaccgttgcaagccaaagaaatgtcgccaagagtgcaagaagagttgtcctgtggtcaagacaggtgtatatttttattccaaatttggatctgtggtctttcatgtggatttattattattgtactgtaattgattagctttgttatgtgcgtcatgccaattagtagacagagaatggttaggtgtttatgtgaagccattagcttatagttcctacttgaagttgttgtaactctacaaatttttagtgccacttgttcattaacttgccttttatcttaggaaaactttgtattgaggtgactgttggttccaagcttgcttttatctcagaggagttgtgtatcggttgcggtatttgtgtgaaggtatgtatgcataggctctttccgatatccaagatgcctctagaaatggcacctaaactgggatgctaaatgactctgttgttacacaattgcagaaatgcccgtttgaagctattcagattatcaatcttccaagagacttggagaaagatacgacccatcgttatggggcaaacacttttaagttacacaggttcgtttatctactatttttcctgaaacaaattgaccgctcttgtagttttcagacaatgaaatctttgtctttacttccaggctcccagttccaagaccagggcaggtgctagggttggttggaaccaatggtattggaaaatcaactgctctgaaaattttggctggaaagctcaaaccaaatttgggccgtttcactgtaatagcctctcttgagtttctaaacttttatcttcgaaatttggtctctttcatagttgatgtgttcatatattccttgttgaacagagtcctccagactggcaagaaatcttgactcacttccgtggttcagaacttcaaaactacttcacacgtattctagaagataatcttaaggtacagttgaaactgatattaatatttttctccatgaggtagctaggtattatttgatgtttaagcagctcaattgagcaagttctgataccctgtgcatggcaggccattataaagcctcaatatgtcgaccacatcccaagagcagttaaaggcaatgttggagaggtccttgaccagaaggatgagagagataagaaggcagagctctgtgctgatctggagctgaaccaggtcattgaccgtgatgttgagaatttatctggtggtgagctgcagaggtttgcaatcgctgttgttgccatacaaaatgcagagatttacatgtttgatgaaccatctagttacctcgatgttaagcaaagactcaaagctgctcaagttgttcgttctctcctgaggcctaataggtttgaatttcccagcttctgaagtttttttttcaaaagggataaaaaataaggtacttacattgttttttttttgttttttttttgtttcccagctacgtcattgttgtggagcatgatctcagtgttcttgattacttgtcggatttcatttgctgtctgtatgggaaaccaggagcctatggtgtggtgactctccccttctctgtcagagaaggaatcaacattttcttggctggatttgttcctacagaaaatttacgttttagagatgaatctttgaccttcaaggtatagatattttgtatgatgaaaggcaaagttttgtcgccaaggcaataaattgttttcctcaatgtttttcttttgtttgaaggttgctgagactccacaagaaagtgctgaagagatacagtcgtacgctaggtacaaataccccacgatgaccaaaactcaaggaaacttcaggttgagagtgtcggaaggtgaattcactgactctcagattattgtaatgcttggggagaatggtacagggaagacaacatttattcggatgctggtattctcttcttccatgatatgttctcttgtggttagagttttagaaagtactgtactgtaaagttgtaatattggtaatatttgcaggccgggttgttgaaaccagacgacacagaaggaccagacagagagataccagaattcaatgtttcgtataagccacaaaagatcagcccaaagtttcagaattcagttaggcacctgctacatcaaaagattcgagattcttacatgcatccacaatttatgtcggatgtgatgaaaccacttcagattgagcagttgatggatcaagaagttgtcaatctctcaggaggagaattgcaaagggttgcattaactctgtgcctcggaaaggtaattattttgtttcagacgtctatatgacgtagttgctttctttctctcagtgatctcatgcatccacaatgtgaattcttacagcctgcggatatatacctgatcgatgagccaagtgcatatctcgattctgagcaacgtattgttgcttctaaagtcataaagcgatttattctccacgcaaagaaaactgcatttgtagtcgagcatgactttataatggcgacctatttggcagaccgggtcattgtgtatgaaggacaaccatccattgattgtactgcaaattgtcctcaatcactgctcagtggaatgaatctcttcttatctgtaagtctcctattatatctcttagttacaccgtatgggcaagagaagagggcataaaggtttggtgctaatgattcctattttatgtttttcgttaccatgcagcatctgaacatcacattcagacgggatcccaccaatttcagaccaagaatcaacaaattggagtcgaccaaagacagggaacagaagtctgcaggctcatactactacttggatgattaggacaactaccaagaggttcttgatcactaaaatccaatcatgttttctcaatcatacaacgttttatggaatcaacatctaaaatgtttgttttctcttaatgtccttcaatggattcacagaatatagggcattgttcgaattccagaagggtcttttgctcagaggaagttgatctatgagctcggaatattttacgcagccatctgttttccgagtgcataagcacagatgtttctttctggtcaagcttttaattgttgtttcatcagttttacttctacattttctctctcacagcttttattaactgagcaataaaagtttaagaatctgtaacctttttttctttttggctttgtacttcctgagttgatgatttcaacatttactgtgatgttactactttggattttacaatctattgcctatttttacattattttctttcttcttacacagcgtctaactcactgatataggaaaacttcaagaaacagtatctaaacacctaacgtcaataacactgtaaccaggaagctttttcaaggcattatcctccaccatcttccgtagtcttacagcttcttcccaacctcccaatccaacataagtatttgccaacgagatgtaataagatgcattgtctggttccatttcaaacaaaacttctgcaacttcttttcccaactttgtatccccatgatagttgcaagcgctcaacaacgctccccatacacctgctttttgtggctcaccaatccctgtgatgaactcataagcttctctcagtttccctgcccggccaagcatgtcaacaatccaaacccgatgctcagtaactggtttaaccccaaatttttcctccatttgcttgtaataacttagaccttcatcaataaacccagagtggctgcaagctgacaacaggcttatgaaactgctcttgtttggttccatctctgagttactactcagttccttgaatagctccattgccttctctcccattccatggaatccatgtgcagagataacggagttccaagcagaaattgaattcacccccgagtttctaaacaccttcatgccagtttctagcatcccgcagctactgtacatgtccacaagtgctgcactgacaaaagggttagcttgaaacccacgacgaatgagatgacaatgtgcctgcataccatagctcgttgacccaagctgagtcgacgcagacagaagaccaacaaatgtgatctcgtttggctctaacttgaggtttctgaagagttgaaacacttctcgtccagctttgttctgagacaaagctgatatcacacagttccaagaacacaagttagggtcagagattaagccaaaaaccttcactgcactctcaatgtctttacatctaccatacatggtgatcaatgtattctgcagttgggtgtcaagttctcttagacttttaatagctagaccatgaaagcaccttccttgtaagaccagtccgaggtttccactagctgaaatagtacccaggagagtaatcaagtcatgacgaattttcccttcacgactcattgcttgaaacgctctcaatgattctaaatggtgaccacttgatgcgcagccagagattacagagttccaagatgtgagatctcttgtttcggacatcgtctctaaccgcaggaatgctgaagttaggtccctgcaaccgatgtacatgtttataactgaattagctgaaagcatattatccccaaaccctagcttttgcagccaacagtggactgatttgccaaagatgagagagtcagaggaatcacaagacgtaagaattgccaagacagttgacaagctaaactttgaacaagaatactcactgacaacttccttgaacagattcttagctttgtgcgtaaagccgttttgcgagaaagcagatatcatcgagttccacgaaaccaagtctcgatgtgttgttgtcttgaacaacaactcagcctgagttgttaagccacatttaccatacatatcaataacgctgtttattacctctaatgctctggattgcatctccatgcgaaccgtataaccatgaactgctcttccctctcgtgaaaaacttaaatcaccacatatggaagttattgaaaccacagtggcgatatcaggctgaatcttatccaccgattgcatttggttcaaaataccaaatgcttcttcaaacattccatttgcagcaaacccattaaggattgcgttcgaagaaataacatccctgcacactaattcttcaaacacagtttccgcagcctccgtgtccccgcattttgagtacatcgaaatgatcgagttgcccacagagacatgagcttctggactataacctgattttataaccaacccgtggagtgattcacccaaagtaagttcttcaatagaagagcaagctgagataacgcatgaaaaagtcacagtatcagcttcttgtcctgaaccagtcatcgacttgaaatattgcaacgatttcctgggatgaccatttgcaagacatttagtcatgatcgtgttccaagaaacaatgtctcgatgctccatatgcgtgaacacacactctgcggagctcaagttctcgccttttgcatatagattcatcaatgcattgcacaaactagaatccccaaccaaaccagtctctattgctaaacaatgaagcattgaacattttctcgaaagatgtagactagataacgcagaagctgcaagtaaaagcgtggttgaatcaaactcatttcctttatgaatcatctcaataaacaatccaacagctgcaatgtaacgaccattttgattcaaagcagtgatcatactgttccaaacaatcacatctttctctttcaattcatcaaacagacacgaagaagatactaactccccggttctaccgtaaaacgtcagaagcttcgaagatgtagctaaatcttggagtaaaccacacttcagagcgaaacaatggacactcctcggagtctctgtctctgttctcatcataaaggatctaagtacatctcgtaagaacataaagctcgactccatagtcctattctctctctcaggcaattcgtcgaacaggttatggacaataggagtaaccggagacaaaacagaggacgtgaagtgtcgcttatgttttctcttactgaagtaataattagaacaatagccggaaggagaattccagcgagaaattgaatgcctaagagagtcgattatgtgaccggaacaataaagtctcaggcttttcggggaaatcgtagaacttcttaccatcaccaacaacatcggcggtttcccggcgccggcgaaagagcatgtaaaactacgaattgggtattttattgggcctacgttatatattggggctttttctcttatatattgggccttttctcttttaatgatttaattgtgacaaaagccttagatcaatgatttaatttggggattaaactgataatttcaaaagcatataataatactaatggttaagagttgatgaatgattaattagtaactaattaaaaatgtctcccagatccgtactgtacccgttacctctcccgaaagcattgcctatattcaatgtttcatgttcccgaaactatattaatggttactttttcgttttattcgatatgaatcatttgattaataatgatcactttttttcttttgttttaagaaacacataactgcattaaatgtcgttaactacatgtttcttaatgcacattgactttctattttgactttccccgatcgatgtacgtatgacgtacatctgctttcgtgctcatcaaattagacctaaccacgtgtcttctacatttattattgttgtttgtcaatttcattataatgctaaagtcaaactaacattattgttaatttacatgttttagaagttataaatataaatgttttaagtatcaatgtttagataacatttgactaataataaaaagtaagaacattacgagtcttttgactgctgatgaagtattctttttacttgatttgctaagtatttatcaagttttgcaataatacatatgaaggtatggttgagtatcaagaattaatttgttgtgatcgacttatatactaattgcaataattttatatgcgactatagaatacttatataatgattatacttcataacgacgtgttcttattcttattataaaaacaattagagcaatgcaaaacaaattgtacaaccatgatctgtaggcatgtggatgaatattgcttattatacttggatgcgattatttaaaggttaatgtaattaaaaattagtagatggatcaatcaatgcttaatgtaattaaaaattaatagatggatcaatcaatggttattacttatagtaatcacaagtaaatgaaatcaaattagctaactgtctaaagtctgatatcaacttgtacccgaatcgttgcgtactttgtattggccaaattgtggttaactttatataaaataataactttatgccttatacactttaatttggtcacaagttttaactccaaactatataagcattgcatgttttgaactttcagagattctctcatacacaagactataaagattgaattattgtatactagtattatagatttacatattttgtcgtaattatatgttgtgtaaattctttagttcgtagtaattgttggaacttaaaaatacgcttccttcagtaaatacatgagtttatatatcaatttcgatgatacaagcacacgattgatatatgtttatttagtttttaaaattagtttggaaatttatactataacttatcttaactaatatgtatgcatgcgtcccaatgcaacgtttattcaataaaaactcgacaatgacaaccatacattggtaacaaagattttttaaaaaaaatcaatatatatatgagcataagaatatttgaattgaaaatcattaaaaatatatattccagcattattaaaataaatgaataaattcgtgtgacaactagcatcttacgatagtgaagaaaaactgtccatggtttcaattgataccgcttagtgaaagcccattgttctcgcacatccttacgtttctttcattacgtaatttatacttatcaatatttgtttttttctgtcatgggcgtaaatatttttgtatttcttatagttattgaattatttatgtcaaccattaccatataaaaaaacagttctttaacagtagtatttagatattgtttggatatcaaggagaaataatggtcggtaaacaaaatttagagttgacttctaatcctgatgaaaagaaatacgttaatggttcgtggggatcctgaaagtttgaacgacatggcagtaattgattttgaacagcaaaaacatttaaaacatacaaatttttttatgagaaataaaatattcacttccaattatgcaaactataattgtaagtcaaatttgtgtcattagaatcctaaaacaacaatcaaagtttggtgtcactaatctcttaggagtttttttcctccgtttattaaaacgacttgttgattgagaaaccaaatccgtacttctccatacaccacctccttgtacgtaaaccaataaagaaagtcatataggacacgtattaagaaaattaatttataatatatgtagtcctaattggaacatagtcaaaaaaaacaaaaatgagggaataaatacgagcattatagacaatgtttgaaatatcttcagtgtcgaattattatttgacacgtgaatttgttgattggtcaaaattttgatcttgatatgtaaatagaaaataatagttggaatttattcatcctatatttaaaccttcttttttattatcatttttcaaactcaaataacgagtttgatactttgaattatggtgcaactaaaatggtactattaaagttttgcaatatgacactagttgaaaaccaacatgtattatggagatttgtgtgacatagtgatgatactagcacattatatatataatatatactttctcaatcatttactaaaacaaatagtttttttttattcaagagaagttgatgacttgagagtgtatatacctttacatgcatcatatttttttctttccgattacaaaagtggttcttgtcgttagagacgtagatgatcataatatagataattaaatcaaatcgctgcaaatttgtaattaataataccatcatcattttttcctacacttagatgatatagtgtcatttttcgtttagtactatattatatcaatttaatttgaaaagtatataaaataggtttacaaaatgtgattcaatctcactaccagtactgaatacacgaatgtgatcacgacctatataagaaatatcacattgtctttcaaaaatccgaaaaagatatatctctaaatgacatgtgatttatttctcagttttgcggctgaaatgggtgactagttaatgaaatgttatcatattacaaatattttggtcatatttgatttcttttttcagtggcaaattctctcttgttttctctaagacttaccaactcatcagtttttatattccgaatacaatatgataaatatcttcaatattttaatatattttagtctcaaagaagaactcattgtatttgctgaatattttgatctcacatttttttcaataagaattaagaacaagtggcatccataattcattagacggcatttacatatatttttttatatattctatgtatggagatctcgaatgtcacagtacactgatctcattgacgtttacttaattgtgtagaattctgtttgttactaaatataattatccaatttgaattcgtacagaaagaggtccgatggaaacaaaatactgttttaaaactacataatcatacgacaaaaaaaaaactacataatcataagcactttcagtctaaacacatccccaacatagagcatacataattcttatgctaatactcatctacaacgtgtcttttcaagcaattaaaatgaaaagttctaaagattattacaataatacaagttgcaagttttgttcagacaatctaactcatcattgtcacgtccatctttttttttttggtttattgattaccaaaacatgataccgtgtgggggcaaatacagaaacaaaatacaaaacagcattacttataaatgtctttattaaaggaatcaatagtgaaaagagtgtactttggtagggtttctatagatcccatcaactttgtacctttttatttgatggtttattttaaattaactttatttgttttatcaagaaagtgaaatgtggtcaaagatttacgtttcatcgtagaatttttcaaagacttgacattgactaaacggagtaccacggccacgtttcttagtagcaaaaaaaaaatgttttcatattcaatttttttgaaaatatttatagtctcgaaaagataatatttacttcgtatccaaaataagaagatacgattccatataatttagatacgacttattgaatttgtatccatatgaatacgacttatcggacccatactttggacaagaggctatggacttagccaattcgtataccgaaaaacatttataacacataatgttaaaaacaataattctctttcgaaattattgaattcgacgatgagaatcccaaaataattgggaggctcgaatataatttcctctcaattaatatattcgtacgacggtcgatactatatatagccatctcagttattgtttgtaacattaatttcgttctctatacataatcataatgtttcttcgtcgacattcatatttttaactcaagttgaaaagagtacttttgtcgtatatatattacattcataaatcatacaggcattgcatgtaaacgtatgtcgacatatccatatacgtatgcttttagaatgtgaatttccatataaatggatgtagataggtggacttatacattcatcaatacattatttatatatctatatatcgtacaatatatgtatatgtataaactttttaatgttttaaaagatatattcatatgaggtcattagtctcttttatcagttttagaggttgaaaaattcatgctaaattaaatatttttagtagaaagaaaataaccgacagtcttaaaaaaattgtgacctcatttgtcagtattgacagtattgaagtacaatagttacctgtccggttataaatggatgtacacgtgtcttacagtggacaaagcaaactccaaagtatcattaaaatttttttagtattatttataatatttgtttaataaatatatatatatatatattttttgtttttaacaaatataactaatcagacacgtcagatgatactaatatcataaatatcactggactgatactcatcaacctcattctaattattttatcaatataaaaataatttttgggcttgtaatactttagaaatatcacccctatgtacatggtctaactaactactctttcaagtatcaattgcaactactattacgttacaaatgtttttgtttgcttttttgttgggtcaaaaccttacaaatattaaagaaaacatggtgtttcataaaaagaatacttttataattactatgcaaattcttgtcagaataagttttcgtatgtaggtcgtcaaatctttaattatgagattttaattatatgtatataacatataaaaaattagcgaatcatcatctttgaaaaaattcttattctacataaactccattcaagttataccgaaagttacttatgatttgtgtttcaagtttcaacatgtaaaaatagcaaaaacttgtttcggatcaaaatagctgtggttcaaaattccatatatttttccaacaacaaaaaatgattcgttattttgcacttttccacattatcaccaaaaaaaagttcttaaaaacacttaaaagaaataaatctctacttgtggagattttttataagaggatgggatgatactactaacaaaatatcgatggaattactgcattgctggtttgatatcattcttctatagataaactcgagatactaagacaataattttaaaatgtgaagattcatggctggttgaatgtcttgattatatgattaactccatagttaattgcctcctagccaaagaagtattgccaaagaggagtacgaaaaacgtatacttaaactaaaatattcgatatttgtgataaaataaatattaaaattagtaataccgattgtataagattacaacaagaaataattttattttattttttgacaaagagtactttaaagatacatttgaatgtaaattatttagaacggcagtgaaaaataggatcaataaatttatttaaagataaaatgaattaggcatcattttttatctgtttcattgttatattaaagatttaaaatcaaatttcatccacaacattgggataaaatgtaactgtcagattagatcatatttaattatacgatcgcaccataagatcatattttggttcattattataagtacatcacggataaattatatcatattgttcttttgttggttaagacataaagcggttttgaaaagaagaaaacaaatagttaacatgttataagagctcgatatcattgttaatttgattgtacccaattattcacattaattggataagatgctaattcaatttttatattagttatgtaatgtaaactaaataaaaataagttttttctgtcaatctaaaaaaaattcttctctatatatcacaattaataatagagtgatttttattcttcaaaatatatatgtatataatagctaaatcgaaaaataaagttggaggcagctatttgcatgataagctattaacctattataaaactcttcttttattttagtaaagaactaataatatcaattatcatgtgaaaatatgaatgtgaagtgtgagtaatgaagcgagtcagtctcacttttgtttgtcgctgttcacttttgtctttgcacatcatatctagacacgtatgagtcctcctgctacatgtttttcttttttatcaaaagcaccaattgtttagagctgtaagcctctgcaacaacaaaggtgagagattacatgacaattgacaacaccataatttctaaacaaacagatcggtaaaaaaagatcattgatcaaaattcgtgaatatacaccccaatataatgacaggtgatcgaatcggatcatatcttatttatttatataattcgttgtcatcatgtatttttatagtatgtcttcaacatcaaaatcagttaaaatattagaaaaagttgacaaaaatatattcgaaacaagaaaacaaaaatatccggaaaatcagttaaaacataaaatatgtgtttcgattttctagcgcaagtggtgattccacctatgcaaaattgcaaatccatggatactggagttaattttttataaacttcatcaaatatgttgctccaaaaaaaaggaaacattcattatagatcgcagaaaaaacaaaatcttagatagctatagttagtaagatcggggaaacgaatgggtagtagtatgagacatcctaatatatatcctatactaagatattctcatattacacgaagtatgaataatattttgttgttgtagtataatgctttttaacccaaaatctaccaatcaatgttgcaaccaattttgaattcgagaaacgacaaaaacagagataaacaaaacaaaaaaaatatcgagaaaaaaatgtcatagccgtgttgtaccagaggtaaaaatttattgcgagtaacatgaacctaactatagaagaaataatctggaaaaagccttttgactctcttttttttttgataaaaacagaaaacgttttcaatttaatttcgtcaaatgagaatttttaatggaaattaagattagtgaaaacccttacgatctgtcgatccatataattttttgttttttttttgttttttttaataggaatgtcaatatcattaaaatgaagaggtgaggttttacaaagaaagcataacctaaaaaaaatgtaaccttgccaaaaaagaaataaaaacaagggttacatatataacgttgagtgtcaatcaaggtattattatcgaatccaaaaagccaccaagtttcggaagttcttcctgttctttctggcagtgatatcgtgttcctaatcaacgtatttcaatggtcgatccatatagtttttcttggatcaacacgattcatatagttatgttgatcaatctcgagaaatatttatcagatataatttaccaagaaaaataaaatatagaatcgccgagaattttgattagctacgcatttacactttaacctgattatagctagcaatattaacgtctaattagaacctaacatataactaattattacatttttctgaggttttcatatatatgacaacatgatcatataggaaaattcctttcctctatatactcagtaccaaacacgtaaagatatacgaagagagccatatatacataacacatggagaatccaacgttttaattaatgtatggaaatgaatcagtttgggatacggaaaccctagaagtcgtgtagagagagatatttggacaggtgtgcgaagctggccacatgtaaattatccttgcacgattcttaaagttctctccgccatagttaactaggcgttaggcttgaactttatgtaatgggaattgaacaccacttttgggaagatgttttattttatccttcatatatataccacagtattagtatatgagatatgcataattagtatctttaaagtaatttatatgtttacattgtatgtatacgtaagcaagtacgtatagccgagatctttttcagacatgccttgtcctaatattgtagatgtttgcatcatttagcatgtaaattttgaatttgaattatgaatattgaagttctattaattttttgtttttttccaaaggattatggaaatatttacttttgagttttcaggatattaactcttttttttttagatagaaggttctgaaactagaacggtacgtacattccctagtcaagagacaagaacattttattaacgtttaattttactgcagtcgattttctagttgctattcatatccctttaaaagactaatagttgtagaaaatgcagatcattgcggtatatagccttgtgtttctagaataatagaacctgagttatatttttggaattatcacttatctacttaaccaaaattcaaatataaatacttaccctcagtttatctttgtttctctctttttataatattaatagatacattgagtcataattaagaatcttaacacatatttcaaagaaaagggttagtataaaataaaaagggactctaaatataatagagaaagtgtggcgtcgtgtaaagcatactgcatacgtacacataaatgtacaacaatactagccatatatcgacaatatagcgaactgactcaataaagtcttttgcgttgtgttgtcactatgaaattaatgcgaaaaaggtagaattgatcagccccggcccaacaagtttatatatacatttcatcttcaccttatcgggacataactcgtatctgttgtgacaaatgtataccctttttttggtacgtcgataaattttttgttaacgattcgtctattaaatttattaatcaatgagttatggtgcccatatataatttgtcgccttcctatctcccctcaaaatattctataggcaataataaatcaatacaaagagataattttttattcaattaaaaaacaaaagatatatcaagatttcccaattaggaaattgccaacgtaaatctatataaagtaagcttctgtcaggcacgcaaataaaggtctgcatgttgtgaaaaaatggtcggtcgaagaacgatctacctttcggatatttagtttttttcttctgagttattttcgtatattattaagttacgtggattgctaatctttgtattgcatccacacgtagttatatttttattcatgggccatgtatttttttttcacgtctcacacttcaaatttgtaactatatatatatatacaaatgtggacaatagataagattttataagatttttagagatgataaagaaacgtgtatgtacgttggacaacatatatataattaaaaattcgagtcagttaactccgcattcgaagcagatttatgtgttgtgcaaggagcgatacaatatgcttggtctcgaagatacaaaaagatgatatttgaaggagataataagattttctcccgatcagttcagatttatctccaaccttcgtatgatgcatggtccattttaccttaaattggtcatgctgaaacattacgaatttatttactttttttttttgtaataattatcatattgcttgtacattctattgtacgaatgatttcaaatatgaaacgttccccattatttttacatttgatagattaattaaggaggcatgaaccatagcgagccaagtgtcattgtgttgaatagccggtagcaaagtcgccgaaacttttaatgtcggggaaaatggttttgacaagctcaaattcaaccattgttttgtcaatatattgccggtttggtctgaactctgaactctgaagaataaataaacaagatatgatttcgggcaataattattaatgctaattgttttaagctaaaggggaggggggagaggaagaaattttggttctttattatatcaacaaaaaacataacgaaaacatgaatctaggtatatcattttaatctgcatatccgaaaatgttccctatactaactaatacacgaatttattataagggaaacaaatagacaggtgatattttaaattagagctctacacatctctttttttgcttggtggctcaacaaaaacttcatcttcttttggtttcaaactctacaaaatcgtggatgcacttacagttatatataattagatatattactgataatatagattatatgatatggatctctctctctatatatacattgtatttaatccattattccatttactcaactcagacaaactatgattaatagataatatatatatatatatatatatatatatatatatatacacactgatacatttatatatcgcatatatatgtttgtaatcttgtatatatatctaacgtatggatgcatgaattttacaaaatgagagaaccatttattggtaagacttttctttgatatcatgaaggaagcagccaaagtaatatatattttatgttctgattattatatttttctccgctccgccaagtcaattgataaatttcgtgcaactaagaaaaatatctgcatcttaagctaagtcatatcattagaaatataaatatagaagtcatattcttatgttccttttctctaatcagattacatttaaaacccaaaagtttgaagatatatactagagttatttggctttgttacgttaacgtgggaggaaaatagcgagtgtttctgattaaagtcaagagcaaatgagcaatacatatttgtctgtatatgtatccatgagttactagtcgaaaaaaaaatgttcattacttttatgttatgtttatttttgtcaacaggtcgttgcagatttgcagcttatcttaaccctaatattttacacatatgtcatgtatgtatttctcagaatcaagttaagaggttaaacaaaaaaggaggttaaccagggtttgtagcttataatatattttatatttattatatgtagtttatattaatttttgtatatataagtgaaaaagctatgtaacaatattgtaaaaaacaacatatcatttaaattatagctccataatatatatagggaatagaaacaactcaaatgtaaataatatagtggtaagactcctaaattatataatccttaggcctcaaaaaagaatgcgttagaatgtaaattaacggtttaaaattttctgagaaaaaagatgatgaggattcggtccacaattctccgattaaccatataaaactctaaactttcatataactcttatcatgaaaccgtaaaagatcgtccataattattgatccagattttttcattaaataatagaaggattcaatatgattttagctagatagatttgggagtttaattagctggtttagctaattcaccagaaaatgttttatctaactagtactaattagcatattgtattttacatgttatcccaaatgaattatttttaattttcacacacacacacatgtatacacttttcatctagaatgccacacatcttcattttacttttagtcattgttagttgtatttttttgttaatgaatgattgaaaactgaaattgcaatataagaatattttgataaaaaaatatatatgacacaaatgcaaataataatagagaattctcaatatagaattgtttaaagaaatctatcatattaatctaaaaaattattatcaagatataaattaaaaaaaaatatcttatctaattctatatgtgcatgtggtatgtgtaataagctactacagacacgtaaacagatattactactttgaatagcaattacatttataactttacaaagaaagactacatatgtagtaaataaatctcaatattcaatctcgtttagccatttgtcatgatatttgtatgtagatatgctatataatatcacaaatatcatattcaagtagtaaaaaatctaaagaaaaaatagttgccaaaacaaaagagataagtaaaactagtcttcgtagttatctctctgaattatgcatggatatcattcccactcttttattcactctactattaagaaaaaaaaacgtgctgtatatgaaacaaaaaaaaaacccaaagaaattgttgatgtcaattgatataacacatatctgaaattaaatatttgatgtagcacaagaaacttaaatttaaaaaccaaataaacttataaagggtagactttaccccacatttgtctctctctacttaagccaaattgctctattcttttgttttctctttataattaggctttataaaccaacttttattaagaacaacaaaaataaaattgttatttatttggcaacagaacgaattattaaccaaattaatccatttgaatggccctcctctctctctgtctttaattagttggtttggtcaaaatctcacacgctctttatgcatgctctttgacacgtgctatcttcgtctctctcaaatgagctgtctctctaataagagtttcttctgtataggaaaggaaaggtctctctctctctatttacttatgagaatagcctataaaaccccttcacatctcccacttgttttgcatcacaaacatttcttccattacattaaaactccaaaaaattcatttttgttttcttttagagttcacaagttcttcgttgttcagctactcccactgtcataacacgaagtgggtttttttctgatcaaagaacaaaaacaaaaatggatatctccgccttgtttctcactctcttcgccggaagtctcttcctttactttctccggtgtctaatctctcagcgccgctttggatcttccaaactcccactccctccgggaacaatgggttggccttacgtcggagaaactttccagctttactctcaagaccctaatgtctttttccaatcaaaacagaaaaggtcagtgctttaagaaccgaaaatttataaaaatcgaaatttttgaaagaaatttgatgatgttttatgacaggtatggatcggtgtttaagactcatgtattgggatgtccatgtgtgatgatctcgagtccagaggctgctaagttcgtgctggtgacgaaatctcatctctttaaaccaacttttccggcgagtaaagagaggatgttggggaaacaagccatcttcttccaccagggtgattatcacgctaaactcaggaagcttgttcttcgtgcttttatgcctgaatctatcagaaacatggttcctgatattgaatccatcgctcaagactctctccgaagttgggagggaacaatgatcaacacttaccaagaaatgaaaacagtaagctcctctgttttgtttttcctctgctagaaacagagctacacacataattcccctgtttttgaaaacagagcataacgttactttcctctgttttgatctttttttgtttgatcagtacaccttcaacgttgcgttgctatcgatcttcggaaaagacgaggttttatacagagaagatctaaaacgatgctactacattctcgagaaaggttacaattcgatgccagtgaatctccctggaacacttttccacaaatcaatgaaagctcggaaggaactctcacagatcctcgctagaatcttatcagagagaagacagaacggttcctcacacaacgatcttctcggatcattcatgggagacaaagaagagctaaccgacgaacagatcgccgacaacataatcggagtaatcttcgccgctagagacacgacggcgagtgtgatgtcgtggatcctcaagtacctagccgagaatcccaacgttctagaagccgttactgtaagtacatatacggacacgtatttgtcgtcttttggtaatataaaaaacagagaagtggcagtttcgtagttttgtttgtgttcttatgggtaattttggtattttaaacaggaagaacaaatggcaataaggaaagacaaagaagaaggagagtctctaacttggggagatacaaagaagatgccattaacttcaagagttattcaagaaacattaagagtcgcttcaatcttatctttcacattcagagaagctgtcgaagatgtcgaatacgaaggtactaaacatacacaattaaaccgataaatgatgacgatctcgagtcgaaattcgaactaacattctatggttttacaggatatttgatacctaaaggatggaaagtgttacccctattcagaaacattcatcatagtgctgatattttttctaatccggggaaatttgatccatcaagattcgaggtaattatcatttgtttgatagtttgtagtactgtttttaatgttttggagtatgatgttatatttaacatgatttggttgctaatataggtggctccaaaacccaatacgttcatgccatttggcaatggaacccactcgtgtcctggaaatgaattagccaagcttgagatgtctattatgattcatcatctcaccaccaagtacaggtgtgtgtgtgtgtactacttacttattaccttctctttcactcattttgttcttttctttcaaatttatgtgtagaattgtctttgataaggggtatatttgtaatttcagttggtcaattgttggagcgagcgacgggattcagtatgggccattcgcgcttccccaaaacggactgcccattgtgctggcccggaagccggagatcgaagtgtagaatgacagaattgcctttagcttttctatatttggaaagaggagactagagaagaagaataaataattctttctttctttatcaagaaaaaaagatagagatggaggaaaacaggttcaagattttggtagaaaaatattccccaaatgggatcaaggagaaaacaccaagtgtacaaaaacttcaattttatttttcttgactttctttagttttttttttttgagtttttaattttaatttaagatgggaaaagctagtaattgaatttaaaaaaacaggggaaaatgttagtacaagtctctcatgtattttttttttgtttttcctgaaaatatcttatggttatgttataactatttcctcctggattgagacttcccttgttttttgaataaattttttttgttatatttttatatatatatttaaaatatctgttttaatgagccgtattggttatatacttatattgaagacatcccaaagcaatattctacaatttggtgattgcttctatattacaagaaataacttgtcttacaagtcttgaatctaaatatctaaaagtcaaactattaaaaatattattcaaatcaagattattgttcatatatgttctgtatacgatcgttacttatataatgtagaaattatatatgtgtatggggtttccgaaatattggaattacaacatgcttcaaagtcctgatggctaattgggtcaaggaaactacattccaaaataaactggttttgaccgtaccggctacatgaatctctcaagatgcactaagcacgttattaacaagtaaatatgggtatctccgtatctgactatctgagacaaagttaattatcctacacgatcgcaaaagtttttacctgttttttttttttacaaccagtgtccagtgattattcaaaattttagattactacaaatgtgattgatcgttacaaaaataaaagttttgaacaaaaaaaaacaaaaaaaaagaatttcacgctatatttaaccacacctaccacatttttttctatagacttaggaaccacataaatgatgactatagaattgccctaatcattatagacagtttttttgaaaaaaggttaatttattagcttgacgtgaaaaaaagaaaccccgacttttattcaaataatttgacggacgactttgaccatcatcacccgtgaattatgtttgtggccatcgtcgctgtaattatattactttttcaacgtattattattttatctaaattttcactggtgatatgtatataaatcatcttttatgatattatatataccatgattgagaatattgattattgaggaacagctgttattgcttcctcgatgaacaaatatcaaacgggctatcaatttctagtcactttcttccgtcttatatattatcgtttttatttttattatttttatattcagatattttctttctgaagaatttgtttttaaagcaaatagtgtaatatctaaaaggcttaaaggcattggacaagtgaaccaactacatagtacaggtgatatcacaacgtaaaacatttcttctcatatataaccaaaaaatcctatgcgtacgttttctctgtaaattttaactaattgtagaactatatcttatatattacagatagatgaaaaatgatgagatatgattacaaaaaaatcatacgtgattagtatatactcctaaacaaagatcgtttgagcattattattatgtttacttgtacttttgactttgtattactttacgtcatattgtcgtcctttaaatgtaccatgctccatgattttcacgttcatcttctaaatctagaataatgtagatattacattatcgatggtcccgaatatgccggtctgtctaatgagattgtattattatgttttttttacaagtgtttatatatgtatggagaacttgcatatgtgaatagttgattcttttttttctcatattatttacgttatagttcaaattttctgaaatttgtagttcaataaaaaataaaaaatattatttaatgatttttactctataaattaaatttgttcataagaatttgaaaatgttttttttatatatcaattagaggtttccataaatttatatttataaatccatcatgtaaaactctaggtattggaaaaacatctaaacatttcacatgaattaaagactatattttaattattatttttgcgataaaagtactgaaatgtcacattgtgaatactacatatcgagatttttctacgtaatcagattctttcactgtcctcatatatatatatataattatttttgttacaaatcgggtatattttaatcgcgtctataatatttgaataagaataatggtgaaggcataactaattcgaatgtaaaaaaaatctgtcgcattcgaattgcaacaatgcaagttatgatgcactaacaaaaaaaagaaaaaaagaagaagcagacattgagctttgacctcaaataaagaagtaagaattagtttgacttataaacaaattagtagttttaatatttttcataagttaagtacgtgtctatcaactacattacgtggattgttgcaggattaataaatgtgatcatttaattactacgaagaataaacagtatggcaaagagtgtttgtatattagagcattattattgatagtctcctaaattagtcttagcatagtttttaggaatatatgtataattgattttaaaaattttgatgttaagaatttagttaagagattaaaattttggcaatatgcaatgataggttcttaacttgaagttcttaaaaaaaaaagttatttgaaaataataaaaaatttagtttttaaaaagttaataactattacaacttataaaatttaaaacatatatgacataaaagtttaaacaaacatgacggaaacataaacaaaaacgattagttaaactattgatttctgccaaattctaatgtccaacatattttcgagatttgaaagcatatatgtaaactatgtgaaatacacttgtgaacttgttgaacaattttttagttttttttcctcaaaaactgatctgaaatcgatctgaatctgacaccatccgaaccgaaaccgaaccaaatattcatataatgcaaacggataataaactatctcatccgaattattcgaatacaaaataatcgaaccgaatccgatccgtaatccgaattattcactcctaggtgtcgcattgtgtgaaagagagagaagaaacaaaagaaaaagaaaacactcaatcataaaatgccacatgtctggctcttagattttagtttggctcttatataagagccattcttaacaatatattcaataaaaacattatatttcatatctacttaaccttaagaactaatctaagatactactaataatggtgctcttagttgactattagacttttagtggttgtatgccataatctgaataaatataataattaaacaaattaacatctatatagatgaataattatttacgaccaaataatatattaattagttttgtggtcgttcgatcctttaaattatggattggagaccaaactttcaattaaatggagggctttagagcaaaagactctttccataaaaccccaaaattaaatcaaaactatgttaaattagaaggaacgttcctaaattaagaggtttttgtgaagctaaagggatttgacgtgtcatgacctgattggtcgtgagtttgagaaaacaatttttttttctcctttcccatctctttcttactctctctcagctgctcttctgttttgttctgatctctctgaaatcaattgatctttaacattttttttttcaaagagacccaatttaagattccaccattgtacataaaaaatataaagacccatcataatctctttttttttttgggcaaaggaagctttcattaatctaactcctcaagagaggtgggttcatacaaagtaaaattaaagcattacatgaaagatagagataaagatttcatgagtcttccaaaatgcataacttcaagaaggttgcaagggatggtagatctattgggacctgcagagattcaagcttgaagactagcttcgagaaatctcggatcaacttgtgatcatagtaagctcgtgcgatcgacgcatagaagctttcgttgaaatgctccaaagaggaggctgcggtgtgagacttttctccgggttcaagtttcaaagaggatatctcttagaggagtaaggtttcagggaaggtatctcattagaggagtaaacataatgcaatcggcaacaaagattacaagtccaaagcacaaataatcttctaatcaaatgacagagattaaccggattcatggggcttgagaagagggttgatagagcaagccaaagcggttttacccaacaattccaagagggttgtgatgcatcgtccaacaaacgacatgggacgggatgagtaagcatgatagtgggaaggttcagactcattatatgatcacatataagaacaaaggtgtgagccgcatcacatagcctatggttcgagatcaaaactaatccactaagcttcaagactaaacttacatctgttggcaaccaatctactctatgtaacaggtttctagtattgtgattgcaaggctcctctaagactaaggttccaacgattgaatggagtccacgaccatccgttatcgtgaagcaatggttcagagagagagtccacaaaactctgagtaaagcaaatctggatatgggccaaattaggtttagagtttttgggccgccgaaatgagagaggcccaaaccaccaaaagcatggattgttgcaactgggccgtcaagaaaattgaggcccatcccaccaaaccctagagttgttacggttgagagaagggaagggagagtgccgccgtcgtaaagatcggaagtgatggtcgacggtgaagcacctgggaaaaacacctgccagcaatgaagctcgtcgtgtgtcgtcgacgttttcaccggaaaaggcacaactgatggtccaagagaatctcctgccatcaacgaaatccagtgagaaggaactaaaggcgttaccgctaatagggcagatctggagccaaaggatgtgtcgatgaaaaactgctctagaattttggaaagggcgatgatgaagaagtgcgattcttctcttgtcgggttcaaaggcggatctgcgtctgagttatgattcggggcaaggcttgtagagtaaacattcactcttccgtcgcaaagaagaccctaagagaagaagactaaaggaaatgaaagttttggattttgcacgagagaagaacttaacggagagaaaaaccaagaccagaagctt

SEQ ID NO: 597 - DNA, 90551 bp, Arabidopsis thaliana
aagcttgttcttcgtgcttttatgcctgaatctatcagaaacatggttcctgatattgaatccatcgctcaagactctctccgaagttgggagggaacaatgatcaacacttaccaagaaatgaaaacagtaagctcctctgttttgtttttcctctgctagaaacagagctacacacataattcccctgtttttgaaaacagagcataacgttactttcctctgttttgatctttttttgtttgatcagtacaccttcaacgttgcgttgctatcgatcttcggaaaagacgaggttttatacagagaagatctaaaacgatgctactacattctcgagaaaggttacaattcgatgccagtgaatctccctggaacacttttccacaaatcaatgaaagctcggaaggaactctcacagatcctcgctagaatcttatcagagagaagacagaacggttcctcacacaacgatcttctcggatcattcatgggagacaaagaagagctaaccgacgaacagatcgccgacaacataatcggagtaatcttcgccgctagagacacgacggcgagtgtgatgtcgtggatcctcaagtacctagccgagaatcccaacgttctagaagccgttactgtaagtacatatacggacacgtatttgtcgtcttttggtaatataaaaaacagagaagtggcagtttcgtagttttgtttgtgttcttatgggtaattttggtattttaaacaggaagaacaaatggcaataaggaaagacaaagaagaaggagagtctctaacttggggagatacaaagaagatgccattaacttcaagagttattcaagaaacattaagagtcgcttcaatcttatctttcacattcagagaagctgtcgaagatgtcgaatacgaaggtactaaacatacacaattaaaccgataaatgatgacgatctcgagtcgaaattcgaactaacattctatggttttacaggatatttgatacctaaaggatggaaagtgttacccctattcagaaacattcatcatagtgctgatattttttctaatccggggaaatttgatccatcaagattcgaggtaattatcatttgtttgatagtttgtagtactgtttttaatgttttggagtatgatgttatatttaacatgatttggttgctaatataggtggctccaaaacccaatacgttcatgccatttggcaatggaacccactcgtgtcctggaaatgaattagccaagcttgagatgtctattatgattcatcatctcaccaccaagtacaggtgtgtgtgtgtgtactacttacttattaccttctctttcactcattttgttcttttctttcaaatttatgtgtagaattgtctttgataaggggtatatttgtaatttcagttggtcaattgttggagcgagcgacgggattcagtatgggccattcgcgcttccccaaaacggactgcccattgtgctggcccggaagccggagatcgaagtgtagaatgacagaattgcctttagcttttctatatttggaaagaggagactagagaagaagaataaataattctttctttctttatcaagaaaaaaagatagagatggaggaaaacaggttcaagattttggtagaaaaatattccccaaatgggatcaaggagaaaacaccaagtgtacaaaaacttcaattttatttttcttgactttctttagttttttttttttgagtttttaattttaatttaagatgggaaaagctagtaattgaatttaaaaaaacaggggaaaatgttagtacaagtctctcatgtattttttttttgtttttcctgaaaatatcttatggttatgttataactatttcctcctggattgagacttcccttgttttttgaataaattttttttgttatatttttatatatatatttaaaatatctgttttaatgagccgtattggttatatacttatattgaagacatcccaaagcaatattctacaatttggtgattgcttctatattacaagaaataacttgtcttacaagtcttgaatctaaatatctaaaagtcaaactattaaaaatattattcaaatcaagattattgttcatatatgttctgtatacgatcgttacttatataatgtagaaattatatatgtgtatggggtttccgaaatattggaattacaacatgcttcaaagtcctgatggctaattgggtcaaggaaactacattccaaaataaactggttttgaccgtaccggctacatgaatctctcaagatgcactaagcacgttattaacaagtaaatatgggtatctccgtatctgactatctgagacaaagttaattatcctacacgatcgcaaaagtttttacctgttttttttttttacaaccagtgtccagtgattattcaaaattttagattactacaaatgtgattgatcgttacaaaaataaaagttttgaacaaaaaaaaacaaaaaaaaagaatttcacgctatatttaaccacacctaccacatttttttctatagacttaggaaccacataaatgatgactatagaattgccctaatcattatagacagtttttttgaaaaaaggttaatttattagcttgacgtgaaaaaaagaaaccccgacttttattcaaataatttgacggacgactttgaccatcatcacccgtgaattatgtttgtggccatcgtcgctgtaattatattactttttcaacgtattattattttatctaaattttcactggtgatatgtatataaatcatcttttatgatattatatataccatgattgagaatattgattattgaggaacagctgttattgcttcctcgatgaacaaatatcaaacgggctatcaatttctagtcactttcttccgtcttatatattatcgtttttatttttattatttttatattcagatattttctttctgaagaatttgtttttaaagcaaatagtgtaatatctaaaaggcttaaaggcattggacaagtgaaccaactacatagtacaggtgatatcacaacgtaaaacatttcttctcatatataaccaaaaaatcctatgcgtacgttttctctgtaaattttaactaattgtagaactatatcttatatattacagatagatgaaaaatgatgagatatgattacaaaaaaatcatacgtgattagtatatactcctaaacaaagatcgtttgagcattattattatgtttacttgtacttttgactttgtattactttacgtcatattgtcgtcctttaaatgtaccatgctccatgattttcacgttcatcttctaaatctagaataatgtagatattacattatcgatggtcccgaatatgccggtctgtctaatgagattgtattattatgttttttttacaagtgtttatatatgtatggagaacttgcatatgtgaatagttgattcttttttttctcatattatttacgttatagttcaaattttctgaaatttgtagttcaataaaaaataaaaaatattatttaatgatttttactctataaattaaatttgttcataagaatttgaaaatgttttttttatatatcaattagaggtttccataaatttatatttataaatccatcatgtaaaactctaggtattggaaaaacatctaaacatttcacatgaattaaagactatattttaattattatttttgcgataaaagtactgaaatgtcacattgtgaatactacatatcgagatttttctacgtaatcagattctttcactgtcctcatatatatatatataattatttttgttacaaatcgggtatattttaatcgcgtctataatatttgaataagaataatggtgaaggcataactaattcgaatgtaaaaaaaatctgtcgcattcgaattgcaacaatgcaagttatgatgcactaacaaaaaaaagaaaaaaagaagaagcagacattgagctttgacctcaaataaagaagtaagaattagtttgacttataaacaaattagtagttttaatatttttcataagttaagtacgtgtctatcaactacattacgtggattgttgcaggattaataaatgtgatcatttaattactacgaagaataaacagtatggcaaagagtgtttgtatattagagcattattattgatagtctcctaaattagtcttagcatagtttttaggaatatatgtataattgattttaaaaattttgatgttaagaatttagttaagagattaaaattttggcaatatgcaatgataggttcttaacttgaagttcttaaaaaaaaaagttatttgaaaataataaaaaatttagtttttaaaaagttaataactattacaacttataaaatttaaaacatatatgacataaaagtttaaacaaacatgacggaaacataaacaaaaacgattagttaaactattgatttctgccaaattctaatgtccaacatattttcgagatttgaaagcatatatgtaaactatgtgaaatacacttgtgaacttgttgaacaattttttagttttttttcctcaaaaactgatctgaaatcgatctgaatctgacaccatccgaaccgaaaccgaaccaaatattcatataatgcaaacggataataaactatctcatccgaattattcgaatacaaaataatcgaaccgaatccgatccgtaatccgaattattcactcctaggtgtcgcattgtgtgaaagagagagaagaaacaaaagaaaaagaaaacactcaatcataaaatgccacatgtctggctcttagattttagtttggctcttatataagagccattcttaacaatatattcaataaaaacattatatttcatatctacttaaccttaagaactaatctaagatactactaataatggtgctcttagttgactattagacttttagtggttgtatgccataatctgaataaatataataattaaacaaattaacatctatatagatgaataattatttacgaccaaataatatattaattagttttgtggtcgttcgatcctttaaattatggattggagaccaaactttcaattaaatggagggctttagagcaaaagactctttccataaaaccccaaaattaaatcaaaactatgttaaattagaaggaacgttcctaaattaagaggtttttgtgaagctaaagggatttgacgtgtcatgacctgattggtcgtgagtttgagaaaacaatttttttttctcctttcccatctctttcttactctctctcagctgctcttctgttttgttctgatctctctgaaatcaattgatctttaacattttttttttcaaagagacccaatttaagattccaccattgtacataaaaaatataaagacccatcataatctctttttttttttgggcaaaggaagctttcattaatctaactcctcaagagaggtgggttcatacaaagtaaaattaaagcattacatgaaagatagagataaagatttcatgagtcttccaaaatgcataacttcaagaaggttgcaagggatggtagatctattgggacctgcagagattcaagcttgaagactagcttcgagaaatctcggatcaacttgtgatcatagtaagctcgtgcgatcgacgcatagaagctttcgttgaaatgctccaaagaggaggctgcggtgtgagacttttctccgggttcaagtttcaaagaggatatctcttagaggagtaaggtttcagggaaggtatctcattagaggagtaaacataatgcaatcggcaacaaagattacaagtccaaagcacaaataatcttctaatcaaatgacagagattaaccggattcatggggcttgagaagagggttgatagagcaagccaaagcggttttacccaacaattccaagagggttgtgatgcatcgtccaacaaacgacatgggacgggatgagtaagcatgatagtgggaaggttcagactcattatatgatcacatataagaacaaaggtgtgagccgcatcacatagcctatggttcgagatcaaaactaatccactaagcttcaagactaaacttacatctgttggcaaccaatctactctatgtaacaggtttctagtattgtgattgcaaggctcctctaagactaaggttccaacgattgaatggagtccacgaccatccgttatcgtgaagcaatggttcagagagagagtccacaaaactctgagtaaagcaaatctggatatgggccaaattaggtttagagtttttgggccgccgaaatgagagaggcccaaaccaccaaaagcatggattgttgcaactgggccgtcaagaaaattgaggcccatcccaccaaaccctagagttgttacggttgagagaagggaagggagagtgccgccgtcgtaaagatcggaagtgatggtcgacggtgaagcacctgggaaaaacacctgccagcaatgaagctcgtcgtgtgtcgtcgacgttttcaccggaaaaggcacaactgatggtccaagagaatctcctgccatcaacgaaatccagtgagaaggaactaaaggcgttaccgctaatagggcagatctggagccaaaggatgtgtcgatgaaaaactgctctagaattttggaaagggcgatgatgaagaagtgcgattcttctcttgtcgggttcaaaggcggatctgcgtctgagttatgattcggggcaaggcttgtagagtaaacattcactcttccgtcgcaaagaagaccctaagagaagaagactaaaggaaatgaaagttttggattttgcacgagagaagaacttaacggagagaaaaaccaagaccagaagcttaagaaagactgaaacaggctaagaagattttgcaggtcccgacgccagcgaacatgagtctcaccggcgccggaaagcatgtttacagaagatgtcttgattaccgtgtctgggagagaacgaagctttttatttttacccatcataatctctaaattatacaaattcttaaaatttattactataaatttttaaagagactctctcaagggcttagagcaaccccaatggtttagaaccaattggttcttaattttcaattttaaccttattttaaattaaaatgttacttttactaagttaagaaaagttaagaagaagctgaattaatttttactccaatggttaagaactattgaattcctaaaagacaacaattcaaactatttcaaaacaatgtctacccactcaaaacacaacacatatactcttcttaattttaagaaaacatcttaactaagatgtttatcttagctaagacttgttggtttcattaaatttaatcagttttatagctaagaattagttaagatacaaagttgaggttgttcttaccattgaacatgctctaagattaccttgtaacataaaaagacacttaccttgttaatattattattatattccttcaatatcacactcaacattcattttttaacaagtatatatgtgaggtgcactaaaaaaaaaaaaaaaaaaaagaaaaaacaagtatatatgtgtataaacactcacacacgaaatgatatcatttctctgacattaacattaatcactttaaaatttgatagaacaaaccatttatctatgaagtgtgatgattcatatggtcggtagaaagtacacaatcacaaggggttgtttgttgagtgacttgagtcccagtcatccattactaatgtctactgatacaccaacagtttgattttatttattcagaaagaatatagatcattttactattttagggggaaaatatgtgtaaagtcacacgatgatcatttctcaacaaatcttatggttgtgataaaagtcacaatgtgtttgtttatctaataacttatgaacatcttttctaaccttctacaatacgtttgtatgaattataaaatcgaactaaaaccaaagtgtgctcatctttttttttttttttgtcgaaagtgtgtactcatcttaagcattttttgtgttttgttttgttttaatatgtttttgcatgtttttttgataattaccttaatcgaaccagttaaccaaaacacaatgaaaaaaaaactggtttaatccagcttctcagtagtgatttacacagtgaagcgatctagagttgttactagattgataagactctaataaagcaaatatacaaatgcagggaacgcaaaagcggcaaacacacactttttcattgcaattgtcttgaaactatttctcggagaacaagtgcaagtgtgtcggggaaaatcaaaaacgattaatcaacgttcaaaatcctcaaattcgttttgaaaacaactacatcaagacgaatatcatggtaatataaaagtcgccagtttagttctcacgtttctcacattcaaaaagaaaattaaatcgaaaaccgttttaacagaaagaagaagattgaaatagtaacggtcaaaccggtttagactgggttggatatattattttagttaaataaagggattggtgtacaagttgtcggaaattgatcctatacttaaccctacttgagagacgagagtggagaagatgagaagagactgcaacaaagagagaaaaagagatcgtagaagaggaagaagaagaaaaaaaaaaagaaaaaaaaagaaagaaaaagaaaagaaagctttgtcgtaggaagaagaagaattagaaagaagaaagagacaaatggccgatgtgttatatgttaagtggactgttttgtgtgttgttaagacaaaactatagtttgagatgatcaagaacacaaagatttaagaataactctctttattagtttaggaaaattactcaaaacctaaactctcttgtttctcaatctctcaactcataagttatgcaacacacttgcatctccttatatagagatctcttaaacaatcctaatcataacttaatttagataactcttaaatattctctagatatctccaagagtttatagtcctaacctctctaggatttaatgacttagtgctcaagtcatattcaaacttaactcaacaaaaacaattaagctaagtaagttaaaagtagaagtagtataaatatgcttctaatgaatcaagacaagttaaggttcctaccttggaacccgaaaaccatgtgtttatgtctgccttcaatctcccacccatccttttgatcgtagatggttcggtctctggataaaaccctatgatcatcagcccctaacccattggacgatcgacatcaagtgtaccggacattggttgctaccgatgccctctccctattctcgttgcttacaaatagtccacgaaactgttggttcagaacatacgaaatcggtggacaaaacatgacaccctcgactgacgtatgggtctatgataagctcattggcaaacaacgcaaagctcctagcatgatggtggctcgtacgaacgcctttacgtgcgtccttgatggaaaactatatgtaatgggaggatgtgaagcggatgaatctactcattgggctgaagttttcgacccaaagactcaaacttgggaagcattgccggatcctggagttgagctccggtactcttcagtaaagaatatccaaacgaagcaaggaaaagtgtacgtgaggagcaataagaagaactttgtttaccttataaaagagtgtatgtgggaagttgccgaggaaaacttgggtgagagtacctgtgagatagagaatgtatgctactgttatagtaataaaagatactggtggtatgacgcaaagtgtgaagagtggagattagtcaaaggtgtgagtggactttacgagtattataaaactgattctgaaataggtaattatggtggaaaacttgttgtcttttgggaccgtgcggtgtctcgtttaaccgcaaccaaagaaatttggtgtgctatgatttctcttgaaaagggacatgatggtgaaatctggggtcacatcgaatggcttgatgctgtgcttatagcccctcggtcgtatgcactctcacattgtatggacttcttgcaataattaaccatatcttttttgctttgatttttttcaatctttttttttataattttttttgcagcttaaaacttataatttaattagttttaatcagaattatatatattattgatatatatagttttcttttttttggtcatgttctttattttatattttatttatatctaggtaataccagttagtaattcgttattatttcatcgggtatcgtttgctttattgtatttatgaagcttgatgggctaaattcaatttttttatgtttttgtttttatttaagtttttttgttgctatggaatcaattgtttaagtttagcaacgacaaaaactaactagtaaatgaaatatggacgacgcttaagtagctctcaaataaaaaattgttaacatggcataatacctctcaatagattacatataacttatattaacataaaaaagtatatcaaacttaagtagctctcaataaatagatggtgcatgacataaacatccctctctctaagagtatatgcaacttctgttgacatgaagtatacatgcattaagcttaagtagtactcatcaacaagctaagttcgtttctatacacccactgacactgagcctctaaaagatcaacacaaaattcactctaataaaaaaatagcactaattggcataattaatcaaaacacgaatgcaattcatttggaagagaataaagaaaagaaatatgtttaatttatgcggaaaatagtgtggtttaggttcaattttgtatactaattggcatgaatcaaacaaaacacaggcagtttatttggaggaaaaaaaaaaaaaaagtttaggaggaaaaatcggtgacgcttaggttcaatatgtttatgtgctaattgatggcccatgaagcccaatatgtagcaacggcacatcatttgcctctcgtataaatctcattttcacgtaatattctaaattaattaacaagagattgagagattgagaaagagcgagagagagagagagagcgagagcaagaaactcgagaaagatttactaaaagagcctttattctccccttgatcttcccgcgatttccttcggctgaagaacaatataatggagcgtgagacttcgtcatcttcaactcctccggaggatcttgttacatcgatgatcggaaagttcgtcgctgtcatgtctaacaacgacatacgatacgaaggcgttattagccttctcaatctgcaagattcgaaattaggtctccaaaacggtataattcgattccaaaccctctccaagatctactgtttatgattttcttcttttcaagttcttcatatttgtttctttggtcgttgttagaatatttccgtgaaaactatacgtttcatatatataaaacagtatcatgtgatagattaaggcctcaaatttatgtatgcagtcgttagggtttatggaagagaggttgagaatgataatgagcaacgagtgttccaggttcttaaagaagttcacagtcacatggtatttagaggaagtgacattaaggttagttttcgttaattttttgggttcaagattcctcgctagtcttcttcctagttagttgcttgctgcacaagaaacacttttcttgaagcttaaactggttattttaattgcaccaatagcagataacgaagcacacgttactgtgtttagatttcgaggttagttagtttagggtttgagggtcgttaatgataaatcatctacttggttacttgctatataagataagtttttttttatataaagttatatatattcagtatttgtgacattagtttgttggtttctgtgtccatatgtttcagtcagtcgaagttctctctctgccgccaccagctaggcataattctgctatagggcacgtaggtagcttgattactaccgaagacgtgaggattgagggggttatcagccatgttaaatttcatgattcgatgatattcatgaagaattgtgagaacctttttttcctgatttctattctactaataaataaatatatatataatgttgattcattttaatttacaggtatgtgttatggtactgaggggaggacgaagagaagacgttcaatagtagcttgcaatcaattagctggttcaatccacttcaaattcagagacattaaagtacgtggaccaatacttactcatgcatacatatttgattaattagtttgtgtactgtacaatttacgatcaatctacaatttacaggctctcgaaatcatctttgttcgggaacttctacacaatgatgatcgtgagtttgctgatcagtttcctctactaagtagatcacacatttgtcatcgccaaggtggcgtctgatagtctcatgccaaggcacagcctctttcacatgataattagagacgacgagagaagaagtattagagaggctgctccttgatttgtgtagaataaaacatatacctaattattaatggatttacatggtttttctacgtgtgcattatttggttgactccaattatttaacaattgcatatttgtctcaggtctcatttagcaactaggtaatgtaggaatttaaatagctctataacctactttttaattgtttttttggtgaaacttttttctcataacatggttttttttttttttttggtttaacggatatcttctcgtaacatatgttcttctcacatgttaacactaaagcagacacaagaaaacaaattagtacgttacgttgttgcatgtgttattttgatggctaactggaaaaatacaagtcgttgtgattagccatccaatgggcctctaaaaataatgacttggtaaaactagacaacccaaaatcacaaaacaaatattctcttcttctattaagtaaaaaaaaaaatcttattaaaatctggtttaaatgtttgttcattcaaataaataatggagtgtattttagaatcaaataaaaaaaaactttatcaaatgatttatttggtagataacaaccaaatcttgagctaaaaagggtgaaaaaatattgagaattttgttaataagtaaatagttatggttttgactgggtataggagatatatctaggctggtgaaaaaaaaaagaaaaaaaaggatatatctaggctttaaaatattcacatgcatacaatcagattttcatcggtgttcgataagaaaacaaaaagcaagtgtttgttttgtaaaaaactaatggcatacttaagcttcaagtctaatatggaaccaccacggggatataggagatatatctaggctggtgaaaaacagaaaagcaaaaaaaaaggagagttaatctaggctggtgaaaaaaaaaaggatatatctaggctataaaatattcacatgcatacaataagattttgatcggtgttcgattagaaaacaaaaagcaagtgtttgttttgtaaaaaaactaatggcatacttaagcttcaagtctaatatggaacgtacaccacgcgagtcaaacactccttgtccgcctccccaaccatctccgtcgttgttttcttcactaccagatgacatcgttttgaatatcttggctcgcatatctacttcctactaccaaacgctctctcttgtctccaagaccttccgtttgctcatcctctccaaggagctcgacatggaacgttcctaccttggaacctgaaaaccatgtgtttatgtctgccttcaatctcccacccatccttttgatcgtagatggttcggtctctggataaaaccctatgatcatcagcccctaacccattggacgatcgacatcaagtgtaccggacattggttgctaccgatgccctctccctattctcgttgcttacaaatagtccacgaaactgttggttcagaaacatacgaaatcggtggacaaaacatgacaccctcgactgacgtatgggtctatgataagctcattggcaaacaacgcaaagctcctagcatgatggtggctcgtaagaacgcctttacgtgcgtccttgatggaaaaccaaacacattagactaaacgaaagataaacgtgaaagatgaaaacataataaagctgtaacaggatgtgtatctcactaaactagggaagcagaaggatgtctcggaagaggtagaagtagaagcattgtgaacatctttctccgttaaattcattgttaagctcatgtattagccagcagtcaggatattcctcgtaaagaaaggtctcggagtaagatccaaaacatttaggttccgaagcagaaatgtggccgataagtttgtttgccatcaaggatacatcaaagaaacacttgttctcgcgattgaaactattaaaatcatcaatgagttcgatacctgcgcaacggtttagagcaatgtagagtagtttggctaaaggaaatctatctttacaggtactcaaaattgaaatggctccacacaggtcgaggcagcggaatccgagactcaagctatggagatacaatgcgtaggggttgcttttttctagacatttggagtagaaagagaaataaagagagttataggaagacatgtagatgaagtgtgggcttttgtctagacgcactcgggttagcgtttcgtcagagaaagctgctaatttcccaacatgaccagctttaatccaatttttcaaagcgtctattccttgttccgaaacgtagctaacgattagagcaagtattggttccggaatatataacctggaattcttcattttctgctaaaagggccgatgataagttagaggaatgattaattttaggaataagtaaaggaatcatatttgtttgtttagttgcgaactaaaacctgttttgcagtgtgtccacgatttggtacaacaacgatggcagcggaaggtggatggatgtattactgaggaggaagatctggatcggcggggtttggagaatctctaagtaagatttgcttagattgactcaactcttaacataaataacttaaatgacacacgtttggtttcaaaaactgtagtaacccatatctttggtaaaaagacgaaataaccttaatgattaattgtaatcaaactaaaacaaaaaataaaaaataaaacaaatcttttatattttaaagcacaagtcactccaccaataaaattttgacaaatcagcaaaaacaaattatttttcaacagaattataaaaggaaaatttgcagatataacttaaaagcatttataaattaacaaactaaccaataaaaacaacctaacaatataacatatgtaatatatattattacaattttatccccaccactaacaccactaaccaccactacaaccacggccgccggataaccaccgtcgccggataaccaccgccgccggccaaccaactccaccgccggacaaccacctccgccgccggacaaccacaaccaccgtcgccggaaaaccgacgccgccggaaaaccgacgccgccggaaaaccgacgccgccggaatcaccaccataacgaccatcgccggcaaccaccgccgttgctggaaaccgccgccgccaccgccggacaaccaccgtcaccatcgccggacaaccaccgccgccgtcgccggacaaccaccgtcgccggacaaccaccgtcgccggacaaccaccgtcgccggacaaccaccgtcgccggacaaccaccgtcgccggacaaccactgtcgccggacaaccaccgtcaccatcgccggacaaccaccgtcgccgtcgccggataaccgccgccgccggaactaccaccataaccaccatcgccggacaaccacctctaccggaatcaccaccgccggaatcactaccgctgccgtcgccggaatcaccatcgccgccgtcgccggaaccaccaccgccatcttcgctggaaccaccaccaccaccaccttagatcattttacctaccccttaagttacttacttaataattacatatatagtgctatattcttaatttttctctcaaaaagtgttattcatgcaaatcacccattataaaatcaaaaaagaaatcgtggataaaatagaaaaccaaaacctatattacataactaaaacaaaaacgaaaatccagttaacgtgagaacaaactttttttaaaataataattttgaacaaaatttagataaagaagaatcttcttcacatatttcgtttttgattttaaaaatattaaagaaaaacaatttatttttgatattgcatattataaattgacttgttttagcttaccaataatattttgacatgtatcaattcacaaataattgatttgatggtaggaatagaagaagaaaaaaaacggttatgaaaacccttggagaatttatcatgactaataaaattcattaaaattcaaatatgacaatattatgtaaaaatctgccgacattaataaaagtctgtcgtgacgttatgaaaatttctttttcaaaaaaaaaaaaaaatccagttaaaccggatttaacatacaatcagaccggaaataatttaattgagggctagctaataaatttcatataacaaaaaattttgaaattttaaaaataaatctgccaaaaaaaatctgttattactaaaaaggttattctagtcataaacaaatcggccataacattgacatgagtaaatctgttatgctttgacactgaaaaacaaaactgtcatcactaaaaacaaatctgttatcactatgtgactgtgtagtaattttattttttaacaaaaatctgttgtaaaacaccagatttgttaacaagttaattaaatctgtgattacacaaaacaactctgtcatgcctatataacatttttcgaggttaacaaatctgttataacacaacagatttttgggtgcaaatagaaaatctgttgccaccataaagaaaaatatgtggtccggaaaacaaatcagtgacagatttggtttcaacattcttacttttgaaatttaaataaaatctgtggagactatatgaaacaaatcagtcacggttaaaaaatctgcgaaaaaaaaaaaatctggcgtaacataacacagtaaagtctgtggtacaaaacaagtctgttgtaaaaaatctgtggttgaccaacaaatctgtgatcgataacaaatccgtcgcaacaagtgccacagatttaccaaaaacgacgatggcattttcgtaaataaatgtggttttattgccttgctggaattaaatagtaatggcatttctgtaatattgtttttctctgcaaaggaaaacaaggataatttaggtataattattactcaaataactcatatttttagcattccttttgggtcattatgtataaaatatgggttactctagtaaatttcccaatctctaatgtttgtattgcgcagaacgggttataaagggagaaaggaaatgaaagtttctataaaatatagatattcgagagggataaagcttagtggggagaatgagtgcagttataaaatcagttccataaactgtttgagacgaggtaacggtcgaggacttgttctctttataattgtgaaaaatagtggagaagtactacttaccttaatatcgtaaggtaacttcacacataataacttcatatataaaatcccataaaaaaaatcatagattcttaagtttgccgcaaatgtgaagaacaaaaagaagaactgaactgaaatgtacttatgaaataagggctacttcttgggataggttaaagtaaatacatgtgttacaccactgtccctcatactcattgaggttctgatggtccgatcaacactcaccgtaatcctcaaactcccaggaatttttgtatgtcccttggcgacgtggaccaacctcgttgatatggaacattagcttatctgcgaataagtcgacttcactaaatttgtagtaccttcgcttgtacatactataaaattcccacgggattgatccagcgcaactatggagcatgatgtaaagtagaccagcatgtgggaacacgtctttaataccatccaaaatagcaattgcttcctggagctcacacatatgaaacgccaacactaaactctgaagatatagtgcatagggatttttgaaggctaggcattttgtgtaaaacatgtgataactagaagattcatgagccatgtgaatgaataaaggggacttatctagtcgaacagaagaaagagtttccctggaaaaaacagcggctttgccatctggtcctgattgaatccaagcctttaacatatcaacaccgtcctctgaaactaagcttactattttagcagctacgtgttcaggcatgtggaaatcagagaacggaggaggctgatataaaataattccaaatgataaacctaaattcgggtgattgttcagatagcaaagattagtagttaaacattacctgtaggtggaattgaaccaaagcttgacgaggaggatggacggcaaattgattttccctaataggtgcaagggcacttgtgggtcgccagaaatgtctggtaggtgccattggttgagggtggatacatttgcctttttcgcagacgattttgggcattttggattatcgattcggatagtactgaaggtgtacaaatagcgatctattaatgaaaatttttgtaactttgagatcgtgatagaatgggaaccctaatactttgtcacattgaagagggtggggtgtggtggtgagataggttagtggcgacgtcgtgggtcctacaaaatttttaaaaaattagacatatgagtaagttttctcatgtccaaaataaatcattgtgtgtccaaattttgttgtccaaatagacacaactttatggtatataaaatatagacgtggatgtcttttaacatgcaatcgaacagggactcatttatgggggaacaggttctccataaacaatcaggtaatacatacatagactgtaatcatgaaacaccaaccacaaaataagatggataagccttagcaaatatataaacgaagattgaatagcaaacgagaatataacattaaaaagacagactagcagaagcttaaaaacagaaaaacaagttttagaaaaatagaaacatgtagatagacagataatgatggataacacagtattaaaacattgtctttcaatattttggacaattagatcttttgtgtgcccgagatttgcaacgggagcaacgtggaatactctctcgaactcggggttgagcccagtaagctccatctatttgtacccatcctccgtcctctccataaggttccattcataaactagatctatagcattcagcaaccaaattctcgtatgctatttctttgtataatacagcagttaaagcatgtggattgttggcttcaagacattttgtaaagaaatgataatagatggaatgaggcattgaccaccacataaaataccgagatctgtcaaggcagacacaacttagtgtttccttggaatagacagccgctttaaataacggaccagccttaacaaaggatttcaaagaatcaacaccagattctgcaacgtagctaacaattttagcaagcagcggggccggcaagtaaacttctgggatagcagcatcctgttggaaaaaaaacgaaagagattgttagtatttttattaaagtagtagttaaaactgtagaatactaagtactttgggtttggacgaacaaccattttcacatctgaggcagatgatgtttcattgttgcttatcttcgtaaacttctgcataatttctctgttttttggttttaactgaagaaatgggtaatgggaaaaacattaatgaatgttgggtgtttatatagattattaaggaaagagtagtttaagtttttctgcggttatattaaacaatttataataggtggtaaattgtcccgctataaatcagtttctcaatgttgaggagggaactaaaatcagatgcggaaaaaagtaagagaatacatcgtttataattagggtataaaagacaggaaagtaatttattaacctatccataaacaacaatccacgatagtaatttcttatggatttcaactaaaagtttcaacaatccaccctatcagtcatgtaaacaaatatatgttgagaaattagatatgttgggaaacaatattttcagatcaccaattttattccttttaaaactcaagcaatttgctaatttctgataaaaagattgtaatcttgatataaccgttccttagtaaggtgcacttaatttatacaccatattcctattgtactacttaataaaatatttgttacaattattacaaatgagaaattttgaacaaagaaataactttttttattaatatatcttatcatttataaaaatattacaactttgaaaaaaaataaaagaagatgagatagttctaatcatcttctattagtcgacaaccattttgatttcttcaacttcctcaacatcaggttctggatacatggttgatataggtgcatggctaacaatcttaaaccagttacaacctggataaaatctaataatcttccaccaagcaagagcaataacaacattgttcttgcgaaatgctcgaaatcttttctccaagtccactgcaatttctccataagcctcacataccaatgtatccttgctgaaaatatgtaaaaatatgtggttatatacttactataataatgtataaacatgatatgtttgaaaaaaactgtaaattgaggttttaagaaatgtactttttatccatgatcgtgaacggcaatttgaatccggccatatcattctcgttacttgcggtattagtcagaatcccaacattaacgagtgccccgataacatctttaagagatatgttggagatatcttttaaaaaaagtaatgttttgaaaaaagtgaatggagtttataaagaagaatttacttaccaaccaaggtatcgttgccaacaacatcatccacaatgtagtcgaatggagtgaacttgttcagtaaacctgtttctcttggtgtggaagaagtgacaatggtgtgatccatgaatagaatgcgaaactgatgaggagttgtttttattgcttcgcagttaggtcgaacgagaaacgtagttattgttttccattgattctctttgatcctgtcaaagtagaaggcagagaaacgaggaccgattgttgcttctatttgggtgccctgtgaaaacaacattttaggggtgagggatacactggaaaacgaaaaattctgcaaattgcaaaacaaattgaggaaaattgtttacccattcatcggccaaaacaagacgtagttcgaaagcgttcgggttgagaaattttttgtaaatcctcaaaaccatgacacaaatcgtccaaccagtaaccatcggagacaactcgtacaagtggtgatgtttaaccatcgtgaaaaggagaagtgaagagtaacgaaaaacagagaattatagaaacgaaaacagaggatattgtttttcttttgcgattgggttgtcttggtagagtcaagaataggagaggtatttatagcaagtgaaagtgttcctctgattgaagccaaaacggtgtaagttcgtctgcgaggaaaagatgtaacttttaacatccaaggggtgcttacttgaacgatccgttgtcgttatgctctatgacatatttatttgagaatattacgtattgatttggtggtggttgtaatattagatatataattcgtctgcagtggtttatagtcgagttatttatctgtaattgttatgctaaatatatgttctgtccaggagaacaagtccaaagagaaatgtccgtttgaaaattattataacgaggtgaccaaacgtatatgaccaaaacaaacgtaagggttatcaattggaaatcatttatgctgaacgaacaaaattttatgggatttgacttttcataggattaaatgaaaacaaaaagcagaacatcagaaatgaaaaaggaaccacattgtctttcaaagtttgggactatctgttcctttctttgaaaaaggaaccacattgtctttcatgttgaaagagaaaaataattgttaatgtatccatatgaatccatccacaacataactgtattaattcgtttgtctaattgaataattcactatgactggatgacatttatattaagatttacaaatcaacaatagttcaaaatacacaaaaatattaattttgacctctgtttgtaaactgtgttgttgatttgtaaatcattcgagctaattatgaaacaactcaaatcatttgccatccctataaaccgtttttcaaaagcttaataatcaacaactaaaaggtgtcacaattattatacaaatgatttgagttgtttcagaactatgacttgcgtttttgtatatgaaattggtttaatggaattcaagtggtagattttatatttagagttaatatatagtgaatattaactgaacccgtactccccactaagcttcatccctcacgattgtgacctattaagagaaacatccaattaattactctgtttttattactcatttctaaaccgttttgatcagtactaaaacttctctctgcatcacatcttactctttcgttattcgcaacaaattgacaaaatgagtacatcatcgaaatgtctacactctatcacacaatctagcgacacacaggttaaatttttcaattttttaaacaatatagtttacattcattccacaaagtatatgtaacttctataaactttcgtcttcgttgtcaacagaggaagattgcaagattatacattccggaaccaattctcgcactattgttagccacgtttcagaagaaggaattgaggctctgaaaaactggattaaatctggtcatgaagggaaatctgcagctttctctgtcgagacactataatgagttcgtttagataaaagccctgacttcatcaacatgtcttcacccgactctgttcacttctcattctactccaaatgtcttgcaaaaagaaacccttacgctatgtatctccagagcttgaggctagggttctgttctctcgacatgaaaggcgccatttcattattgaatgattgtaaagatgtcattcctatagccaagcttctttacattgcgctaaaccgctgcgcaggtaatgaagtattagacgcgtttaatagtttcaaacgagagaacaagtgttttacagatgtagatatcatggccaagacactaattgaccacatttctgatttggaaccaaaacgattcggatcttacgctgagctctttcattatgaggattatccagactgttgggtcatccatgaattttacaacgaatataatggtgagagatgttcacattgcgtctacttcttcctcttcagagacatccttttgctttcctagtttatttaaaaacatgagttacccactttcagaatataactatctcttctgtttccctcttttatctagtttattaatgtaatcttattatgaaattgtatttctctcttgtatttaacgtttaatctagtgaacatctttctcgtttatcataacttatagggactctttcgattttggagcatgcatagcaaaattttccgactatactaattcaaaaaatacttaagattggttatatctgattggtctggggcttgtggatagacatataaatattcatttcctatctacatgtaaatattcagagacatccatttcattaccaagttgtaaaaagttttttaatattaaaaactaagctatataatatgaaatcacatgtattagtcgatattctctattctatattatccgattcaataaatgtccacattttttattcagaatcaacaaacttctaaccttacatgcactttgtaaatctgacatgatctgaaaaataatttgctcacaattactaatttttcaacatataactgattggggaatcttacaatattgaatcatgtaaatcgaactaatcttacaaatagatctatttgaatcaaacgtttggatatgatctgatggtcaactatacttggatagaaaacagaaatatttgattttcatctacttgtaccttttctcagacattcttgcgtgaccctggttgaacataagcagtataaatggaaaacctaattagcatccaatactcagtaaatatttatatgttttacacctacgcattacaaatcgtgagtgtttagtaactgtatataattatgctcaacacttgagagctaaccataattatcttatcataataaacgtgataattaaaactaaaaaaaaaaaggataatgctctaactataattgttctctaaccataatgtccccggatttgtctcgaaccataataatctcatttttaaacctgattgtgggaatattcacgctatacaacagtatctcaatatttcccgtagaaggaattttagatttgtctttcatggtgaaagagaaagataattgttaatgtatccatattaatccatccacaacataactgtattaattcgtttgtctgattgaataattcactatgactggttttaacgtatttgtaaacataattagctcgaatgatttacaaatcaacaatagttcaaaatactcaaaattatttatttctcttcgcattgttaactgatataaatgttagatgaacttgaaaataaatggggttatggatggaacaaacaaataatatgatacaaaccactaaaacattcaacagcaatatagagataagattattttgtaggaatggggaatgaaaaaaacttaaacactggagagctaaccataattatcttctcataataaacgtgataattaaaaaaaaaaaaaaaaaagaataatgctctaactataattgtgctctaaccataatgtccccgaattatgctcgaaccataaaaatcccagtttaaaacctgatggtgggaatattcccgctatacaacactatctcaatatttccggtagaaggaattttagatttgtctttcatggtaaaagagaaagataattgataatgtatccataagaatccatccacaatataactgtattaattcgtttgtctgattggataattcattatcactggatgacatttatattaagtttaaacatatttgtaaacataattagctagaatgatttaccaaataaataatagttcaaaatacgcaaaattatttatttttcttcgcattgttaactgatatcaaatgttagatgcacttgaaaaaaatgttgttatggatggaacaaacaaataatatgatacaaaccactaaaacattcaacagcaatatagagataagattatcgatatggttaagaaaaacaaaaaacatatttatatcatccagagttataagcattcaaagaaggcggaatcaacgtttatattacaacagatttgtagggtggcattcgataactagtcagaaacattagatgaatagagtgggcagacacattgtttatatatgtccatggcatattgacgcctaaacgcgtcgacgtgtttgtcagtaatttcagccattttatctgggagtttatcacttgcctggatctcgaggaacttcatggcaaccgggccacagtcaccactccgcaaattcttgtagataccatcaattcgactccagccaaacggttgaagaccgtgattctgagaaaactctggcgtacagtacctttggatgaggtggggcaaaagattgactactggctcaatgcatctttttaccttagcgtcgtcgtagaggtctgtatttgggtcaagaatttcaacgctccatatgccaagattgattgaaagaccaacccagtggcaatcattccatatcatgggtgcgtaaattgtatctatgtccttgaaccattcagttttggatcctttgatgaagcgctgcatgtcctctgaccaacgaacacgtgatttcaccttcgcagcgttgaaggctctgaatttagcttgtagatggcttgtgaaccatggatcaacaaaagcagaacgatgattctcaagtgtagttctgagcctccgagaaagtaatgacaccaaaacctccatgtgctaggaaataaaatatttacacattagtatctcttgttaacaggttaatttgtactaaggtaaatatagtggactacataccagggttgaaacccattgctgaggtttggcaagttcgacgaagaatttgttggaaataaggaatccacacttggttagatgttcactatgaggtaaaaaaacagcattagagatgaacttgatgatgaatgttgtggaaataagaaaaatgaatgataaccatacatatttggagagctcgagagggttttgacaaactgtgaatactccgctttttttagtgttggtaaaagtgcttgtgtctcaagtattggttgagatgtgaactcggctatgagacgtgcttcagcttgggagagatttggtttttctctgttacgcgccggggatgaatcagataactcaaaatattgatctggttcccgggcagtagagttagagtgttctgagttattatcctgtacatgaagatataatatcagaccaatagggacaagctgttacaaaactgaaaaatcattccctagtcattattaacaaaagtcagtatatgttacgcaatacctcgttccttgtacccacaatattgggactatgtgtgggagatgattggggctctttgtcagctttggaacttgtatcaaatacaggcttcacaaacacaaccattgcctggaataagaagataattttaaaaacaatccaaacagagctgtccattaaaacataccagaaaattatgatacatgttataccttcataggatcagtgttgtctttacaaactcctgaatgaattgctgcagccgtctccatggtgacctgatggtgagaaaaacataagaatatataacttgcaaattatttcgaatacacaaactctaatccaatataaaagtgaacatgcaagcctaatttagtttagacataaggatgaccttctttttgaagaacattgcaatcccagtcaatgaatgagctgctggaggcgtctccatggtgtcctgaaagttgaagtacacaaaaagatggtgagaaaaacataagataatattttctgcaaatgttaaggtatacacaaaatcctgtcgattataatagtgaacatggcatttttctataaatgtttgttgcataatgcctgagagatgcatcaaacctctacaatctccaataaatcaatgaatgtaaatcattagttgaaactagttagaaatgtatacctccataggatcattgccaatcttttcttcgggttgagcctccgacactgaatgcgatgatgcaggcatctccaaagtaacctgaatgttgatgtagacatgtagctagttagaataaataaaagaaattttgcctacattttatgaagtaacaagaaaatcatgtccaattacacaagaaccacaacacataaaacttgatgatgattgttacagtataccttcatagaatcaccgtcgctgttgacttctggttgagtctctagcaatgaatgagatgctgcattgccctgttgagaattggcttataaattttgttttggaaaagatctgatagaagaagcatccctctccagtgtcaaataaagcaaggaactagttaaaaatgtatacctccatagggtcatcgggttgaggtagttccactgagtgagatgttgcagctgactccaaagtaacctgaatgttgaagtacattagtaagtatccacaaaatcatgtccacaataactatgcacaagagtcattatttatattaaggactaaatccaatgtgttaaatcaaattatgtattagcttacctccgtcatatgatcatcgtcaatgttttcttcgggttgcgtctccaacactgaatgagaagcttcaaccgtctccaaggtttcctgaattatgaattacaaacagatatgtcttaagggctgtgacaataatttggtttaataaagttctgacaataatttggtttatatataagcttacctccataatattgtcttgctcgagatgagattgttctttttggcttaggtttgcacttgaatcaaactgattgtaaagtacagtagtcaattttgtgagaatctataacctgtaaaataaattgtttgatgtgttgtgtttgtatttttgtacctggatttttccctcatcatctgcttcatggccatttggatcttttagaatgcactgagatgctgcattgccctgtggagaattacagtctggagaattggcctgtaaatatttttttggacaaggactgagtgatgaagcatccctcaccggtgtccaataaatcaaggaactagttgaaaatgtatacctccacagggtcatcgggttgcggctccaccactgattgagatgcttcacccgcctccaaattgacctgaatgttgaagtacactcgtaagtatccacaaaatcctgtccataataactaagcagatgtgcaattattatgtttacggtctgtgatgcaccaaccatttccgatgtgttgcaccaaatgatgtattaacttacctccataatattgtgttcctcgagaggtgattgttttttgttgcttacgtttgcacttgaatcaaactgattgtaaagtagaatagtcaaatgtgtcagatcctataaactgttaaataaagtgtatgatgtgttgtgtttgtatttataaaagtacctggatttttccctcatcatctggttcattgtcatttggatctttggcaccagtgtcataaattggattgtcctctgttgcatcatccttttcagaatcctgtgattcatgtggagtatgattgacatccatggggtcatcagtaatcacctgaaacaaaatattttgacgtaaacaattctaccaaagagatattggaaattaaatattacactaaccgtgtttgtcaaagttgttctatcaatggattcatcttgaaacttcttgaattcatcatcttggactatcgtagaagggtgagaaagaggaggagaaacatcccatgaatcatccttttgctcagattgatgctagcaagattgataaaaattgattaagtacatatagatgtggtaacagaataaacaataaacacataaggttaaaacagcagacctcaatatcaaaatcctcattctgttcatcagacagcgtgtgtgaatgagatggattctatgaggaaaataaaagttttgttatgcgttaaaacttgaaaaatgtataagtagatgataaggttcaaatattataaaactgtttgaaatcttgattacctcagaggattgagattgagtaggtacctccaatgacttcttgcgctttgatctagaagataatggaacaaaaccgaaagccaaatttctggaccgcttgaaggtgacagtttttcttttcttttcaagcttcattacacgatttgatagctcttccaccttgttttgtagatcaacgatcaacctagacttctcatcatcagatagccttacaacttgattaaaacgagttgaataactatgcttggatttgggagggtcagacttcacccgtagtctcttcttacgatccacaatatgctttttgtgaacaacagaagacttctcctttggaattttaattgatggcaatgtagcatcacctcctggccaatcactttttttgaattgatgagctgtcagtatcaaaccattcatgtaagaaactttcctgtctttcacctcgtcatcccactctgcccaactttggtcaacattaatatcttcacctataagcggatccacaggtctctgttgaaaaatagaatgttattattagtaaagaagactggatatatagaaagagaatattatagagaccatataaaaacttttgggttagaaaaaagccttaaggttgctttctaaagagtgaatctgaggaagagtaattagttgtgttggatgagttaaattcttccaatgaaggattgtcaaggaggtgtcatcaaacttcagcaaatccaccattccaggtatgtttcgaaaagctaagagctgcagggcatgcgggaaacctttaagacggaatgtgatctgctggagttgcttcaccaaattctgaataggatcgtttgtgagttgtcttttaccggtgctcttagcgagaatccgtttctcgggtgtcatcgcttcaaccgtcttcataaacgactctctaccccaaggaaacgaaaggaatttctctaaatctgccaacatctctacatatttaaatgtaggcctaccggtttggttagatgctatgaggacaccatctacaatgagtaggaaagcgagcttcagtttgtggtcagaagacagtttactgcgcttcttggttagcatggcagatatatcccctaatgtaaccgtcttgtctggaccaattaactcattccagtagctcttcttgccatcatcataaacaggagaatcttcagggtcatactcgtcaggaaactccccacaaggtaagccagtcacggaagcaaattctagtagtgaaaatctcattgggtgtccaccaaaaactgtccaaaactcatactttttcttagtaagcaactgtctacataacaaggcatgaatgaccttacctcaagtcgcaaccctactaactggcaaatggaataaaggaccaaagcaagactgaagtataaaatctaattcctctgtcccatcaaaaaccttcttgataaaggatagaatatccggtctagagtatacgttcagccttcccctcggataatgatcggtggcgaagagtctatttggaaggtttgaatcccactaagaagatcgttcctaagatgtcgaccctgttcattggcaagaaatcagttcaagagataacgactagattaacgagtatttgtacaaactactaaaaccacaaacgtctgtgcttagctacaaacaattgggaaacatttttcgattcaaaaaaaaaattgcagaaacattcagcgagaagaggatttcttcttctgagttaattggaccaaaataagatgattggaaacgatttgtaccttccattgagtattccgatcagtgagaatcaactggaatgctaatgaatttggcttacgagaacaataaatcgaaatcgaattcgattattgcagagatttgggggaaattactatttggtttttattcagcgagtgtagactcgcctgagtggcggattgatggacagcgacggaggagtcgccggattcggagcagttgacggattgggagcagtggcgatgtggagatacagtaaattagggtttttactgggtaagcggtattttacgatcgtgttggtaaatgaagatttaacccagacagtaactgataatacgtggttcaaccggaaccggattagagaaaaccggctaaatttgttatgttttattaaaccaacgatttcagggtaaaggggtaattatactgagttaaagtgactaatggttttaaagtgttctattgtgtccaaagttttgaaatagtgcctctacgtgtaatattctcattattttgatatatatagttttctttttttcggtcatgttctttattttatattttatttatatctaggtaataccagtaattcgttattatttcatcgggtatcgtttgctttattgtatttatgaagcttgatgggctaaattcaatttttttatgtttttgtttttatttaagttttttttgttgctatggaatcaattgtttaagtttagcaacgacaaaaactaactagtaaatgaaatatggacgccgcttaagtagctctcaaataaaaaattgttaacatggcataatacctctcaatagattacatataacttatattaacataaaaaagtatatcaaacttaagtagctctcaataaatagatggtgcatgacataaacatccctctctctaagagtatatgcaacttctgttgacatgaagtatacatgcattaagcttaagtagtactcatcaacaagctaagttcgtttctatacacccactgacactgagcctctaaaagatcaacacaaaattcactctaataaaaaaatagcactaattggcataattaatcaaaacacgaatgcaattcatttgtaagagaataaagaaaagaaatatgtttaatttatgcggaaaatagtgtggtttaggttcaattttgtatactaattggcatgaatcaaacaaaacacaggcagtttatttggaggaaaaaaaaaaaaaaaagtttaggaggaaaaatcggtgacgcttaggttcaatatgtttatgtgctaattgatggcccatgaagcccaatatgtagcaacggcacatcatttgcctctcgtataaatctcattttcacgtaatattctaaattaattaacaagagattgagagattgagaaagagcgagagagagagagagagcgagagcaagaaactcgagaaagatttactaaaagagcctttattctccccttgatcttcccgcgatttccttcggctgaagaacaatataatggagcgtgagacttcgtcatcttcaactcctccggaggatcttgttacatcgatgatcggaaagttcgtcgctgtcatgtctaacaacgacatacgatacgaaggcgttattagccttctcaatctgcaagattcgaaattaggtctccaaaacggtaacaattcgattccaaaccctctccaagatctactgtttatgattttcttcttttcaagttcttcatatttgtttctttggtcgttgttagaatatttccgtgaaaactatacgtttcatatatataaaacagtatcatgtgatagattaaggcctcaaatttatgtatgcagtcgttagggtttatggaagagaggttgagaatgataatgagcaacgagtgttccaggttcttaaagaagttcacagtcacatggtatttagaggaagtgacattaaggttagttttcgttaattttttgggttcaagattcctcgctagtcttcttcctagttagttgcttgctgcacaagaaacacttttcttgaagcttaaactggttattttaattgcaccaatagcagataacgaagcacacgttactgtgtttagatttcgaggttagttagtttagggtttgagggtcgttaatgataaatcatctacttggttacttgctatataagataagtttttttttatataaagttatatatattcagtatttgtgacattagtttgttggtttttgtgtccatatgtttcagtcagtcgaagttctctctctgccgccaccagctaggcataattctgctatagggcacgtaggtagcttgattactaccgaagacgtgaggattgagggggttatcagccatgttaaatttcatgattcgatgatattcatgaagaattgtgagaacctttttttcctgatttctattctactaataaataaatatatatataatgttgattcattttaatttacaggtatgtgttatggtactgaggggaggacgaagagaagacgttcaatagtagcttgcaatcaattagctggttcaatccacttcaaattcagagacattaaagtacgtggaccaatacttactcatgcatacatatttgattaattagtttgtgtactgtacaatttacgatcaatctacaatttacaggctctcgaaatcatctttgttcgggaacttctacacaatgatgatcgtgagtttgctgatcagtttcctctactaagtagatcacacatttgtcatcgccaaggtggcgtctgatagtctcatgccaaggcacagcctctttcacatgataattagagacgacgagagaagaagtattagagaggctgctccttgatttgtgtagaataaaacatatacctaattattaatggatttacatggtttttctacgtgtgcattatttggttgactccaattatttaacaattgcatatttgtctcaggtctcatttagcaactaggtaatgtaggaatttaaatagctctataacctactttttaattgtttttttggtgaaacttttttctcataacatggtttttttttttttttttggtttaacggatatcttctcgtaacatatgttcttctcacatgttaacactaaagcagacacaagaaaacaaattagtacgttacgttgttgcatgtgttattttgatggctaactggaaaaatacaagtcgttgtgattagccatccaatgggcctctaaaaataatgacttggtaaaactagacaacccaaaatcacaaaacaaatattctcttcttctattaagtaaaaaaaaaaatcttattaaaatctggtttaaatgtttgttcattcaaataaataatggagtgtattttagaatcaaataaaaaaaaactttatcaaatgatttatttggtagataacaaccaaatcttgagctaaaaagggtgaaaaaatattgagaattttgttaataagtaaatagttatggttttgactgggtataggagatatatctaggctggtgaaaaaaaaaagaaaaaaaaggatatatctaggctttaaaatattcacatgcatacaatcagattttcatcggtgttcgataagaaaacaaaaagcaagtgtttgttttgtaaaaaactaatggcatacttaagcttcaagtctaatatggaaccaccacggggatataggagatatatctaggctggtgaaaaacagaaaagcaaaaaaaaaggagagttaatctaggctggtgaaaaaaaaaaggatatatctaggctataaaatattcacatgcatacaataagattttgatcggtgttcgattagaaaacaaaaagcaagtgtttgttttgtaaaaaaactaatggcatacttaagcttcaagtctaatatggaacgtacaccacgcgagtcaaacactccttgtccgcctccccaaccatctccgtcgttgttttcttcactaccagatgacatcgttttgaatatcttggctcgcatatctacttcctactaccaaacgctctctcttgtctccaagaccttccgtttgctcatcctctccaaggagctcgacatggaacgttcctaccttggaacccgaaaaccatgtgtttatgtctgccttcaatctcccacccatccttttgatcgtagatggttcggtctctggataaaaccctatgatcatcagcccctaacccattggacgatcgacatcaagtgtaccggacattggttgctaccgatgccctctccctattctcgttgcttacaaatagtccacgaaactgttggttcagaaacatacgaaatcggtggacaaaacatgacaccctcgactgacgtatgggtctatgataagctcattggcaaacaacgcaaagctcctagcatgatggtggctcgtaagaacgcctttacgtgcgtccttgatggaaaactatatgtaatgggaggatgtgaagcggatgaatctactcattgggctgaagttttcgacccaaagactcaaacttgggaagcattgccggatcctggagttgagctccggtactcttcagtaaagaatatccaaacgaagcaaggaaaagtgtacgtgaggagcaataagaagaactttgtttaccttataaaagagtgtatgtgggaagttgccgaggaaaacttgggtgagagtacctgtgagatagagaatgtatgctactgttatagtaataaaagatactggtggtatgacgcaaagtgtgaagagtggagattagtcaaaggtgtgagtggactttacgagtattataaaactgattctgaaataggtaattatggtggaaaacttgttgtcttttgggaccgtgcggtgtctcgtttaaccgcaaccaaagaaatttggtgtgctatgatttctcttgaaaagggacatgatggtgaaatctggggtcacatcgaatggcttgatgctgtgcttatagcccctcggtcgtatgcactctcacattgtatggacttcttgcaataattaaccatatcttttttgctttgatttttttcaatcttttttattttatttttttttgcagcttaaaacttataattcaattagttttaatcagaactatatatattattgatatatatagttttcttttttcggtcatgttttttattttatattttatttatatctaggtaataccagtaattcgttattatttcatcgggtatcgtttgctttattgtatttatgaagcttgatgggctaaattcaatttttttttatgtttttgtttttatttaagtttttttgttgctatggaatcaattgtttaagtttagcaacgacaaaaactaactagtaaatgaaatatggacgacgcttaagtagctctcaaataaaaaattgttaacatggcataatacctctcaatagattacatataacttatattaacataaaaaagtatatcaaacttaagtagctctcaataaatagatggtgcatgacataaacatccctctctctaagagtatatgcaacttctgttgacatgaagtatacatgcattaagcttaagtagtactcatcaacaagctaagttcgtttctatacacccactgacactgagcctctaaaagatcaacacaaaattcactctaataaaaaaaatagcactaattggcataattaatcaaaacacgaatgcaattcatttgtaagagaataaagaaaagaaatatgtttaatttatgcggaaaatagtgtggtttaggttcaattttgtatactaattggcatgaatcaaacaaaacacaggcagtttatttggaggaaaaaaaaaaaaaaaagtttaggaggaaaaatcggtgacgcttaggttcaatatgtttatgtgctaattgatggcccatgaagcccaatatgtagcaacggcacatcatttgcctctcgtataaatctcattttcacgtaatattctaaattaattaacaagagattgagagattgagaaagagcgagagagagagagagagcgagagcaagaaactcgagaaagatttactaaaagagcctttattctccccttgatcttcccgcgatttccttcggctgaagaacaatataatggagcgtgagacttcgtcatcttcaactcctccggaggatcttgttacatcgatgatcggaaagttcgtcgctgtcttgtctaacaacgacatacgatacgaaggcgttattagccttctcaatctgcaagattcgaaattaggtctccaaaacggtaacaattcgattccaaaccctctccaagatctactgtttatgattttcttcttttcaagttcttcatatttgtttctttggtcgttgttagaatatttccgtgaaaactatacgtttcatatatataaaacagtatcatgtgatagattaaggcctcaaatttatgtatgcagtcgttagggtttatggaagagaggttgagaatgataatgagcaacgagtgttccaggttcttaaagaagttcacagtcacatggtatttagaggaagtgacattaaggttagttttcgttaattttttgggttcaagattcctcgctagtcttcttcctagttagttgcttgctgcacaagaaacacttttcttgaagcttaaactggttattttaattgcaccaatagcagataacgaagcacacgttactgtgtttagatttcgaggttagttagtttagggtttgagggtcgttaatgataaatcatctacttggttacttgctatataagataagtttttttttatataaagttatatatattcagtatttgtgacattagtttgttggtttttgtgtccatatgtttcagtcagtcgaagttctctctctgccgccaccagctaggcataattctgctatagggcacgtaggtagcttgattactaccgaagacgtgaggattgagggggttatcagccatgttaaatttcatgattcgatgatattcatgaagaattgtgagaacctttttttcctgatttctattctactaataaataaatatatatataatgttgattcattttaatttacaggtatgtgttatggtactgaggggaggacgaagagaagacgttcaatagtagcttgcaatcaattagctggttcaatccacttcaaattcagagacattaaagtacgtggaccaatacttactcatgcatacatatttgattaattagtttgtgtactgtacaatttacgatcaatctacaatttacaggctctcgaaatcatctttgttcgggaacttctacacaatgatgatcgtgagtttgctgatcagtttcctctactaagtagatcacacatttgtcatcgccaaggtggcgtctgatagtctcatgccaaggcacagcctctttcacatgataattagagacgacgagagaagaagtattagagaggctgctccttgatttgtgtagaataaaacatatacctaattattaatggatttacatggtttttctacgtgtgcattatttggttgactccaattatttaacaattgcatatttgtctcaggtctcatttagcaactaggtaatgtaggaatttaaatagctctataacctactttttaattgtttttttggtgaaacttttttctcataacatggtttttttttttttttttggtttaacggatatcttctcgtaacatatgttcttctcacatgttaacactaaagcagacacaagaaaacaaattagtacgttacgttgttgcatgtattattttgatggctaactggagaaatacaagtcgttgtgattagccatccaatgggcctctaaaaataatgacttggtaaaactagacaacccaaaatcacaaaacaaatattctcttcttctattaagtaaaaaaaaaaatcttattaaaatctggtttaaatgtttgttcattcaaataaataatggagtgtattttagaatcaaataaaaaaaaactttatcaaatgatttatttggtagataacaaccaaatcttgagctaaaaagggtgaaaaaatattgagaattttgttaataaataaatagttatggtcaaaccggttttgactggattcgatttcatatttttaaataagtaaaatatttctattattctataccgttcacgccctcttaggtaaaagaaaactttcatattaaatttctatttaaaatgtttgtccattcaaataaataacctttactaaattatttatttggtagattacaaccaaatattgaaccaaaattataataattctgtaaataagtggtgcactaaataagtaaataataaatgtcaaaccggttttgataggagataataaagagagatcatcaaaaatatcaagaaaattcttgatgatgatggttcacacagagaaaaatcacacaggcttataacatcataaacacaagtcatatatattgttgtgataaaagtcacaatatagtaaaatatgaacatcttctgtaaccttggaaaatattttgcatgaattgtcgtcaaaccaataccaaagtacaaactcattcagattctcagtggtttacacatgaagcaagttattgtgactactgactagattgttaagactctataataaagtatatacaaatgcagggaatggaaatgacacgcttcttcattgcaattttctcgaaactatattggaggtagcttgtcttttccttcaaagtagccggagaccccggcattcagctgcaaaacgtttgacattttgaggacgattgaaacgaagaataactgggtttaagattctgagaattaaagaagttataataccttttcgattctgtccgctgtgcctgagagatcttgtgtttgttttttgagcatgctgatccgggcttccttctggcgattctgttcttcagcctggaaagtggatgaacacgagaagaaattatttttaagaaatggcaacataagcaaatgactagtttcttgtgccttctttttgagcttacttaccctttggagcaaaactgttaacttttgtatctcgttcttcttagatgttgtaagatcatatgctattgccattacatcagtcctgagatggagtcatggtgacagtaatatcagaattccaaaatgtggggacttgacttacaattgaggccaataccataaatggacaatagtaaacaaaatggattaaccaatatgcatgagacatacttatcagaaaacaagggatccaaactctgttcttcgaccagctcctcgactgtatcaagaattggtccgacctgcaaaggggaaagcgtttcagtcagaagaattttgaaaaaatctcttacttcacaagtgtgtggatgacaaagcaaataagatgtacctgagtttcgtgacattgttcatcaaactcttcctgtaacaatgatgaaaacataactaagagtttacaattcatcacactatgaatagccaaaaaatcacaaaaattcatgttttagaataaaaacaacaacttgagaaaatttcagagcaaagggttactacctctattgtctgatgcaaattcacaacaacctagaaacatgtcagagaaagaaagatacatgagaaaggcttctccttgattcatgtaacataaaaccaatggatcgaaagagaatgataaagagagatacatacccgagtatacaactgaaaaagcagttcttgctcagccccactgaatttcgagaaaatatcaacaaaatcctacatagtgatggttcacataaaaagggttactattagttagttagtacactacacataaacccgaaacaaaatcaacaagacactgctatagatagatagacagttctcaaaccagaaacaaaatcaaaaaccaaattcaattctaattaactcaggatccaatcatcgagaacacttaaaccctaaaacttcaattttacctaaatcagacagaacaaaacccaaattgcgatttaaaaaaaaaaaaaaacaatggaaaatgattatgacattgaagcatatacctgtttggagcaagcagtgagaagatgtcgaagagtggatttgaatgatttcttcagatgggttcgtcttgaacccgcaatatccgtttcatgacccggtttctccatcttaacccgaatgataacttttttttgttggtttaaagattccggaagaagaagttgctaactggttaaaaacaaatgtacaagttgacagagagatcaaggacggaaaatagaaaatatcccgggaaggcccagttatataggcccagttaaaacccataagattttagattcagacacaagacaggcatagtagtagtaattcacggcccattactttttccttttttcttttgcgccaattaacattttttttctttttgcgccaattaacatttttttttctttttgcgccaattaacatttctctttcctataaattaaaccagcttagaacgaaattttaaggcaatatttcaaatcgaacaatactgcaaaaccagagagagggagagcgagagagatcaaaaaaccctaatcgactaaatcctctcttcttcttcaaatttttggttaatttcttcggctgaagaataataatcatgaaaactgtgacttctcagcatccttcttcattgtcaccaccatcttttcttcctccacaaattcccgtcgaagcgtacataggaagtttcgtcactctgattgctaacttcgatatacgttacgaaggcatactctgttttctcaatctccaagagtcgactctaggtcttcaaaacggtactttatttcgattccaaaacctctaagaaactttgatttgttcttttcttgttgtgcaagcttttctaactaggtttttttgtttgtggcagtggtatgttatggaacagaaggaaggaaccaaaacggagttcaaattcctccggatactaaaattcagaattacattcttttcaacggaaataacattaaggttagttaaattgtttttatttacgtataataatcacgaaccaccattagagatttgattattaatctgttgatatttttcttttacaggaaataatagttcagcctcctacttggggtttagcaagaggatctacatgtagtaaatcttgtcttgccccaaacccaccgcttcctataattgtctcaccaaacaatcgatccgacgataagatactccaacaatttccattgatctcgaatgaaaatctcattcaaccgcaagctaagacagagtcgaatgctttctcagttaatggatcagtcaatgatagatttcccattgcttctcaaccacagtttccttcatacttctatgacccttatgtttaccagtctatgccttatgctgaacttagtcaagctcctatatggacgaatattatgcatgactcatctgccttcaaggtaacgtctgctgcaagtcaaagtttttttgccacgtttccgcctgcgccgatctctattcagctggtaatctcatacattctctatatgtttctgatctttgttttgtattccttaagcaccatcccataactaattacttgtcttttggttgtagaattctgtaagatatgattttgaggcaatgactaagaacgctaagcagtacaacatatggggtccttcccaaaccaaggaagaagagagttcaaaggtgaccttatatctctagcttagtttaatagagatccgatgctttgaagtcagatgttcaagttccaacatatgtgttttgtttttttgtttttttgcagcctacttataacattgatggatcttcttacaagatctcgcgcactccgtttgagcctattgggagaccttgaaatccgcttggccctatcgcgagacctgtgagagataccaaggtttgtttcacagcttttacctctagttattcattgaaagattacgtatatccaattttattgataattttaatatcttcatatttcaggtatttggaaattacatacaaatgagacttcaattacaactaccaccaacatatttctgtagtggatactatatgccttactgacctgtgaatctctgcttttggggtttaaacatttgttttgagtcgatatcttttgtggcacatatcattaagaatcatgtgtcttttggtatcatgaacttaccttttttatttaggatttttgaaagaatgttgtttctttctttttttcttttctatttgttacaaccactgataagttaaatcttccaacatatgtaacagtctttactgtttttctagttccatgtttaattcttctctattccctttgagttttgacttaaatgggtcaagtatagttgacttggtaagtcttgggtgtctgcatctcccacacgtgtgaaagtactattctcttattcatgttgtaataagttataatcttagattgatcagagttatgtagaccactagttgaggcttgtaactgggaacgaatcttcctaattgccagtcaattgagataaagaagaaaatagcataatgcataattattatacacaagttgaaactatcgcgacattcttttaattggtatcctaggtgaccttaagtggttgatggatgaattaaataagtgcattaaccaattatatacatctttgtaaataatagcatatccgatatttccccttttacttttcgttttatatttatttttatattctgcttatattagtggaagacacttcttccaccaagtgaatgacactttctgacttgttcgtttggtgctcatcatgcttttgttcttcttccattgatctcctttggtcttggttttggtctttgattacgacttgcacaagttgttgttgtttctttactttgatcctggtggctgaaatggtcaaagctccaagtccaaggatggctaagcagcctgaagctgcaaagacaccgtctttgaccaagtaacaatcttcatcaagccatccttctccatacgcttgagctcgactcatgcttattgcggtactcaaaatcaataccactaccacaaaattggacctgatcacataggtaaggaaaaacaagaacagagaattatcaatataggaaactaatctcaagagatattttctttcttatactttagatgatacatcgcctgatatgtttagaatcttagggatgggaaatataactctcaaccttaaaatcgaatcaaaccaaaacaaattgattaaccgaaacgataccgaactttgcattagtgtcacctaacaaaccagtccatattttctttagatgttatatttttttattgcataaacataatattggtgaacttcttatatatttatatttcggttttattttttcaactacagccgaacctagtacaaaacaaaaactaaacagccaaaccaaaatacaaatggttttataggtttaagttttagtaaaaccggaaaactaaaccgtaaaccgaattactcactgattcaaaattacccaatacaaaattcagtaagatatatcggtaggtggttaaggggattcttggttacagttagatgagattaaaaaaaaaaaagagaagaggaaaaatattttaccaggacaggagcaatagaaccgtaggtaaagtaagatcagtaatcttgtaaccatcttctcttttagttcttgtccggtgatttcggaacacaactatgttcccaacgatctgagcaaggcagaagcaaagaacagcggctgatccaagcccgaacgcatggcttccgggtacatagcagttcctctctgtgtcccatcgaatatcttctttctacacaagtaaactttggttcgatttgtcaatataaaaaaacaaattgaaggaactcgacgtcgtacctgtgttctcttgaactcggctgcgaaacatgtgatgaaggaaacgagaccaagagagaacacgactgagtagagaaaaaggttgtgcatagtttttagtggacaaaatcaatcagacgcacttacatatatgtaattctgcaacataaatgctacaccttagattatttgagtcaaattctcagggggatttatttaattatcttttaataggcttgaggaaagttctttaatctacataaggatggaaaataaagagagagaataaaattcttaattatatcaaatgataaaatttccaaaaccattttaaagaaaatagatgatggcgtatacttttgatacaagtacacaacacaaacttaaaattttggatatgtgactatgtgaggtaacttctcatagaaatcttctttgtcaactaaataatatggaaataaaagagaggagaatattatcatacattaaaataaaatttttttccaaaacgattaaaaggaaatagatgatttgtgtttactaaagacgaggtcaaacgtagattgtttgacttacatacaaagtggccttaataaaaagaacaaaagcatgataatggcatggactatagaagttgagtatagattaagccttcccaagttaaaggcttgaaactttttgtatacataattttttgtttgttttgttttagaattaaaatctgaaattttaatatgattttttatttcatatcatatattgcctactagcttaagaaatattatccattttgctcatctttatttcttatttatcaagctgctactgcctaccagtgtttactagttatagtttacgaataattaaaagaaaaggaaatttattgctaactgatactttgacaaagaacttcttaatattagttttatcaattgtataaaaaaaacatttcattttaaaaaatatgtggaaaactaaaatctatttcaaactgatgaaccctcacttcttcttcttaagaacatcaacaacattaagtccaatacaataagcaatagactgaacggtgaccatcggattaacccctaaagcggtcggaaaaacacttgtgtccgccacaaataacctttcgacctcccaagtctctcctgttggcctcaccgcggattcctccggcctaattcccatcctacaacttcccatttggtgagctgaacatatctgacctgacaaatccttcaacggctttgaactctcttctctcacaaaccgctcaatctctaacgaactcgctgttctaacattcagactcctaccttctgaatgatgcgtcccaatctcctcggctccggctgcggccagaatcttcaagactctttcaagaccgttctttagactctcttcgtcttcatcgtttaagttgtagtcaatgtaggtcttggaatctattgttccggttcctttatctctcagaagcgcaaaaatgtgtgcggttcttgaaaatttgagcattcgggttttgaaatccttgcttgatgtccagggaatgatccctgagaacattcctggatgtagagcaggtgtctggataaccatttcaccataagaactatgcgtttcttcaattacaacgctagacatcgcagtcattattcccccctcgtagctctttttcttcttttccggccacttatcttcctctggaaaccatccccaagccataacaaccggatgtagacaaaggtttctcccaatgttactattcttcaaaccgctacgtttcaacagatgcggcgttctaagcgcaccgcaagccactattgtcactctagactccaccacataaatctcttccccaaacgcaaacgcaactccagttgccttcttcttcttcccctgttcacagtcgtacatgacttccgtcgcttgacaacctggaaggattaaaccattatcagattccaccaaatctacaagccaagtctctgaagtcccctgcttttgacctttcttgcaacccaagcaacaaaacccacagtaatgatcggatggagcattcctcggaatattcttcactggtaaccctaacttttcacaaccttttctcaatacctcattattaaacccttcttctacaaatccgcattgaacacccatcctcttacagacaacatccattgcctctcgatacaaatcacttccgaacatttcgagttttgacttttctgcccattccttcatcacatgttctggtgtcttgatcgaggcggaccaattgattgtagaaccacctccgactgtggatcccgcaagaatcactacgttcgtatcggacgtcgctaataacccaccggataaatacatgtcatccatagcttgcccttcaagtaaagaaagtttgcttcttgcatagtaattccctgactcaatcaccaacactttgtaaccagccttggctaacactcctgccgccactcctccaccggatccagacccaaccaccacagcatcacactggattttcatcaccgggtcagagatagatgatccgtttgtattcctcttttgatttgaaactgcgaacccacgaccggctagcttcttttccacggcttctctagggctttttagatcaacgatgccattgtaaagtggtccaaagatctcctcaggtttcttcttcttcttctcctcgtttagttctacttcatgatcactatgatcagggctgggtccattgtaacctattgctttccacgccaagttccttcctttttcatcaacctgaatttttaaaaatcaataggaataattaaaaaaaaattagtagttagttatatggtatatcaagttgacaagtttcatgttccctccgggattcattgggtaacgagtttcgttgaagaggaactttcaacaggtccaccacaagtaaatcattgggccatatagaccccattaccatatatggtctaagaatatatttttcatttggactcaaatttcaagaatcagtaaatatatccaagtcattaccaactcactcatgtcctttattttataatttactcataccagttaaagtgactaaaatgtaaatcttaaataaattgataagtttaattagtagactaaggtttaacttatattgcaaacaaatgtgtgaaaatcataaaacataaagcttaaaagaaacataatgagtacacatctatcaaaagtgataagaaattgaaataagtgacaaagatttcgagtttagtttacctgagtgaagaagacaagggcacttataagtttgatggtcctaaataacattctaagaagtgagaaatagcttgaagaccaattcagcaatatctcttctctccgtttctccggaagccggcagaatctccggaagtaaggaaactcgccggtgaaacttctccaaccacacaagactagacttccgatccaagtagagagtaaccacaatccagctcttagtatccacttctttgggtggtgaagtctctcactcattaacctcgccacctgttattacgaatttatgatacaataacaaacggtcagggttaacggttaagtaaatgtaatgaaatttgtattcaaaaaaaaaatgttcgttctatttaactttaacctatacaaattttcatagctggtatatctagcataacggtttttggttcatgagtcaattatatttggatttccaaccagaccatatgcggccaaaccacgattatggttaagcagtcgcttcttcgttattcctataattgactaatatctaatcgttctttgaaaattttaatagtgcatatcaactaatttacacatacacgatgtagtgaacacgatatgtaaggttcaatctatttttaccttctttttgccaatgagttatgacaagaaaaaaagaacaattgaatcggtcgtcggagtgatatattaataccaaatttataataatagttatatggaacgaataaatagtagccaaaagagaaggaattaacaaatttatttttagcaattaacttgagatggcatcaatggcatgcgtgacgatggaatgtaggtgtacttgaaatctgtcggctctatatttcactgaaagtactggttttttgttgtcatctatagtaccgtttctctttttagatatggaaagtactgattcacatgcatgcaatgcagatttttaaatgcatatgtaaatatctttttgctaaataagttatagacagtttaacccgtaaaaactgttgtttaaacgttgtataagtcggatatgaatcacctttgagtaagaaagaaatgttttacgtttactaatttcttttctaaaacgatctgaatcaagaaagattacaaataaaaaaccgtgattttaaaattatgtccataaatcattcttattttatttcttgtaaaaataaagaaaaaatcaactgtaataatatctcagcaaacgtatgcatatggatccaaattaataatttaaatcatcctaaacgatttaaattatgctctattctcttttgtttgtaaaaagggttagctagaaataataaaaaatgcatgtatataacaaataggttttgttttgataaagcatgtaacatataaaaatcgggaagcatatctacttatatatgttatatgtgcatgcatgtatgtaaatctcttttatatgtgaatgcatgtttgtatatataacacttacgcggtcgggagttccggtctgagaagcggaggcggagaaatatccagcgacgcaatcatccacgtgtcctactccagagtcgtcgatggaggatatgaaggtatcgcagatcgcaacaagagattccatctcacgtggcgtcagtgagtttgcataaaacggcttcgtttcatctctctgccggaggtttccagtttcgacgtctaatttggccgccgacgtcgtatctttctgaaggcagctgtgattctccatgtattcaatactttaagttgtggctagtaaagtttatgacgtgttgtatttatatagagaccaaaggattaaatacaaatataatatatatatatatctatctgtttggtaccagcaaggaaaagtttgatactagcaagtacactgatccgaattaggttttcgaaatttcattataagcttgtgatcttttttttatagaaaacatggacaccattcttaaaaaacgctagacaaatttgtttacttaagtcaaactttctgaaatgtaagttttaaattgcatattctgaatcagatatagatatgaaatatatattaactcttacaaatatttgtttacgaattcgtatatattcgtatgtatcctaaatccaataaaacaaaaatatcagaggatgggtaatcgacagtttaggggtagtctataacaatgggtattagcctattaggtggagcctaatatttcagaaaatttatttcctataattcatatagatatatcatacatatgtgtgaatataatttactttgactttttcagaatttttttataaaagtattaaattctttacacacacccactttattcgtaattttagttccaactacgtaaagatttgtgttgcaagtgatgacgaagtgatcgtgacatgatttatatcaataagttacatatatggtttgggaaaacatttgagcaatcatacggaattaccaagtaatgtacattggttgaaatatcaaaggggtatataaacttttggtctttgcaacaaatctgttaaattagataacgcaagttaaatttatttatatatttgatattagttattacttcgtctatctataatagactagcgatttatgaaccaaaacgttgtttttatagtattcaagtttaaatgatctattcattaatattatggtttagagattcaactcattttaagtaaaataccgttctagttttgttactaaagtaatttacgcatttttgttctaatatttttatgataaaagctgattttcatactaaatttttaaataactattgaataagttgcaaaatttcgaacttcgttgaaagagaggctgattcagacatgtgtggatgtctacagatatgggaactcaaaatataaaggaatgattttatcataacttcgaatgattagtagaacacaaatcaggtaataatgtaagaaaaaatgacaatgttcattaatatgatagaatcaaataaagtacagagaggtcatgaaaggacccaacgagtgagtgatcagggtatcaaactggaccctttgagagagaaaaaaaaagaaaagcgaattgaatgtagaagacagtacagttaacaatacctgtcctccataattatcattcattaagtttctgagattctcctccagattttgagttttatcttcccccttttttatgtaaattataggtgcattgatatcatcgattgtccaatgcaagttgataatgtggtagatgtaatttaataaaaatttatgatctcctattttttgaacgtgcttaatgttgttatttttttcagaagtgtgtatatttattgcgtatagattgaaattctttgagtttgtttgggaatgattactagttatactcatcttgatcggttcagacttcttatatatatgtagtttggggaaagatataccccatgagtgcgatggttgtcgaaaactttgaattctgatattcataatttcatatctaatcagaaatgtattattaagttttctttttcaatagtattagtattatataataaccacttcaattcttatgagtgtttattaaagatgcttacaaatttaatgtggtgtcgccggtggagatatgaataaatcatattttgaaagattattttcggcaaaagtttaaaaatttgaacacatataagttctctttgtaacagtgtcatatacatgtagatcctgttttttagttgataatttttggacttccaaaaacagtgtcatatacatgtagatccagttaaacaattgatttcttattctttaatttgaatacccattttaaaaaagaaagtagccgtagaacgtttatgatgcatttgaaaataacgtttttggtatggttagtttcagcagtaaaaaaattcaccaatcaaacccatagaccataacaagaaagtggccgagttttttttttccggatatcaaaagtctatgatgcatattgacttgagtaggatgcccataaatctaatacagtaatactcattcattgaagtaggctcacgtacatgtattatgattcttctaaaatgtcttatccgtttccacttctagttcgttaagaaatatatttttcaaaatcaaagtcagagagaaacaatatataatgaacaaaaagagaagatggagcgttgctaaaacattatacacatacaaagtttcttttgttttgggacaacaccattaactcctcagtgtgaaccattgagcctagagagcaagaagagacaagcagaagaaaaaaagatagaaacagagatacatagcaaatccgtgacagaagttatgactactctcttgctcttgtcaaacaaaccaatcaatagtagcatcactattacatgtcccaactttgttttcagctcgcttaccgatttcacctctaaccattgaggtcgctcctggagggaaaataaacagttggaaagtcttagtataaaccaaaatgaaatcttaaccaactatacagatggagaaagttatcaaaaggagcaacctttaaggtgaacatgccaaagaggctcgacctattggaaacaatatcgtgtgtgcgcgactctgaagtatcgagattgctgatgaacaactcgtaaagtcccaatccaaagactaacatcacagttcctaggagatatatatctacaaataatcgtatataccatcagtatcagcatcacatcaataaaagttgtgagcatataatgttcttaatctgaaacatagataaaactctctaacctatggcctcaaccaaaaggaatatcactttcccacgattcaccgaatactgcaaaaacgagtctacaacatacatacatccctgcaccaaaagaaacgttaaaagagacagcaaaaatagtataatgtgtttcttatgtgagttgcaaaacttttaggacattatctgcttttacaagacaggatactagcttatgcatattccacactgattcatctagttgtagcttaaacaagaaagagcaatgagataatctgtagtggctttaccttgatgaaacagagaaccgatccgagcaaagatcctaatgttccaagaaacgtcataaatcgacaactataaatgacctgaaaatttcagtaaataatttttgagtcagtttctataattcattgagctattcatacccctaaaaatctacaaaactcagcttctccaagattttgtctaatatcaatcaatatcatgatcattgaaaccaactcttttacctaacccttaaaaatctcagctttatacaatgaaacagaaccattcaaatccctataaaactcagctttaccaagatttcgtaaatctgcaatcaacccatttaccttctcaatcccctcttctaaagcttcaaatctattcgtagaattcgatgttacagccgcagacgtagacgtagacgcagacgtagacgtagacgcagacgccaatcttcccggagacctataactccaactccagtcagagctcgtaatagtcttcgtcgtcctcgacggtagtttcaagccacgaaagcttgatataacaagcctcttttcaatcgggacgaaatcacgaaacccgttaaagatcaatcccgaaggcgacggtgcggcgatagcattagcgttaatggtccggcacggcgtcgtcatggctgcttagggacgaatcgtggttgagtcaaccaggtgtggtaagaagagaagaaaaagagagagtgataagcagaaacgtgtcagcagattgggaatgcgccgccgtgagtggagttagttgtacggtctcttagagatccacttggacggtaataacggaggaactttctttacacattttaatcacgcgggtcttttttcaataaatatctttaaacaatctaaacgcaaacgtggttttgtacaaacgcaattacagacaaaagaataatatagagaatctaatgaggaatgtccggtttatttttttggtttctaaattgaatgttcattcgttttgatttggtaggatctagattttggtttaactcggtttatttgtttggttcaatctttagacgtagtttcataaacgcagattcaggtacaaagcaaatattctactatgaatgtacattggtcaatcaagttcgggttttaggttcgaactcttaaaaaaattcatttcgtaaaaaccgagtatttaacgagcacaaaaatatcatgtattcatgttgaacacacaagagctcattatattgaacgagccaactttgtagcataaccatcgattgaaaatcatctcgagaataagagaacggttaatatctaactttcatttgtttcacaaaaagctcacgcttaaagttttagctcttacaaactttatgtagaacaagttgatatgtgacaatcacaaatctagctagttttagtacttacaacgttaatttgtctaacagaaatccttaatgtttatgcttgtgatggttcgattcaatattttgcatgacatgaatgcatatggaaccagtcaatctttaccttttttttgctaatgttcttgtcttctgccctaaacacccccattacttctgcagttctgctggatgttgaatttgtttctcttttttttttgcaaatgttcttgccttaatgtttgcgatattcacggaacttctttttctaaaattctcagatgcaacatatataaatttagttatgcaatgatacttagagatattctgacattttaggaaaaaaattggaatttgtaatgctgcatagtcaaaaagtgtagcagaaaataatgtaatgggaattgtcaattttaagatgaagaaccataaactgtcggcgccgtaaaagactgcaaaataccataacacattcacatacattacgttggtctagaatctatacaatgaaatagactgagcacaattgtctattatcacagaaatagaatcatattcttacttttatattttaatcaagaagaatttcaacgtgaaaatttggtgggcattattattgttcacgaatataataacaatcttctgaatatccgctgttctaatcttttccaaatattccgagataaagagcagtaaaggttattcattttgatcaaaaaatgggactgtgatacttaaattcaataatggagcatttcaagtaaagttgttaattttattattctcttcccccattttcttatctactgtttatttctttattatgtgtgtgttttgttttttcttttattttattttcttcaatgttaaggcaacaactctcttataacttacttgttattattttaatccaactaattttgtgattttaatcccactaattgttcttatttttgtgatgattaactattaaatgatcttttttaccgcaaggataagagattaccacctacaacacccatgtattttctcatctttttgcaggcaaacacattattttcacaataacccatttttagaagaaaatataaacaattaaaatattaacaaccaggataacttttacataagaaagtcaaaaaagtgggagacgcagaagaagtccacgtgacaaaagtacagatcacgctcacgtggtttacgagcgtaagcaaatggctttttccgtaatttcatcaaaagagagaaaaaaggaagaaaaaaaaatctaatcttaaggtcggagaattcatcttctatcatcaaaacagtgtgaaagcgaaaatctctttcaagagaacacgtgtcggaaaatgagtggtcgtaacctgtattaaataccctacagaagaggctaaggttgtctctgcttgatagggttcccttcttcttcttattacatatcataaacctcatttccccattacaaaacctagaactccttctctcttctctttcttcatatccctgtctaaagggattattatgatagtagagtctcaccatcgggctcggattcgcttggtgcaggtcgggaaccaattcggctgacacagcctcgtgacttttaaacctttattggtttgtgagcagggattggatcccgccttgcatcaactgaatcggatcctcgaggtgtaaaaaaactcgtaaatcctatcagatctggaagatttctacgcttctccttctttatattcgttttcttatgctttttatttttgatataacctagaaaaaggttttttatatctttgaatctgaaattgtttgttttagaatattgtatatctgatttttatccctttttatatttgaatgttctttagtctccttttgtttgcccaaatgttgaatctttgctttggttttgattttaaagccaagtgatgttgcctttgtttcgaaattttaggatttgtagatgtaggagtatgaggactcttgaatttaagatctaggttttaaaatgttagagattgttgatgtgattagttctagatttattgatcgttacagcaatctaattaagatttgattcgacgattggttttattgtggataggcttcgatgatgagattgaaattccttaaaggtaacagtcaaatctcagtgacctaattttgttttgttggggtttgtgaagcaaatctattgtccggtttataccaccggttttgctctttacacttatgtttataattgtggctttacgatttaacaattcactctgtgtgactttgtagatgacaatgattgaattagttatgctaagagatgaagagaggattcattggaggcatgtgaagtgaagatatttttttgttttccatttatggatatgtaatgtataaaattgttaaagaaaacaaatggtgtggaagtaaagaaacagaaccaattcgattagtaccgttagtgcagaataaatgcaagtaatgatggtactagtggcaaacaaacgtaacaaaacaaaaaagtttaaatgtaaacttataaagttagttggtggttgtttcagactatgcatttcatattacaatattaatgttttagctttgttatcgatcgtcttgtaccttttgtttctttacacactttttagttggaatctctaatgtataaaatataaatatatatgtatgagtatgtaagtatagtatcagaaaaagttaaagattacgtgtcctcaagtataatgatagttggatttgagggttttcgtcaaaaagttctcagtttcgtcaatgggcaggtcccttattttcagctgctccagtctttagtctttctctaatgtatttcaaacattattataataataacacataagtaaatcaatggttaaatgcttgcaaaatccagcgatcagttttgaaccatctggaataaatcgaatcaactaaaacaacaacaaaaatatcattccttttctatttcttaaaacaaatccaaaccaatttaaaacacaccttagtgagttagtgacccgtccaaaattatataagtttggattattatgctctgtataaaaggtacagtgtagatgatgagtaaaatgttggaattcttacaaacaaaaaaacaagaaagcatcatgtgattcaaacattgttcttgtcagagtctctgaagtttcactttcaagcacaaacccaacctccatgtactgtatagaagaaacttatggttacaagtcagggcatctaatcttgtttcttcttttttggatttttctctttcttatttttggcaaagaaaatatcttaacttcattattactccctcttataaagtacataattagtttggatattaattaaaattcaaacaaaaataaatttcttttaagaagttcaaacaataatttcttcattctcgatttcacatttagtccttgaccatatcagcaagaagaataagatagagagatctcactacttcggctgaatcatattgactgccttattcgctatgtatgcgtctctaagagggtatacttatgttcttatttaggttcttgatcagcaatctctagtctaatcatattgatgatgatctgttctcacacaacataatggttctgaaagggactctcacttgctatgaatggtaattgcagggtgtgtccactatgtcccaaacatgatccccactacccaaaacaacaccgatgacaccgctttctgataaaggaaatccaacaagcattcaggactggaactgaatcaaaacgactgtacatgctgatatgacttgttcaaaaaccaattgattaagatgagataaaatgaaaaaccagttatcgaaacacaaagatccttcacaaaacatagtcaaagcttgtttacattgataacagagaacaatgtaaatactcgtgatttcgcaaatgatgatgctagaagtttttccgactcagctgcgatgcaaactgatcagctgcagccatagcttgagaagctgaaccaattgatccatcatatctgcaaatcataaccatcttatttttgaactgaaaatgtaagagtaagatatgcacttgagcaaagtattcagtgcactcacagagcaaccaacacgtaaaccgcagtctgcataacaatagctccttcaccagcaggctgggaagtgtttaaacacctagcagcgaaccagttctcatgaatagatgttattatgtctgcagattccaaatcatattattaaaccacaaatcatactctccaagcaaaagaaataaaaccaaacaaacaaacttttacattggttggatccaagaacaaaagtctcagtaggaagattgccacatctcatgaaatctataaattgctttagatcaactggatagatatcaatcccttcttgtttagctctgccaataactcaaaattaagcatacatcaaagtttcgatcttttactgcaaataaccaatctaaaagaacaacctttaagtagaaacagagagcagtagatattgaaacttgatgaattagcttacattgttgataagagacgagaaggtcctgtaggatcatagttaatcaaaatagcagccttcaatggattacctgaacaaattccaacaatcaaatcaccgaaaagaagcatcttattctttctttctgggttcttcatcttcttttcaaaatctcccaaacaagaagaagaataaaacaataaccctaatccagagagaacttacctgaagaaccaacgttacccgtagtaacccatttgtcccaagctctgtccacaaacgccgaatccatcgatgctttttaataaagcaatgatttttagggttcttcacttcactacaaaatgagagaagcagagcaccgagtagtacacagtctctctctttctctctggattcgtataaaaagttaaaaactttataggtaaactcgattataatacaaagtaaagatatactctttattcaaattgcagtgattattattgatccgatttggaaaacaaatccaaaatgtttgcgagctctttcaatttcaaattaaaaaaaattgaacatttagagatgattctagtcttcagtagagatagcaggacaagtaggattacaagtcggcgacggacaatctatcttctgaaatgcactccggccataaaaccagtttccgactgctttcgcaattctctgcaaaaacaaataatcaaaatcagaactaaaatcgaattgaaaagattttaaaagtattggaggattgaattttaccgtattggcgacttggggacctttgtcaccggaccaagaggcggcgcttcctccttggcaatgagcgtgacacgagtctaagaacaatcctctagacggtgtactgtgaaccggtgacaatgctcgcatcatctgatctctaaaccctgaaatgttttaaccaacccggtttaaatttaaatctcgataaaccgaactgatcgtattcaaaaccaaaccaatataaaccggaacaattatggaattaccttggacggttttgagctgagcggcactacatttcttaagatcaagcttacaattcttccactcttttcccttatcaacagcagttggagccaaaacgttcttgatctgaaaaaatcaccaaattcagtttatatgtatccgatttgtgtatattttataatgaaatgaatgtttatgtatataagtatatcatggttagtatatgacctgccaagaatcaaaagcggcattgatgacaaagagcggtgttcgcatggaaggaacgacgtattgcgggaagaaacactgcaaaaaacgatcggagaagtctttgatatcggtccatatatagatggaaaaaagtgtcaagatcaacgatgttggtatgtttagttaagcacgtacgagttctggtttcatttttgaggtacaagaaacaggaagactctttgcagatccctacaaaaagatattaagcaacactgactttaggattcacctcatggttgaagagaattagcaattgagagatatattagataaagagtaatacgtggagtgcgacgactttgctgtaatatgattgaatgtatgatcctcctgtgatatctttactgtttcataaaatcgaattcagtgataataatcactgttgacatcaaataaaaccggtttgtttattttggttgttatcagtttaggttgggtttagtaatttagtttagactttcggtttggttccatatacttttttggccaacgcctaagagtatgtacacgtacccgtggataaagtaaccggcatcagaaacacatttgacgctagctgttcggggaagtatggcacggaaagtgtcacaatgaagaatcgcagccaatgctccagctgaacaaccggagagtatagcctgaaaagttttataagatgttaattttttttaagtgatacacattaaagaaagagagatgtcgaaatatgcacatataatatacgttttgagcgtttttcattcctttagccataagatcatcaaccaccgcacgccaaactcgggcaccgcggaagaacagcttgtttgcctgaaattattcaaggttccgactatatataaatcatacaattttgactgcaagaatttatagtacttcaagaaaaatgtgaatgttttgactaaaaataatatttatgaaatatcacaatttagtcactaaattaccggattaacggcttctacattgccggtaaaggatgatccgtcacaatatcgtactttgattctgttccaattgtagaaatctgagcaaaagaaaatcattttttttttatgaaaatcaagatagattcaacagcattaattgatcataactctcccacaaacctctggatcattagaaacaaaaaaaaaaacagtaatatacctgggttagtgctttgcttgccacccaagataccggaaaatccaaagtctttgttcatgaatttggaagaacccttcattgtacccttacgttcattacatgaagcaacgtcggtacaccatcctcctccctaacatataaacaacatatacacttcattcaaattttattcaactaattctaccttatttttatgttacatttcttttcagtaaaataattattaaaaaaaaaacataagatgctaacgataaacgccgcaatgtttttaagttttaactaatcacacaactataaagaactacgatttatatatattaaaaaaaaaaaaaaaagaactcgatttatatgtacagtcatttcaacgacaaaaaaatatatcaagtggtccagaaatttgcaacaaaaaacaagtttctttacctccatgtggacgatccaattgttaacacccgaaccaaaccctttgtcaaaatggtaagctggtgcactcccatccaaacacactacataataaacatatatatatatatatatatatatatatgttctcaaaaacttattgaattatccgataaattgtgtaaatatgaatataagtattatgtaaaccgttgttgcatattaccggctcctttagcgacggcgctttggagataagtgatgggaacggctccagttccgatcaccaacactgccaatactagcagacttgaccaacattgcttaagcctccccattctatcattttttggaaaataaataaataaacaagcttacgatttggttaatttcaataataatataatagtacatttctaatgcgaattaattactgctttcatatggtaacatgcggactgacaaatttatttattttgaaattacctacattttcgagtggataatattttttataattatactattatgtaatccattgttttaagattcctcgaatccacgttattacaaattggaaatttagactattcaaaagtagattatcagaaatgtcaaatgtgataactagccaagaacaaaacaaacaaacaaaaagacatccatcgtccatgtgcgtctttaaatatcttatagcttttctcagaccaacttttctagttgtctgtaattataaccttgctcagagtgtagagcactaaacaattattatcattacaaatctatcataattcattacttaacattgctaatcggtttgacaaaaaaaaaaaaaaaaaaaaaaattgctaatcgctattatgggatgcttgtatcttgagataccaaaaataccctttcacatcatctcaacttttactatgtaagaaaaatcatatcatccccttattcatattcaacttgttggatcgcagagaaatgtgttgaatcgtttcaaattatcaattccccgaagtaaccttcgatgtcattcacattaatgatctgatattaatatgcaatcttcttgaaatcctaaatggctaatagtaatatatactgtagttctaactaacaagactaaaacaaaatattcaatttattctgagtacatatcaaacttgcagaactataaaaagatcgatacaaatgaagcataccttgcgaaaatggagtcctcttcttgtttggttagagagaagaaaaaggttttggtgttaatgaaatggatagagaggaatctgaaagagagagctttaaaagtttatggaagccagtcattgatgtcttcttcatcatatagatacatatccacaagttgcaaataaaaaatcaaactttttcttctttttaatttgcttttttatttactcttttgctttaatttgcataaagttttcttttttcttttttctttttataagatacttgtgactggcatagcgtgcacatgtgttagtagattcgccaggttatccaacgtcaagaaactaagttgtataattgttttttttatcaatgtgttttcgaaattggttctttcatgttaaccaatcgataaaaataaaatgagattatgctcggaccttgagaatactgattctatatgcatattcatttagatattcagtttttaaagttatcatcaatcttataagatgcgtctttcttttgttaaacttttcacagtcgtgttataataattcatcctagcttgttatctttgtaaaacaaaaatctatgaatcacaattaaataagaaataaaaagtatggtttggcacgaggactaaaagtgtcggtgcactgcacaccgatcgagttagctgcgcaacagccaaaacatgttagagatttttcgtaaagtaacaaaattttaaagttcagacctttctctttttgatctttttattataacacgagtaattaagatctagaattaaaatataattagaattcgttaaattttacgaaataaaaggaataattgttacatctcaagtgtaattccttttcattgattttctccactatttcctcggaaaaatgatcgatccgaaaccgggtgaaaaataatacagatagcataattgcatatgggtttcacataaaacatgaataatacaaaaaagttaagattcgtagcaatacaaatttatatttctcaaattttctttacaaaatggctcgactatataacgaagctcaacgtgtaagccataagagatgacctcaatcacaaaactgtgacaattaatactaaatttgtatacaacaattatagaaaaaggagacttaagctcactgagtaactaactatatctaatagatttacaaaaaagcaaacacaaaacatcaaatttattttcagaaaaattttcattcaaaaaaaaataatctcctcattcccaaaagatcaaaccaataaaccaataatgacgttatgttttgaaaatataaatagtagttgcatttttttttgattgggccaaaaggagaaaagtgtacagggcccaaacatgtaaacagagtcgaattaaagttttttcttagtaccgtttagtcaccgaacctctccgaagaaacctgagatctgatcatcgaagtgttgtatccatattatatggaaatcttttaagaatttgaaaataaagacaaaaaatgtggtatataaccaggtgccaaacaaacaaccaattcacaaaataatgaattcactaattcagaatgaaaaagattgatacaactgagaaaagaattatactttatttgataggataaaggtaacaatttgcattttacatcagaatagaagagaaacagagcaatttaaacagcacacaagacaagtgctgaagaaaattactcctattgcttattctcaacactcaagaattaatcacactctttttctttttcatcttctatagctaaaccctaggaatatttcactatatgtatctaacaaatgaatcatttataagcaaattttcttttcaaaataataataaatctatactgtatatggtagaatcacttaaattggaggagcatctagaggagtgaaaaccctgtggtggcaagtagggttacaagggtaaggacaatctatcttctgaaacaatgttctgtcataaacccaatctccaacagcttttgctattgtctgcaaattaagaagaaataatgaatcatgaaaacacaatgtaacattgattctaatgacattttgtttgacaagaatttggagaatgtttgcttttttttgtaccgttcggtttagaattggagaatcttgccagaaccatgaagtttgtgtctcggtttggcagtgagtgtagcaagaatctatgaacatccctcttgatgaagatctccctaaacctatcactgcactcaagaactctaacctgaaatctaaaaggacgcaaacccgaaaattgtttagacccttttcatgcattgatgttaagaaatgatccagcaaaatcatatcataatttttgcttctatactaaccttgcataactttgatctgacttggatggcaattcttgatgtctagttgacaactttgccattttccgtaaggatcagctgctcgcggagccaaaatgttctttatctgataaagaaatgtgaaactaatgatgagtttttgaagttagattatggaaaatacttcattcaagctgaaagatctgttctttggacaaatcttgcagtaacaaagagttaacctacctgccaagagtcataagcggcattaagaatgaacagaggagttctaatctggcgagccacatattgcggaaagaaacactgcagatttttggtgattgattatatgggtaaaaatattgaagagaaacaaaaaatggctttataattataacatgaatgctttctaccattgcaggagttaatcttgatgtgcatgacctcggcaagttctttgctgatccctgcaaacaaaatttcaatgaaaagttcaaataacaggaatgagcaactgaatcaactgtcactagataggaaaaagaaaatagaaagcttacatgaagagtaacaacatcttcgaagtatgttttaatgtattgaactcctgagacgtctcttctgaaaacataccaatgaaatgtcatttctaactaacttttttgagtaagttgatgatgaatagggaaggatcacaaacagagtaatggtcttacgtgttgagaaaaaaaccagcatctgaaagacattttactttggttcccatcggtaatagagcacggaaactatcacaatgcatcagcgaagctaacccgccagcagaacagccagacaaaacagcctgcaatagtgtcataaacgttttagaccactttgaagggtcaaagtttgcaagagttaatggagattggagaaattttgtgaaggaaagaaaagctaacattctcggcgtttatcatgcctttagctagcagctcttgcataacggctaaccaaactcgagcacctctgaagtgaagattagtagcctgatcaaattaccattatgattatcgaataagaaagacaacactaaataaatctcatgtttctcttcttagtactcacagggttcactgcttctacatctcctgtgaatgatgccccgtcacagtatctaactttcactctattccaattgtaaaaatctgccatttccaagaagaaccaaccaaacccataagacaaaaacttaacttcatctttgatcaacaagttagtcaaaagcttccatatataccaggattatattgtttcttattgctaagaatagctgagaaagcaaggttctccaccattttcttcgatgaacctaatcgagtatgcatccgactaacgcaatttgttacattattgcaccatcctcctccctaaatcaaaccatttccaaagacactcaattaacttccacaaaaacttcatttcaaaatcatctcccaactccaaaaatatactaagccaaagcaagaacaaccacagaacacaagagaagaaagcagagcaaaacctcaagctgtatcaaccaactattgattccagttccagaacctctatccaaatgataagctggtggacttccatctaaacaaactgcaaaaccaaaagacatagatgaagaataaaaaaacacaaaaatatactatataggaacaataatgaataaatatataaacagaattaataactcaccggcccctttagcgactgcgtttcgaacaaatgtaatattgacaaacagtccttctgtgttcattattactaacgaacacaccaaataaatcaaccattgcttcaacttgaacattctggtgaaagaaaacaatcaaaataaataaatctaagaactttataaattgaagtacagatagaagaaattagctaacaaaaaatgacactatagtacttaaaagacaaaaaaaaatcttaaattagatccgaactatatgttcacaccattttaatagcattttggtatctaaaaaaacgatactttcagtgtttttagtagatttttgcggtacctgcgactgcgatttcaatttccagctaacaaaaaacaaaaagagaaaactttttcccagaaattttttacagagaggaaaattttaatatttgcattcgatgttgtcagaaagatgtttttctagaaaaagcaatgcaaataaaatccgaaatctttccttctacgtagaaggaattaacgagaaaggatcagttttgcttttgcaaactgggaaaagaataaatctttcttggaaagaaagtttcagacgcaaacgcacttacttgtaaacgcggtttcttacaaaatcccaaacctgagattagtgtaagagaaacttcgaagtttcactttgctaactcggacgatgactcagtttcagcacattgtcagaagacgcgattttcgagcaatggcggaagcagaagaagaatcctggagaaattaagcgtttatataacgcgcgttttttggatccgacgtacaatgttgtttttgttcggaacccaagagccgacactgattcgttcgttttcgtgacaccaaaaaaaaaaaaagagtatataataaaacaaaagaattgtggtgtgtacgagaagatgatatgtttatataccaaaatgttttcagtttttatccgacattattatttgcttataaatatgaccattttcttccctttctatacaataaccccctttatactattggcataataaaaatcatagagaataataatcaaatctatattaataatatgtaaattttcattaaaaattatgatacttttctttaactttaaactcactattgttttagtaaaaacgttaaatgtataattgatatgatttttaagtaaaaataaagatggctataaggtatataagagcatatgaaatacaattggtttacctcttgagcatataatatatagtttttattgaaaattataaatttccaactcatgtcatgtcctttggtaaaaggacatggattaattgattacttggtcagtcaatataacattaatgattgtggggctgactgaaaaaaaattaatgtaaggggtgagatatcaaagattgacataaaatgaggggttcgtgcgtgaagaagacttgagttcagaaatgctaataggggtatagtgagttgacacgtcacaaaaggtgttcggttaaatgggttggataggatccgacccgaatgtcgggggtgggtgacgtgatccggtcggaccggttatgtaatggagtaatggtgttgttggaaatgtttgttatgtaacgaatctctctttatcagcttgtaaattacgcgttcctcagccaacaaacacagctgacgatttgttcggggaatatggactgtttttgtcttttcattttgtaaaaagtgatcttattctctgtgtgcaacctcaccccgtagtttcggtgttaccaactctttctcttttcaataaaattataggaagcctagtccataattagaaagctaacgattataattgtttttaatatcatatatattcgtaagaatagacaaaattaatcggaaaattgttagagactatacgattggtggacaggttttcatatcaaaatacagtaaaacctctataaattaataatgttgagaatgtaaaattttattaatttagagaggtatcaatttatcgataaattaatatttattaatttatagagagaatttcctaatttagtaactttttaaaattttctataagatttctttcattatagaaaaatctttctagaacagttacaagtaaaatataataataatgtatagaaaacaataccaaaagttttgatacagtaaaatatgaaaactatactcaacaaaaaacaaatatgaatttaagcaaaaacttattcttaatatattttaaagaattttttacatataatatatagatatatagttgatacatttatacaattattaatttatgatattgatgggaccatatatttacataagacttttaaaaaattattatcttattaatttatcgatttatgtcactttttatattgatcctggaccagaaatatttattaatttaaaaaaagttattaatttatagaatattaatttatagaggtttactgtattatgttacatcataatatgcatttattaattttattttattttttaaaaagaaagataggggaagaagagaagtaacctaagaaaaggaccaaagtgatgtaacaagtaaacaacaaagtccatccagtctatcggaacctcaaaagggaatatgattatgcatttcgaagcttatcttatcttatgaaaaaaaatttatctacgaaaacaattgttaagtgttcaataattcaaacttatttagactcttattagttattgtcaaatctcttatggagctttctacctacagaactaaataaaataaaactctaccctatctcactcaaaaaataaaaataaaaacatcaactattttttgtgtgatattcaatcattattccaaattacattcatgaatatcttatatcaatatttataactggcatagtaaaccaaacaaaaaatatatttaaaactggaatttggtataaaagctggcggagaagtagtatagttgaaaatttgaaattatgttttctgacatataacatgtttgaaatgaccaaccacgaaatagaatctcactcataagtttagttattttgttcaaaaatttaaagcccgttcgttagcttcaaaattaaatttcaaatatttttctactaacaatttcaaattttatatatcaaatgaacaaggtcgatctgatgaaaactgttgcgtaaaacattctcaaaactaaactaatatgttttttttataaatctaatcggaccatatagtagatcaaattaggcggatattagagaaggtatcaatcactaaacatgccatatgattatggttcatgtatcattatcaaatgattaaatggatggaagcaacgtgccacattcaaatcttgtttttatttttataacgaatttatggtgttttaaaaagtaaagtttttgtgacaactgtaaaacaaagaagcagactcaaagagcagttttcaattccggtgaccaaaaacattaattaccgttttatttttctaatcggcgggaggagcaaagcatatgattggagaacgagtgtgttgttgacgcgtggcggcagatggattgatgaaacacgtgattgacggtgggattcttcttgcacaacagctgttgaaccttggtgaaaagtcactttataaattctttaaactcttgcccaacaaaacaaattctataaaaatatttgtccgtgattcattatagttgttttgttattcgctggttaataatttattcatggaaattttagtttcgtaggattagctcaccttcacataagccaaaattatctgacactacgatgatccaaacatttttgagctactgtaaaaacacaaaatcaaaataagcaactaatcaaaaaggtatattgttgaatctataaaccatatgttacattctcggtgaaaaatatagtcacagaatttcaggaaaaaataaagaaagtagaagaagaggatagtaccgagaaactgtttataacttttgctagttcatacagtaccaattatcaacaaagaaaaaaaaacttataataggtcgtgattttcaaattttgataaatttttgtatagcatttattgtccgcttataattttataccaatagatgaagagaagaatttaaatacgtcacattgaagttaaacaaacaatgggatgtaaaagtttgtccaaccattttaattggtcttcatgtagttggtcactagggctgctttcaagataagactacaacaatccacgaaaccactgggctccaaaattgaattagtttatcatcacccgtcgtctaatcacatcaatatagcaagttgtaatgaaaagataattgtgaattaacatatttgtggatatatactaacagatttatggatatatatcggcttctcgtatgaagattggagtagctaattattttttgcttaccaaatgattgatacttgaaagtgattgcgcaacaccgagaatttgttctgttttgaattgatattttataagtttttttgtggatgagttatataatcgactactttatcttccattgagaagtttgagaaaataaattgagtgtgacattaaaaaaaagtggggatgatttggctgcgatatgttgccgtgaaagatcatgttctgtagatcattatgaacaaattagattcgtttgagcgtaatggagatactataacaataaaatatgttatcacttatcatatatagttattagtatatttggttccacttaatactatattgttccatatccaatatagtatagtcaatcttaatgatgtttctaatgactatggttaaacatccactgtagagcataataattgacttaaaactttcaaatatcgatgtttattctatcatctttacaagttggtcatgtgttacaaatttgcaacaacttgcagttggtttaaagtatcacaaggtacaaactttaccagcaatttctatttatgatttattcaataaaccattacactagaatagaatagtcgggagtttagttggaagaaatacgaatagcataagataaatatgttcaaaagtcgttttaatagtatcagtatgaacaagaacatgttcgcatttaagaaaacattagctggccaactatctaccaatatttaatccttacaatattattttcattttcaactgaacaattacataagtttcgttttaatgattgggttaatatactaaaatcaaaattttcaaggagtttagtccatgctcaacaacgattggtcatttggtccttatttatctttcttttttttgttttctggttcacctgacgttatttatcaacctctcatgaaataatgattatccaataacatatttaatccagtcagaaattaatatggtccataccatttgctaattaattttacagtatctactctcgagtgcataatagacatcgatctgaatttacacaatatatatactatatgctaaccaacgtcgtagtgatagttctaccatacatagtttgattcatgggaagatttaaggaaaactaattatgtattagtccaatgaagacatcaatggtgtaactgatacttttttaagttgtggaagttaaaatataaaatcacaacataaaaggtttatgacaaaaaaagaaaaatctctcttaagtttaaagatgtttgcaacttgtaacattgcatcagtgaatatacagaaacattccatgtgggttgttccaagaaacaccatcaactcacattattatgtaaagccagttaagctaatcacatgattattacataattaagaaaaaaataataatatgaatgtatactttatgatctaattccaacgtttacacgagtatgattatttccccctacttggccatctattcaactagatcggttttttcataatggaagattttggtgttaccaaattaaagattccagacaactaaaaagttaaagatggttgctagattttaattcgagtgtatacaaaaattaagattgaaaaacttttttgtcggccacattttaaatgtacttgactacttgtctacaaaaactaagttgtttcacggtttttttgttttttttcgccgtcacggttataaacttcttgtctgttggttctaaaacttctaaaacacattatataattgtttgaatagtaatacataattgttacaaaaaaaagttaacctaaatggaaagatagaatattcccccaattaaattcgtaaaatataatgtagaatatatgtttgtccaaaataataataatgtagaatagctgaaaatcaattattatataaatgatttagctcattgctaaccaatagaacacacaaaaatcattttgcgattctgtgctcaattataccaaatacagagtacaattctaatcgtagatcacgtttgacttaaggagaagttaaaatattaaataaattttgctggcacctatcggtattaattttactaatcatgattatgattacggaaagatataggtcatccgtgttgagatctagacattattagactataatatgtaaaggcataaagcactatccaacatacttattagatatgacaacaaaatagctctagtaactatagtcttatatacatgaataatatgaagtgcatatttttttagttgtcaaagactcaaaatagtaagttcagtttgttcaatcggttgctgtaaaacaaacaaaaatgtccaaacagttttaaattttaaacgatggaaaaaattcgagtcattaacataagctggaaaatttgaatatgggctgatgagccaagtttgatagttgggtcgaaataaaagaccaattgggctttaggaatttaatcatttttttcacaaacaattttcttattcttccccatttttaagtctacagaatgctgctagtgcttatacatgaaaacttcaaacaaaccaaccattttcacgtcaattaaaaaactagtacttcttcaatacactataatccactctcctaattaaaattggaaatatatgaaattccactataaaattgtgaaatcatacacaattacccgtttgtacttaacaagagaattcaatcatcgtcctcatcaacaaaaacaacaacatgagtacatgactaagactaatcatcatctatatcgccgtcaatataagttactagctagcaaacctctagtgattatacgatcattaattacggtcgtcattatcagtttattgtcaagcaatatcggttattccacacgacaacatctccatagatctatatagttctagaagtaacggaagaaaagaatatgtaattcgtagtgaatgggacaggtaagagtcaacataagttaccatatataacggtgcagaaacatttatggtgtagaggaccatatataacgatgtatttaaatattgagtggtccttctcatgaaatttaatagtttagttacaatgttatgcatgtgtttctgctgcatgcatggacagttatcttactattcatacgtacaacattaaattagtacacactcagtatactacagtactagctactctctctagtactaagaaagtccatcatcttcaaaagggtaccatgaataatgaatttattggagttacatggtaacagaagtggattcacctcaaacatgttaagaaatctgcatcacatatttattagttcgatcggccacatacggcatacatatcggtcaatcttccagtttcaaagagatttacacttgatcttgtgatacaatatgtcaatatgggtgattggtttgtacattctaaaagttgaagagtttttttcaatttttgttttttatttttcgggaaattgtttcaagtctttaattaaagttattttttaattgatcaaatttttacacttttaatttactgttttacagttctaaatgtgctcttaattttttttcagagtctgacttctcttttttgttcgtgtcgtcgtttattttttataagtcaacaaaatagaatttaaaattaaaaaaaaaactagaggcccttaatttaaaattaaattttctaaatcaatattttcaagtaaaaagttaaagtacttaccaatgacctcctgaattcatcgcaggttccctaatcaaactttctagctagtgcagtggtaagctgaggttccatatatagtattgttgtcttccttcagaagaaccaaaatggcaattgtgccatattggagttgaaggacccaagtacccaaccaatcccaatcctatccgctagttagttagtggagtatactcgggaactaactacaaacctataaggctctttatactatttctgaattccatgtatttatcaatggattaataactacaagaaaatgattatggtcaatatatattattcacgaaatgtatttcaatgtaatgtctttgacaaaatattgtaaacttgatgacaagatatatataaatttccacatcgtaattgttttctctttaaagattgaaaaaataactttcccttaagaaatgatctaaattctatacatgctcaaagtttttaccattaaataagataagaaatataaaattgacagaaacatgataatttttttgatcccaaaatcttcagatttgttgtttagcacatacgtaactaattaagtctattcaatatttgtgagattttaagtgcattactgatgatattaggtgcgtagaaaacacaacactaaaaaaaaacacgacactacacggaattagttttcatataacattaattacataacttgacgtcttgtttacacatatatgacatatatagagagcacatcacattacaacacaacaaaactaatgaaacattttactaattataaatacaatttttaattacgtcgatttggaggtattaattaattaccggaatagaaaaatatggctctaccacagccatagtgttactctcagcataagtatcacaacaaaactcattgtaaaacgctcttgccttccttaatatatggcttatggaacatttcatgtaccacaacaagcttaatcgagcaacatcacgcctcaaatctccgtatttggtcgcggttatggacttaccatctttgtttgagaccttcccgtgttcttgttgattcgtctcctcttcttttacggacggatcttcaataaacagtagtggattagtaagagggtgtgaatttattttattatggtagatttctgttagcgttttgccagaaaagacgttgttcaacatgttttcgctgatggttttgaatggtttgggtttgttactattgcgtcgacgagattttgtggtggaaagtagggttttagggcggtggatttgagtgagggtgatgaatttagtagccatgagactatgagagaattgatatatggtatgaactatgaagtgattggtttgtggattgctctttcactccttacttaacatatttatattcacacatctatacatacacaaatatgtgtagtatgatggtatgtataataaggtgctaattagaggtttgcataagatttgctaaaacgaaattaaatatcttgattttttttttttgatgggtacatcttaaagggtggaaacttaagcgattaatttttgctttcgcaatctttcgcctaacaattaaaaggcgaaaactaaaaagaatacctaatcaaagatcgttttcttctgatcgtgtgatatttaagatatttttaaaaatacttctaaacagtcttctgtatatggtataatttatgaagaattttcataatcctctagtttgaaatacaaacattaactatatagtctgtagcttctttgattagattcaggttttttgtttttggttttagaaataattcgaataaaaataataattaatgaacgtatcatttagtttcattttttcgtctatttcatttaataaattatcatttttcgtaatttttattggctcgtatgtttatactgttattttttggttttgattttaaccgaagtaagactttttttaatatttataagttcgaaaaaaggatgcaatttgcaagtccgtactgtacggaatatagctcatacgtaaatgattctctagaacatactatgatcgtgtggtcagtgttgctcgatcttaattggttaaaagaaatgggggccatgaaagctggatgaaaatgaattgtactcccactaaacaagtgactttacctcttccattcacacaattttttttatagtttaaatattgaatttacatagttttcatgatccacatattatgaaaaaggataaaaatgagaaagaaaaataaggaagaaaccaagaatctatggaattgaaatatggaatatagctatggggaatcaaatggtccatacccacgtgcatgggaactgtttggtatctatatgtttcctttgttgttcttttcactaaaaggtggtcatcttttatgtatctttgatatttcagagatcaccggcttttcgggtaaatcactctctcaagtctcaactttagcttaccagatctctgtctaattgcgaaaccctgatattaatagttcttctttaaccctttttactcgaaaaaaaaacaaaatcttcctaaacccataagctaggtcccatgtgaatgatcagaaaggatcccaagtattggactaaagaacccactcaacatatgtggtcttcagcatcaaaacattcagcctaaaatacttcaatttctgaatgcatgatattcaaatatagtacaattttcttgggtattgacaagcaatttatgaccgtatgtattgtgttttgattaatcgtcatcttctagactgaatatgagtagtcaagtcatatccaaatcagattgaatatcttaaatttctcaaaggatgctcacagaattccctaaaaaaatgcacaatccatctatatcgatgaaactgtaatgagatctaatatttatcaggtttcatattggcttttttacaatcttctcataacaatctctgtttagggtatcttgactagtagtataagttaaaaaataaaaccaaaaatcatgaagagtatttcaaattttattcttgttttccttctttctttctacgtacatctaaaacactttttccacctctttaagagaattaacaaatttaaagaatcgtaaacaagatgaataaacagtattcaccccactgaaagtctatactctaaggtgaatgttgtcgaattagttgataccgttgtaaactgttacctttcaaatcagtccattaatctccttgggcaaaaaattctgcacggctgaggaaattctccccagcgatgtgtcaggcatgaattagttctaaactactccgatgagaattcgcttaagctctctgaagcacaaaagagagaggaagagtaagaaagatcaataccttgagccaaacggatagtaaaagaagaagaattatagagtggagtttgaaggagtctttacatttatgtgacctgtaaaccgaggagcctcctattgatccattctcatagctcccatgaatatccatgtgtaaacttttaattgactatccatgatgtgtgtctaaatctgctaaaaagggtgtaacataagagtaagtgttttgacttcagcaaacagtatttaagagatcttcaaaacaaacaaacagtatcaagagattctttaatataaacaaaccgatcaaagaatcctggtggtctcagcatataactgtaagcggcaatatacgtaaggcacaaagctttatatacattattgtacctgtataatcttttcaggactgctgtctgaagtacctgctctgatccagaatctatcatatgcctttgattctgtggcactcaatcctaaacctgacgagtaccagtaatgtggatttgtaaatcataaacccatatagcctttgatgctaaaagaaacaacttttctcattaagattgaagcaggccaaagctgttaactgaatgggctggagaatcaagtagaacacactaccctacttgtaagatgcaatgaaccatatgcatcatttaccaagtaactccatcctaacgtgctcctctaagaagaagacgtagatccccggcgtgaatcaaaactgagatggctactagatttcaatttccaactgcaggaataggatgcccaactatacaaatcagaacattatacattaataaactgaagctatcagagcaactaataggaaaaataagaaccagaatagaaacctgttcttcttcttattcatcagttactgaatgagtttgttccatccttcaatgattgctgcataattttcttcatcagaacctttaaaagcttccaacacacctccctgcttaagatatccgtatataaattctttgtatgtgatactatccggaacaattcctttttccctcatctcatttagaagcctagaagcttccgttacattcccatctctagcatacccaccaatcatcacagtgtaggtaatcttatttgggtgtacgttctttgaatgcatctcacgcagaagacattcaactttgaccatctgacccaatttaccatatccatcaataagtgctgtataatgaaagacattcggttccaaaccctccatcctcatctcctcgaagaggagttttgcctcctcaacacggctaatgattgacatcccctttattagtgaagtgtatgtagcagaattaggtgaaattcctttgtgtttcatatcttcacggagttccaaggccatcgatagccttccgcttctacagtatgctctgataagatgattgtaaacaacagtatttggctgcacgtttttgctcatcatctcatcaaaaaattcctgaccctcttctgttctttcagctttacaacatccatctatcatcaccgaatatgtataaacatctggaagcatgccattccgtttacaatcatcccaaaactgtatggcctcctcaactttattcatattaaacagcccgcaaatcaatatgctataagtataattgtcaggcttaagtcctctcttaaccatttcatccaagaacataaaagcttcatctagtttcttctttccgcaacatccagaaatcaacgtgttataggaaactctatccataacacagccacgccctaatatctccttttgaatcctaaaagcttcatccagcttccctgcttcacagagtccatgaagtaaagcatttgaagtcctcgtgtccactacaaaacctttatttagaaattgaaaccaaagttctagtgcctttgagtgtttcccatgcttacagagaccagaaatcaatgtagtaagtaatccaccaccaggactcatgttgcgtaatagcatctctccaacaaaacgaagtgctgagtcaaacataagatgactgcacaacaagcaaatcacagatgtaaaggagccctgatttacattaaaaccaatcgacagcatttccttcaggagacgctccgcattatctgcttgaccgttcttgcagtatccctttatgagagtattatacgtcgacgatgtgagagacaaccctttcgaaaccatgagatcctttatctcaatagctttgttcaaacttccagcctcgatgaaactatcaatcaaattattatatacaataacattaggaggaaaccctttctttgtcatttccttcaagacaaaataagcatcaccaatcctcttagccctggtcaaacccttgacaagaatactataagtgataagagttggttccatgcctctttctaccatcttttctttaaacataaacgcctcatcataccttccacacatcccaagtccatcaataacagtattaaaagtgacaacgtttggtgcaacacccgcttcttccatttttgagaacaacttaacggcctcctcaactttacctcccttgcaaaacgcattaatcgctgtagtgaacaagtaaacatccggagaaacccctttgcaaacaacatcaaaagcttcacaacacttctgaaactcattagctctcactagagaagtcaacaaaatgttgcaagtcgtcttagaaggaaacatacccttgtttgcaagaacaggaaatacatcaagagctaaataacaaccatcacgcttgaactgtgtgcaataaacttcaatcaacaaatccgacattttccttctgatttcttcatcaaaacacaaactcaaactcgccattgcatccgcaatcgcaactcgactatctctcaaaccacaaggcaaaaccggtacattcccattgatcaaacgaatcaaaactaccctagcagccgataacagattcgcatcaagcaataaacctatcaataaacaataagaacggagactaaaggagaaactaaacgaatcagaagctaatcggaagaaatccaaagccgtcttgggattaactttggatcgaaactcaggaaacaacctatcgaattcgagaggcgatagaacagttatcagttgtttacactgctcgtaatctagagatctcttcgacaaaactgaagataatcgttcgtgtaaatgccgatcagaggaagtctcttccgatttatccggccgatgaacacactgttgcaggtatcggcttgtatgaaagcattttcgagatttcgctatgaatttcaagcggcgagtgaataagtagcttgcgcgagaaagtctcctcaaatccattggtgagaaagagatgaaatgtgaggaagtcatttgcgaagagattttagggaaatagagaagagccgccattgatcaatgtcgaagaagaagaattgaagatggtgttgagccaccccattggagagagagagagagacggagaaattctcgagaggaggcgatttgggcaaaaacccagggttcagacttgggggacacgaacggggtcgataaaattgggccttttatgggcccgtaatgtttaatcattgggctgaaagctgcaacatagtagcccaatttcaactcgtaaagttttccgcgttttttcccctatcacggacaaaacaggcagccctattgacaacttgtttaaaaagaagaaggaaaaaaaaatccatatagagacgtaatccgatggtcgatggagacgttgtaagaaacaaaagaattgtagaataaggttagctagaaattgtcaacaatgggttcatagaaaaactcgtttgaatcaaaattgtgtctaaacaaaacctttgatttggtgcgtatatgacccacgcattgtaactttaatttaagtcatgataatatttaatatataatgtcatgtcatcactgtttagaataaaacgtttagcttacgattcacgtggaaacaaaattattcagagatttcatttcatctatttatagtaacattcgtcaatattaagtatcatacaattaataacgggtataaatggcaaaatcctagactaaaaaggtgaaactaaaaagaaaaaagtagagagagtatacgtgtcgtgaatgacggagtaataaattatgcaatagagtagataaaaatacaatgttttcgtcatactcttactctcttaatttaataagatatatcctttatgtaattgttctagtaattgatcgatattaacgcgataactccttacgaatctcactcacgattgcatttgcatacattatagatgtaggagatactcggtgaaaatcttagtagactagaaagcaattgatcaacatttagtaacaagctatcaccacaagttcactaaatatagtatatatttttaaaacaaataccaacacttgcattaaaagcacataaatggaaacatttaagaggacacatacaagtcccattgattatttttattttttgaccaaatactaacacacctttaaaaataagaaaatgctaacacttgcagtaaaagtgatactactaaatatagatattttaagagaacatgatacaattaattcttaaatactgtattgttttaaattttatacttttatagtttctaattattaaaatacatcataatacacaattttcataccatatgtcaattaagagtatcaataataatagtccacttatgtgtagatatgtcagacctatttttatgaagtatcataaataatgtatgcacacatcacaatcgtaaacaaattactactctttctatttcataaagtttgatgttttaagttttgcacataaattaaaaaaaaagtaacttttatatattttaattattattctgttagtttaataatattattattacctctgtcctttcactattgactacaaacaaaacttacaatcatatttttacaaaacatcaattttgatgaaacaagtaaaaatttcaaaacatcaaataactcagaacagaatgagtaaatttttagctcactgttttaaccatagtgcctactatctttaaccatctccaaaagacaccatttgtctttttaactatactaaaacaatcaaaacttttaaaaccaatcatatctcattttaagaaaataggttaaattatctaatataataaataaaaatctaaaaaggttgccacgtaaatagaagaattgattcttatttatttttttcaaaagtggaagaatcattttcttctattttaaatgtaaacagaccaaaagagaaaaagctcactcacacaaagcacctccaattctctctaccatacaaaaaaccaaacccacaaagtctctctctcttgctctctcggtgattcgattttcagaaccgaaactccggcgaaaagattatggcgggacagtcacgaaaatggatgatactggtggcgacgatatggattcaagctttcaccgggacgaatttcgatttctcagcttactcgtcagatttgaaatcggttctagggatttcacaggtgcagctaaactacctcgccgtggcttcggatctcggaaaagtattcggatggtcgtcgggactagcgcttatgtatttcccgctttggacggtgcttttcgcggcggcgtttatgggattcgtcggttatggagttcagtggcttgtcatcactcatttcatctctttgccttatatcatggtaacgtaaccaacttttctactttttctataaacaatatatatatatatatatatatttgttgagaatcactaatttggaataaaattgaataaaaattcagagaatggaataatctacaagttatcttcatttttgagatattgaaatataattcaagaaatccttcaaaaattaaaattgtcttcaaaatcaaaattagtttatttaagattgagtcttttttataataaggatttgatgcaattttatttctgtttgttaacagcttagatatgttgaaattgtgaccaatgagacgaaaaataatgttttgtatcttcagattgggtgatgtttgattggtagatagattgctagttcaatttttatttttgtcgatttctactttcttagttcttggtataggactatatgcaatatttcttagtttttctcttccatttatttggttggtggcaagtggcaacaacttacgagtcttccttttggcttgttctcacgtttttttaatctgcttcaattttcgaacatctgcaattaatttttataacatctattatgacgtcaaaagaattcgttttttcaataatattggtcccgttgcatataattcttattattcatatcaataagctaaattatgacaaccaggattttctgaaaggtctttttctgatgggtaagtgataatttagtggaagttatacatatgagcttttatttatagtttaatgttttttttttcgattatatgaatagttaattaataataagcttttggagtgaatattttgatcaaaatacaaaaacaattctgcattctttaagaattcgcaatttctgaagaaattttttatttaagttttggctagcttcttctgtgcaggtgtttctctgttgcttacttgctggtttaagtatctgttggttcaacactgtctgctttgtgctctgcattagtaacttccctgcaaacagatcacttgctctttccctcacagtgagtttcaatggtgtaagcgctgctttatatactcttgcttacaacgcaatcaatccaacttctccagagctatatcttcttttgaacgctcttataccgctcattgtctctttcactgctatcatcccgattcttcgtcaaccgccttttgagcctcttccaccagatggagttcgtcgtgactctctcatgtttctattgctcaacatactcgctgctttaaacggtgtttatctccttctctttggatcaaactcctctgatttaacctctgctcgtctactctttggtggagcaatcctcctcttggtattccctttatgtattcccggtttagtcatcgcccggaattggtataaccgcacaatccacactagtttccgtctagaaggttctggtttcattcttgttgatcctgatgagcttgagttgcataaagggatgcttgcacatgaagcaaaccgtgaaggttaccaattgctgagtgacgatgtggtgcaaaacccggttaagtccgtagctgttgaggaagaggatagtgatgagtcatgttgcaagaaacttatcacaagagatcagcttgaaggtttggggattgaacattctttgtcgctgctcttaaccagatcagatttttggttatactatatcacgtacttctgcggtggaaccattggacttgtgtacagcaacaaccttggacagattgctcaatctttaggacaaagctcaaataccacaactcttgtcacactttattctgctttctcattctttggaagattgctttctgcaacaccagattatatccgagcgtaagtgcatctatctttgattagtcttatactctggctgattgcgggattttgaatgattccatttctgcaggaaggtttattttgccagaaccgggtggttagcaatcgcgctattaccaacccccttcgcacttttcttgcttgcatcatcaggaactgcatcagcattacaagctggaacagcgctgatgggtttaagctccgggtttatctttgcagcagcggtttccatcacatcagagctttttggaccaaacagtgttggagttaaccacaatatcttaatcacaaacataccgataggatcattgatctatggattcttggctgcattggtctatgactcacatggtttcaccgggaccaaatcaatgacctcggagtcggtggtgtgtatgggacgagattgttattacttgacctttgtgtggtggggttgcttgtctcttcttgggctaggttcgagtcttgtgttgtttattagaactagacgagcttatcaacggtttgaacaagctcgtataagttcgaacatcaacgactcttagaaatttgcatcaaccccaacggtttgtgtgtatatgtaggatctaaattataacagacggattaatggtattttagtggattttggctgaggttgattttttggtttggattttggttattcaactaaaacacaagactctgacacaatcatattttgaaaaagcacttcttcttcttcttcttcttcttcttcttcttcttcttcccatcaaaaagtgctagtggcaagaccgcgcatattccagtaacaaagtttaaattcaaaactatggaacacaatttgtcccatgttttgttgcctgaattaaacgaccatatcacttggttcggccacttcatctcggatacgcacaagcggttgtcaaggttgtaaaagacgattttgtaaggatctacattggcaaagggagctttacagacgacttgaaaagtttcggtgtgaagattgaaaggtaaaactttggtttctttgcactcggtgaaccaataaagcgacccatctagatacacaggtgcggggtaagcagcaatccgataaggagcagcgagagtgacatacctccaagcattggtactaaagtcgaaaacttcgcatgtagtagcgttttttaggcctatttctgcagagttgtataaccaaacgggcttgtatgtgcccctgaatttgtctttaccgaatccaagcataaagaatttgcgtttaagcttgtagtaaccatctcgtaagtcgatcatgagtttttgataatcgcaaagaggaagaggccgataccatctagtggtcgggttgaccacataaccggatttgtcgtgattgtaaagacaaacgagaccgtcacaactactatgtgaaactaagtacagtacgttatccttctcccaaggagtagggatcttgaacgttgatgatgaacccaactgcaatgttcttaaagattctatggtcgggtttataacatggtgaggaaatacagacaccatcagaacatctggatctcctgattgctgacgatgtttcaactaaaattgtatacatttttattttattaaaaagataaatatcattttgttggaattggaaaacaaaatctaaaagataactttagatatgtaagggtcgcatatgtatttgattacattgctatgagtatatgactcacttttccaataatgaaaaaaataaagatgttgagtcttactaattaagggtaaatacaaaatttctgatcattaatacaaagaaaaagcctctcataagccaaagccattttactcgccgtaaacatctccgcagcatactctttacacttccttcctctctccgccaatctctccgctccttcagccacagcaacctccataaccgccgtcaaagcttccacatttggcgcaaacataaacccaaactcatcattcaccactatagtcctctttatgcttgcgtacctagatgccatcactggtttaccactcaacatcgcttccattaacgttaaatcaagaccttgtggtctaagcgttggattcacgaacaaatcgatcccgttgtagaaacccttgagctcatttgggtttagagatcccaaaatggaaactttttcccctaattccttgtaacgttgctcccatggccctgatccagctactacgaggtaaacatttgaatacgtttggattattttcgcgaaagcttcgaagagcaatggatgtcctttgtctttgactaatctcccagcagctcctaaaacaatcgctgatgagttttctggtaaccctaattttgacctaaacagagtacgtagcttcttgtctgatgtgaatccgttctcgtcgactccattgaggatcacatgaacccttttctcagggatttggtaaacgtctcttagcatttctccgcagctatcgctgatagcgatgtggtgagcgtagttgtggaagaatctgatttcgtccagtatcttgggaagcacggcaccgtatagacttgcattgaagccttgtgatcttggttcgtctggtttacggatcaggtcttggtaaatacttgattgtaagctctctaacgcaatgccgtgccaggatacagcgaggtttggaacctcccgggcgatccagtgaggtaaagcaacactttcagagtgaaccgcatcgaaaggttctttcttgttttcttcttggtaaagctcccatgccttgttgtaccgccattttccgggctccgcgtcgccgtgagaatggattatagggtaaatgatttggtcggaaacaggggggattttgttggtttcaggggattggtctaagggagaggtgaaaacgtggacacggtgtccacggcgagctaaggcggtgtatagagtgaaggcgtggcgttccatgccgccaggattgggacccgtgggccatttccgggagaaaacagcgagttttagtgttttgggaggagggttggttaaggagaaatcaaggcggttccaggcaaattgggcggtttggaggtcgccagaccacggtggctggtttgtgtcagaggaggaggaggagactgcagcggtggaggaggagcaagtggaggtgcggaggagaaagagagccggtatggtaaagaggacggtgaagaagaggaaagtacaaaggctaaaatgagaattaggtttcttgagtttggtttgtgaagccattgttgttttttctttcttcttcacaatctgttgttgtgttggttccgtttgttcaattaaaggattcataaaaaagtagagtatcgtttttcatcttttgggattttaattataagcttacaatataagtaaaaatgataaagtggagacgatctaataaagttgttttcagtattttataaatttttattcagtgggtttggtaacgtcaaaaaatgaccaagaaagaaacgtgaggcttcaattaatcttgtggggttattttggttgcatatatgggaaattattcatgtgacttgttgcgtgacttttcaacacagtatgtgaagttgtgaacactcgtaattctcatgatattttttaaaaaatagtaaatttaggtcaatggtctaaaacattggtaatgtttgaagcaaaatagtatgttgtttagtgtgtttggcgtccgcttttgacttttgattctgtgatgatattcattctttttttgagtgcggattttttggtattttacaacttaagcatttgactttcttaactttttaggctacacttcattcttaatattagaagacgtaaaccaaatcactcaaaggcatgggataggatactttgttgtataatattgaagctt

SEQ ID NO: 598 - DNA, 86554 bp, Arabidopsis thaliana
gaattcgcaatttctgaagaaattttttatttaagttttggctagcttcttctgtgcaggtgtttctctgttgcttacttgctggtttaagtatctgttggttcaacactgtctgctttgtgctctgcattagtaacttccctgcaaacagatcacttgctctttccctcacagtgagtttcaatggtgtaagcgctgctttatatactcttgcttacaacgcaatcaatccaacttctccagagctatatcttcttttgaacgctcttataccgctcattgtctctttcactgctatcatcccgattcttcgtcaaccgccttttgagcctcttccaccagatggagttcgtcgtgactctctcatgtttctattgctcaacatactcgctgctttaaacggtgtttatctccttctctttggatcaaactcctctgatttaacctctgctcgtctactctttggtggagcaatcctcctcttggtattccctttatgtattcccggtttagtcatcgcccggaattggtataaccgcacaatccacactagtttccgtctagaaggttctggtttcattcttgttgatcctgatgagcttgagttgcataaagggatgcttgcacatgaagcaaaccgtgaaggttaccaattgctgagtgacgatgtggtgcaaaacccggttaagtccgtagctgttgaggaagaggatagtgatgagtcatgttgcaagaaacttatcacaagagatcagcttgaaggtttggggattgaacattctttgtcgctgctcttaaccagatcagatttttggttatactatatcacgtacttctgcggtggaaccattggacttgtgtacagcaacaaccttggacagattgctcaatctttaggacaaagctcaaataccacaactcttgtcacactttattctgctttctcattctttggaagattgctttctgcaacaccagattatatccgagcgtaagtgcatctatctttgattagtcttatactctggctgattgcgggattttgaatgattccatttctgcaggaaggtttattttgccagaaccgggtggttagcaatcgcgctattaccaacccccttcgcacttttcttgcttgcatcatcaggaactgcatcagcattacaagctggaacagcgctgatgggtttaagctccgggtttatctttgcagcagcggtttccatcacatcagagctttttggaccaaacagtgttggagttaaccacaatatcttaatcacaaacataccgataggatcattgatctatggattcttggctgcattggtctatgactcacatggtttcaccgggaccaaatcaatgacctcggagtcggtggtgtgtatgggacgagattgttattacttgacctttgtgtggtggggttgcttgtctcttcttgggctaggttcgagtcttgtgttgtttattagaactagacgagcttatcaacggtttgaacaagctcgtataagttcgaacatcaacgactcttagaaatttgcatcaaccccaacggtttgtgtgtatatgtaggatctaaattataacagacggattaatggtattttagtggattttggctgaggttgattttttggtttggattttggttattcaactaaaacacaagactctgacacaatcatattttgaaaaagcacttcttcttcttcttcttcttcttcttcttcttcttcttcccatcaaaaagtgctagtggcaagaccgcgcatattccagtaacaaagtttaaattcaaaactatggaacacaatttgtcccatgttttgttgcctgaattaaacgaccatatcacttggttcggccacttcatctcggatacgcacaagcggttgtcaaggttgtaaaagacgattttgtaaggatctacattggcaaagggagctttacagacgacttgaaaagtttcggtgtgaagattgaaaggtaaaactttggtttctttgcactcggtgaaccaataaagcgacccatctagatacacaggtgcggggtaagcagcaatccgataaggagcagcgagagtgacatacctccaagcattggtactaaagtcgaaaacttcgcatgtagtagcgttttttaggcctatttctgcagagttgtataaccaaacgggcttgtatgtgcccctgaatttgtctttaccgaatccaagcataaagaatttgcgtttaagcttgtagtaaccatctcgtaagtcgatcatgagtttttgataatcgcaaagaggaagaggccgataccatctagtggtcgggttgaccacataaccggatttgtcgtgattgtaaagacaaacgagaccgtcacaactactatgtgaaactaagtacagtacgttatccttctcccaaggagtagggatcttgaacgttgatgatgaacccaactgcaatgttcttaaagattctatggtcgggtttataacatggtgaggaaatacagacaccatcagaacatctggatctcctgattgctgacgatgtttcaactaaaattgtatacatttttattttattaaaaagataaatatcattttgttggaattggaaaacaaaatctaaaagataactttagatatgtaagggtcgcatatgtatttgattacattgctatgagtatatgactcacttttccaataatgaaaaaaataaagatgttgagtcttactaattaagggtaaatacaaaatttctgatcattaatacaaagaaaaagcctctcataagccaaagccattttactcgccgtaaacatctccgcagcatactctttacacttccttcctctctccgccaatctctccgctccttcagccacagcaacctccataaccgccgtcaaagcttccacatttggcgcaaacataaacccaaactcatcattcaccactatagtcctctttatgcttgcgtacctagatgccatcactggtttaccactcaacatcgcttccattaacgttaaatcaagaccttgtggtctaagcgttggattcacgaacaaatcgatcccgttgtagaaacccttgagctcatttgggtttagagatcccaaaatggaaactttttcccctaattccttgtaacgttgctcccatggccctgatccagctactacgaggtaaacatttgaatacgtttggattattttcgcgaaagcttcgaagagcaatggatgtcctttgtctttgactaatctcccagcagctcctaaaacaatcgctgatgagttttctggtaaccctaattttgacctaaacagagtacgtagcttcttgtctgatgtgaatccgttctcgtcgactccattgaggatcacatgaacccttttctcagggatttggtaaacgtctcttagcatttctccgcagctatcgctgatagcgatgtggtgagcgtagttgtggaagaatctgatttcgtccagtatcttgggaagcacggcaccgtatagacttgcattgaagccttgtgatcttggttcgtctggtttacggatcaggtcttggtaaatacttgattgtaagctctctaacgcaatgccgtgccaggatacagcgaggtttggaacctcccgggcgatccagtgaggtaaagcaacactttcagagtgaaccgcatcgaaaggttctttcttgttttcttcttggtaaagctcccatgccttgttgtaccgccattttccgggctccgcgtcgccgtgagaatggattatagggtaaatgatttggtcggaaacaggggggattttgttggtttcaggggattggtctaagggagaggtgaaaacgtggacacggtgtccacggcgagctaaggcggtgtatagagtgaaggcgtggcgttccatgccgccaggattgggacccgtgggccatttccgggagaaaacagcgagttttagtgttttgggaggagggttggttaaggagaaatcaaggcggttccaggcaaattgggcggtttggaggtcgccagaccacggtggctggtttgtgtcagaggaggaggaggagactgcagcggtggaggaggagcaagtggaggtgcggaggagaaagagagccggtatggtaaagaggacggtgaagaagaggaaagtacaaaggctaaaatgagaattaggtttcttgagtttggtttgtgaagccattgttgttttttctttcttcttcacaatctgttgttgtgttggttccgtttgttcaattaaaggattcataaaaaagtagagtatcgtttttcatcttttgggattttaattataagcttacaatataagtaaaaatgataaagtggagacgatctaataaagttgttttcagtattttataaatttttattcagtgggtttggtaacgtcaaaaaatgaccaagaaagaaacgtgaggcttcaattaatcttgtggggttattttggttgcatatatgggaaattattcatgtgacttgttgcgtgacttttcaacacagtatgtgaagttgtgaacactcgtaattctcatgatattttttaaaaaatagtaaatttaggtcaatggtctaaaacattggtaatgtttgaagcaaaatagtatgttgtttagtgtgtttggcgtccgcttttgacttttgattctgtgatgatattcattctttttttgagtgcggattttttggtattttacaacttaagcatttgactttcttaactttttaggctacacttcattcttaatattagaagacgtaaaccaaatcactcaaaggcatgggataggatactttgttgtataatattgaagcttgtggataaagttaacatatgcgaggtggctaatgaatttgtaatgtgcatttgtattggaactttacttaagtctcaaagaatcttatcaattattgtgcatacagatatcgcaataagtttgcattggaaccttacttcaagtctcaatgaatcttattacaagtcaaacttaagcttacatttaagaatacgaaaaaatagatctgattctgagttttttgtgctgaggaaactgtttcgatctttgtagacatctgtttgtgtttaggaaagagaacttacacaacaaacatccaattacttcttcttgaaaattgtttcagagtagccaattcacttgaaactgattctgcaattcacttaagagatggaaccaagaataagatagattaaaaacatgattcgacctctgtttgaaacaaaccttgactgaaatcagctttctgaaattagttatttccagagatgaggctttgctggctccatgtaactaagaatagaagttacagaacaatcgtaattaccaaaagagacgtcttcctttattcttttcctgttcagtagctcttcttcttgtacacataaacggcctctcttggacacaacaactttatccaaggcggtttcgtttagttctgtatcttttccagatatctctttctcaagattattctcgtgtaacccatgcaacctacaatcattctcatctggtgcatataacaagctcatcccgcatttcaccacctcacagcaatctagttttcttttggctctgccatcagtaacaaaaaatttgaacgaggctgtggtgttgcaacatctattgagatcatcgtttttcttggcatggtaacagttgctataactgatgaacacatgatcagagctaagtcttcttgattcttcatggctagacgatccacactgctctttccatcccccaagattacatgtaaagctgatgtaatcaccgtcttcgtttctgaacttgcacttgcatatcacggagaaccggctggttctatcttcatagtccttgaaagagacaaccgtgcagagagaaagaccaatgaatttatcgtcgcaccagtgtgaaggcaggttggtttccattgaagatccaattctctgatggcggaaccatagtggcaaatcattccctggaaaacttacagcagataaaggttccaaaactagttcctggaaaaaccattaaggatagcaatgtcactggaataataacagaataaccagagattggaccttatgattaagttgaaaagatctattcgccagtatttgactcttgagctgagtatgagccacaattttttcttgtgcatctcggtttagcttgtagcaatccgtgaatacgaaagtagaatgggtcttttcagctatcactagaagcgtcatgggttttgaaactgtttcgagtgagatacagccatgaacatccaagtactgatttgatggaagcactggaagagaaatgagatttttgcaattctttaagtaaagagatttgagatgatgaagtttcttgatgcttcctggtagattctcgatactgtttcggctcaagcataaagactgcagcgaggataagcagctaaaattgtccgggaatttgtacagattacaatctgtgagatacatgtctgataactgagagcaacctgagaaaggcagcaactccaaacctctgaaatcttggactttagatccaccaaacgaaaacagcttgagattactcatacacattgttctgggagtttgtttgatggatgtatcatccattagcagaatctctaagcttcccatgtttgtttggggattccatgttttaccagatgcccatgttacatgcagacaggagactgcaactttggtattacagtatgtgtaaattccatcatccgagtgagagagaaacccatgtccttgagacctccttaagctccaaaggcctcccttcacggacggtgagccatttcttaaactagcagtagcaatctagcagacgttagttttctttgcttcaaacctcattcttttgaactaaccaacaccaaaagcttgttcgacttcaaactgaactctgtttttctaatctcattactatcatctgtgtttatcgcttgctcaatttttgctccaatctttcgacatggagaacccgtgtgtaccttatatttttacagtggaaactgcagctccggtcccacttgtatctttgatcatccgatgttggtatcaacacacaagaacatatcttccatggcttccgagacacagcacttgaatccgctaggattgtcctcttcacttggggcttcatcaagtgatattgtggaagcatcagccaagaaacccagaatatacaagaacacttcttccgtagcgtctgatacaccacactcgaatccattaagattttcttctccaattggagattcatcaagtgagcttgtggaaagatcaactaaagaaactgtaatcaacaagaacacaccttccatggcttctgagactctgcatgctaatccactaagattttattcttccattagagagtcatcaagtgattgaagtgaacttgtggaaacatcagattagaaacccatagtgcataagaacacaccttccatggcttctgagacaccgcacttgaagtcggtaggactttcttcttcgcttggacctttatcaagtgagcttgtggaagcatcaactgtgtctgaagtcacacaagaaaccgttagtagaggtgtcattgaagtgaagacttaaaatttttgtggttaaacaaaatgttgtattttaaaatattgttcttctaatatatattttctaatattaacatatgcttgatccaaaaatttccatgagtaatatatgaaaacaacataattaagtaaaaaaaatacaaggcatttttccaaattaactcaaacaaaaatccataggatatttttcaaaagtataaacaaaacaaggcatttttccaaattaactaattagaatattacaaattttgttagagaactatttgatttattgaattgaaaagatatttgtaatatagtaatattaattttactagtaatgaaaatcagttattcataattacagaatcaaactgacatttatccttttctgtagatgacgtggatacctaatgcaccgtcgattaaatctgcgtagtgaaaccccgcactgctcacagcaccacctctctcgaaccatcgagtctcgaacccagagaggactttcctcagtgagtcctccgttccttagcttctcttccagatccaaactctcaccaaactttctcacaacacacacacaattcgattcgatccacactcttaaaatcccaaagatctctctgattttgaaattcgattcttccccagatcaacttgtgaatttttccacaattttggttcatgattttgatttcgtgaaggacttatggattcacacccttccctaatgggaaggtccattaccaattcgaaccgatcgagcttagatcttggtcgtccttcttcgtcttcttcatcttctccttcaccgttaaccaaatcgatctccgatgcaagtagtcaaagtctctcttcgatccttaacaatccacacggaggtaagtctggtgtttatggttccgatgcatcttgggttggttggtggtcttcatcgacatttgtagctccagctgagtttgcgcctgttgcttcaacgaagctccctggttcggagctaaccagatccgacttccatggctacgtttcttcgatctctgagtctcatggtagatttgaggatattaggaagcatactagggaagagagctgtgggtttgatcaggagagccatgtatcgggtttagctgcgtgtttgcgtgaggttccttcgctttactttaaggaggattttgctcttgaggacggagctacatttcgttctgcttgccctttctcgagccttaatgagaatctagcgcttcaagagaagttgtcacagtatcttgatgtggtggagctgcatcttgtgaaggagatctctgtgaggtctgattcgttttttgaggctcaaggacagttacaggatttgaatgtgaagattgttgagggttgtagtaggattcgtgagttgaaagagactattcggctcctggataggaatttggtagattcagctcgacagattcaagagctgagctcaactaggattaatatgctggagctgcaacgtaaattaagacttattttgtatgttaaccaagctctctctgcactcaaattggtaatttttcttactgatttgcttagagtagtgtcaatgtagatacttttttgtttttcctatcttttattgatggaagtttgattctttattgttcagcttgttgcgtccgcagattgtgctggagctttggatataactgacgatctccagaacttgctggtaagttcatctgtgattgatgttggatacttttagacgattagggtgctctttctttagaatgtaaaatggattcctgtcttttttaggctggggatgagcttactggtctatactgcttccgccatcttcgggatcatgttactagttccatagattccataaacaggtgtgtctcttttcaggctatgataactgactataataggctgtatttagtctgcctgtaatgctcttttaggatggattgattgggaacaatgagagtaagtcggatcttaactgtgcaaagtaccttaccaagtttttagagaagtggtgaagatgtgaattattgactatgtttttgagtctcgctttcgagcgtcttgaaattcttagatagtgaaggcagtcgatatttgaaaaatgtttgcagggttttgcagctctggtttttttttacccttctacgtccttttattgacttctggtttatatatagcagatagtctctctataatttgcgaagtcgctgtttctttgtagatcaaccctttcatgttacccgtgtgcttgggccatttgctgagattaagttttataactgccaattgcggtggatagttttaccgtctgatgactatgcatgcatccaggcttgtagcattctattagtaatcaatcataacttctgaactcttaaactttccccttaagttcttgcatgcggtaatgccttgctggcggaattacccttattatgataaatcttggtttgcattgaaatgtactatgttcgtcattattttgatacttcattcatattttgttaccttcaaaaggtgtagaacagtatacaacctgtaggcatttgtatcagttaaatgtttagtatattgattttctttggtagtgaattgttccgtgaaaattttactataatgtaagttcactttctatatgcagttatctaccagtcctgttttctctattattttcttttatttgtttatttggtctagtgcctgatggttcattgattttttctttgtagtattctcacttcagaattcatgcgtatctccatacatgatactggggagatagatgtactgattttatctgcagcaaatatacggggatccatttcatctaacgggaataccggcgaagaagtaagtctcatccggtactgaatagaagatcctaaactgtgagaagtggtagattatcagaaaaagaactgaaacaacgaccatcatgactctgaatattgggcttacgcctttgcaggttaagttagaagaagaggatacctctaccttatgtgatcggcttcttcctttagttattggattgctaagaacggtgagtgaccagacctgattatttttctaacaaatgctaccactgaagttgacctgattatttttccaacatatgctaccactgattgttttaatttcttcgtttatgccattcccggtctttattgttggttcatagtgctcattcagggcatagtcttaattcagtttctcatgtattgttctttgaactgttttcataggcaaagttcccgtcaattttgaggatgtatcgtgatacactcacatccgaaatgaaaaatgcaatcaagaaagcagttgctgatctgcttcccattcttgttgcaagatcgctcgaatctgatttttcacatggggagcgctctgtagatgatggtgagattttaattgttcttactatgtatacagattgtcatgcgacttagtttgtgcatgagaacatggttgaacataagtttgtatttgaaatgtgtagaattcctctaacacacattctcatcaaggtcaacaccatagaaacgacagtattggattcttgttttagcaaatgcccttatcaatattgctggatattcccatttgcttgttttcttattaaatctcatttgatctgagacccgacttggaagtaatttacatggaaattggtcaactgatgaagaatgttggctgaaaacttacttttaaggatttaatgaaattttatcatccttctcttcggaaatgtattctacttaggtggtagtttgtctctccagaaaccatacttactcctagtgcatatacaggtggtggcttatctctcgcgagcaaattgaggactctgtcatctgaggcttttgttaatctcttaactgctatatttaagattgttcaggtaatatatgcatcaattatggaacttttaatttcttaaacaagcattatataggaagttatacatatatattctatgttaaacatctggaagcctttttgttttggttttgatacatctaccatataatagaagcttggaaattttcactctctgaagcagttagatgtttgattaagatgtaatatgatttcatttcatttagtgaatgcaggcacatctagtccgggcttcggaagtgaaaaaagcaattgaatggattctctgcaatatcgatggacattatgccgctgattcagttgcagctgcaattgctgttggtgctgtagcagccgaaacagctcaagaaataggtttccaaggcgggtcattagtgtcttctccattgggtaaggctacctcaaaggcccctccattgcagggaaaatcgagtgatgcatcaagcttgatgaacatgtcaagaaacttcaggtttcttagtctatttttttaatgcatttttccaaattctcgcagctgtatgtgacacaggcccttgcttctacgcttggaactaaattaggcatttttctgatttatattagggccgatgtcttgagagaaaatacagaagctgtctttgcggcttgtgaggttactcatggtaggtgggcaaagctactaggagttcgcgctcttcttcatccaaaattgaaattgcaagagttcatgagcatttatgatctgacccaagaatttataacatctacggagaaggtatttgttctaaacttttcttcataaatgagataagaaattgcattgcttattcttgcgtgacatttgtactgaatttaacagattggtggaaggttgggttctagtattcgtgggacgctgcaatcacaagccaaagcctttgtggactcccagcacgaatctcgggttagtctctgtgtagaattatagattatgtttataagttttacagcaggcacatctacacttttgtttagtttcaaaaaagaaaagtggttaaaaagtggcacagaaagttataccaagagcaataagcccaagccatatgatctatactttctctagcagaaaggttaaactttctttcggtaaccaattagtgttgaactatattgacttcatcccatagatgcacattcttctatcttttatcatctaacttctttcattaacaagagttctgcttgttattctaatttgtattttttgttactgtagatgacaaaactaaaagctgtgcttgatcaagaaacatgggatgagatagatgttcctgaagaatttcaatccataatcagttctctttttgcatcccagcggttgatctctgggaaagttgatgatgctgatcttaattcataccacagtaatcggctccctctcaatgggtctctcacttctggatctggggatcaaaatagtgaattacgaaatgaaaaatctgaatctagtgaaggttctgtagttagtgatgcacaagtgaaacccacagtctcacctgagtctcttgaaagaagcaaggctggtgtatcttcagctacgaataatcaaagtaatcagaaggcgcacggaaaatctaaccttttctatcaaggagttggttaccacatggtaaactggttagttttcttgttatgcattttaatgttgttgatcgatgactattgttatattttgcctgtcttgcatgcctggatgagcagtcttctcgcaaaatatatttattgtttgctaggttaagcttgcataatgtttggctgctatccaggctggaaatttttagttgtgctgatgcaattccttttatgtctgcagtgggttaatattgctcaagatgctgtcggaatacattgatatgaacaattctttgccagctttgtcctcggaaattgttcttcgtgttgttgaagtgttgagatttttcaacactcggacatgccaacttgttctgggtgctggtgctatgcaggtacaaatatgctttaaatgaaaaaattataattttcattgctaattagctgtattaagttttctagacaataacctgtgatccatatcttaaccagatgtatgaccttacctacttgtcttgtggaatttagttttttgacacaataatttatatttatgcacaacagatgcaaactgcaataatattgacctttttgagtggccatattctcacctgctatatatgctcacctgctataggtatctggtttgaagtccataaaggcgaaacacttggcgcttgcaagtcaagtaatcgacttcacttacactattattcctggtaggcgataattatttttcttttctaattgtggcagttctaatgtgttcgaatggattaatgtcttgacatcatttgattctcctctgtagaagtgttttactttgtgttatcaaagcatttgcttactcatttttttgtccaaaatatgagtttgatggttattttgttgttctgtttgtttgaatcatccctagctcctaatttgttttgataaaatccctagctcattttccatgtaagctgggttcctgtataacagtgtttttttttctctgtcttttgtggtccaagaaaccagaaggattctgttttcaaaagtacctgagacgagaaagcctctgttgtcagtagagattgataaagttgctcaggtatgtttctatctttgccttctggcttttgtgtctttactcctacagctcttcaggttttggaggtcgttgcacatctaataagagaatagttggaaaaaagttcacaccagttggtcatctcttgttagctattgcggttttaatgtccgtttccattaacttcgatttctcgacaattctcaggattttagaattcatcgagatgaaatatacacaaaactggttcagattatgagagaaagactattggcgcatcttcatggtttgcccaaagttgttgagggctggaacagacctccagataccaataaacaaactaaagagtttgcatggccgctcacaagggtgatttaacctcgttcactaatcttataaagatagaagtagagatgttctaatgcacatttaatttaacaggaagttggctaccttcaccgtgtgttgtctgagacattgcacgaagccgatgttcaagcaatcttcaggtgagcatatatgcagctttcataggaaagacatcttgggcggcatgaatttgttatttgcagtagaattgactacttattgtagttgtaggacagtactcgcttttagctttctggtatagcacaacaaattattgttgctttactttcttgtaaatgttaaaggcaggaattttttttcggattctgaagtcacttaatttgccttattcatatacattttcatgattcttgtaggcaggtgatttcaattatccacacacaaacctctcaaacgcttacgaacttggagataagctcaacagaggcaaagaaaaggtaactctatagtctttagaaaaaatgagagccaacttagcctttgtaattaaacagttgtctcgtcttaaacaggctgaagcttcatgtcgagctaatcctcaaatgcatccggtcgttaccatccgacaatgccaatcaatcagacatcccaaactggggacaactagatgaattctttgcagagcactttagagaagaagaagcaggcgaagctgagtgatgaagtcgtcattgtacagcaatttgtttcttctcacatcctttataaagtcaaaaattcagagtttgggtttgaggatggactattcgcctgtagatttaacttacaggtaacaaattcattccctctgcctccattaccaaaaaaccactctgctaccaaaagtgtttaacaaatcaaatagaaaatgtgatctgtaatatctcatcggtttacatcaagatttgtggaagtgaaccaaattagtatcctgaaaatcaggcctttcttttgttgagatactgcatagaaacttaaagagaactctgatgggttggacccttaaaatgcaggcatactacagttcttggctcggatgaatattataaagccaacagtatctctataaagtaacaatctctcttcttgtttgaattttctcatttgcctcaattgttgcttttttattatcctttttgtttttgagttgtatgagatacgactgattgaactgaagtttttgaaagaggtaagcagtagattcttagacgtatataatgtattttcagagcgaggaaatatttagtcatttggtgtgtccactgcataagcatttcaagtctttattatgaacttgcacctccagaaaactaatggaaagattggctaacaaatggttccaaaacctccgtatcaaaaaatcctggagtaattaactaaggaatttgtaatgctaatgagtagacacaatttttcaatttcttaaacatttataaatataaaaaaatattttcaacaaaacaaaataataaaaagatgtaacattttaaagataatgcggtcctcatattttttaaataacaaataacaaaaaaagtgatagttttagcaaaataataatataaataacaaaatatatacatgaatagtagatagcgaaagaatgaaactttatatacaaagtgcaaacaataagtaattattaatatatacatttttacaataattcaattaaatgattataatttcatttacatacattttagtaatttaaaatttaaaataaatatatgaaagttacactaagagacgctcttgtaaataattaaatgttataaagatttataaaataaagtaaaagttgtaattgttcgtgaaataaactaaatattgcaatagttcaactcatcgattaaaactatttatgaagagtgactacaaaaggatgcaacggtagaatactacatttattcgggttgcaattttctaaaaaacataaccataaaatatttatttttaacttttaaaataaataacaaaaagttgtgataaaattacacactgtttccaactgcaaaacacatttatgggtgttatctttcaaatagattatgttagttgaaggtgatacatgtaagtgagtgaatggtgattagtcgagttatgtgtttttggagacaactatcttcttcctttcatcaatatacatatgttgtaagtagttgaatatcataatatggctagatttataattattaattttgttgatgaattagtatttaagaaattaacaaaatttgatggttccgacattattaattcgtagagattttgctgtacaaactattcaactagtgggacatatccactttggatattcattaagagacaaagctagagttatttatttcatttctaacattatagtgctacaattctaaataaatgatcgaaactatatactctctcttccttttcaatttattttatagaaaaaacgcacatattaaaaaatatatattaaaactgattataaatgtattaataatgtgatttcaaattttctatagttctaaaccattgatatttaattatttgtcttgaagtttaaaattcatcaataataactactcattctgttcttttttaattaattttctagaaaaacacacatattaataaaacatataaaactgattataaatgtattaatttttgtgatttacaattttttataattttaaaccaatgatattcaattatttgtcttgaaatttaaaattcatcaataataactaataaatagtgcataaaaaacttaaaaaattaaacaatattgttttctaaaagatcaagtaataaggaaccgaaggagtactaaatagtgcatagaaacctaaaaaatcaacttttttgaaacaaatttttttcctaaaaaatcaaataataaggagcaaaaggagtataatctaatctctaaccgatatataatctcatttaactataaaatttaaatcttaatcttctttgattaacccaaaccgatatataatctcatttaattacaaaatctaaaccttaatcttctaattagaaactcaatccgatattaaacccgtttaattgtaaaatttaaattttaacaatactttttaaatttaaactgatatttagttttgtttaattgtaaaatttaaatccgtttataattcagatcgatatttaattataaatctaaaccgatatttaactttgtttaatcatataatctaatcctaaaaaattcttatataaactcaaccaatatatcatttcgttttgatagtggagtatattttataattaaatgaattttagttttattagctagctgattatgattggctaaaatagaaagagtaaagagtgaataagaaggttcatttttggttttcaaattatccatctttattttttgtcctggatactggataggcctttatctttcattcttggggtttcgcatctcttccactaatttatttgagatggaattccattgagaatattcgtctcttctttctttcgttctcaattcccatcccatattccccatggcagcttctttttgcggcagccggagatacgatgttttcccgagcttcagtaaggtagatgtccgcaggtcattcctcgcgcatcttctcaaggagctcgaccgcagattaatcaatacgttcacagatcatggtatggagagaaacctcccaatcgacgctgaacttttatcggcgatagcagaatcgaggatctcaatagtcatcttctctaaaaactatgcttcttccacgtggtgcttagatgaattggttgagatccacacgtgttataaggaattggctcaaatagtggttccggttttctttaacgtacatccttcgcaagttaaaaaacagaccggagaatttggtaaggtttttggaaagacatgcaaaggtaaaccagagaatcggaaactaagatggatgcaagctctagcagcggtagcaaatattgctggatatgatcttcagaactggtattttcttttccattccaaccctaatatatatatgtgcctgtgttcaattttggggtgcctctttaatgacaaaattgactattgttattaggcctgatgaagctgtcatgattgagatggtagctgacgatgtttcgaaaaaactttttaaatcatcgaatgatttcagtgatatcgtcgggattgaagctcatttagaggcaatgagttcaatattgcgcttgaaatctgagaaagctagaatggtcgggatttcggggccttcagggattggtaagactaccatcgcaaaagctcttttcagtaaactctctccccaattccaccttcgtgctttcgttacttataaaagaaccaaccaggacgactatgacatgaagttgtgttggatagaaaaatttctgtcagaaattcttggtcaaaaggacttgaaggttttggatttaggtgcggtggaacaaagtctaatgcacaagaaagttcttatcattcttgacgatgtagatgatcttgagctattaaagaccttggtgggacaaactggatggttcgggtttggaagcagaattgttgtgatcactcaggataggcagcttctcaaggctcatgatattaacctcatatatgaggtggccttcccatctgcccatcttgctcttgagattttctgccaatctgcttttgggaaaatatatccaccatctgattttagagaactctctgttgaatttgcatatcttgccggcaatcttcctttggatcttagggtcttggtttggccatgaaaggaaagcacagggaggagtggatagagatgctgcctaggctccgaaatgatttggacgggaaatttaagaaaacattgagaaattacctgcctgtgatacggaagcgcgtttccaatgaagaagggggccgtgagaaattgaaaaagggaaataaaaagttggatttggatgaggagtttcctggtggagaaatttacagtgatgagataccttcgccaacatctaactggaaagatacagatgactttgattcaggggacatcattccaatcattgcagacaaatctactactataattcccaacaggaggcactcgaacgatgactggtgttctttctgtgagttcctcagaaaccgtatacccccgttgaatccctttaaatgtagtgccaatgatgtcattgattttcttcgcacacggcaggttttaggcagcactgaggctctcgttgaccgcctcattttcagtagtgaggcatttggcataaaacctgaggaaaacccttttcgcagccaagctgtaacatcgtacttgaaggcggccagggatatgacacgagaaaaagaatgcatacttgtgttttcgtgccacgacaaccttgatgtagatgaaacatctttcattgaagccatctcaaaagaattgcacaagcaggggttcatccctttgacatataatcttttgggcagagagaacctcgatgaggagatgttatacggatctagagtcggtatcatgatactttcaagtagttatgtttcttctagacagtccctggatcacctggttgcagttatggagcattggaaaacaacagaccttgtaattattcctatatattttaaagtaagactttcagacatttgtgggttgaaaggcaggtttgaagcagcgtttctgcagcttcatatgtctctccaggaagacagagttcagaaatggaaggcggctatgtctgaaatagtgtccatcggtggacatgaatggaccaaggggtatatttacttatctttgttgtccctttactattcaaagctagtttattaatatttggaagagtatttcttattggtgtggtgctaaatcagtacttccattttctctgtcctatttgcagaagtcagtttattcttgccgaggaagttgtaagaaatgcatccttaaggctatatctgaaaagtagcaagaatctgcttggaatcttagcgttgttaaatcactcccagtctacagacgtggaaattatgggaatctggggtatagcaggaataggtaagacatcgattgcaagagaaatatttgaattacatgctccacattatgatttctgttacttcctgcaagactttcatctaatgtgtcagatgaaaaggccgaggcaattgcgtgaagattttatctcaaaattgtttggggaagaaaaaggtctaggtgctagtgatgtaaagccaagtttcatgagggactggttccataaaaaaacgattcttctcgttcttgatgacgtgagtaatgccagagatgcagaagctgtaatcggagggtttggctggttttctcatggacacagaatcatcttaacctctaggagtaaacaagttcttgtacagtgtaaggttaaaaagccatacgagatccaaaaattaagcgattttgaatcgtttcgtctctgcaaacaatatttggatggcgaaaatccggtcatctctgagcttatcagctgcagtagtggtattccattggctctcaaacttttagtttcctctgtatcaaagcagtatataacgaatatgaaagaccatctccaaagcttgaggaaagatcctcctactcagattcaagaagcatttcggagaagttttgatggactagatgaaaacgagaaaaacatatttttggatcttgcatgttttttcagggggcagagcaaagattatgcggtgctattacttgatgcttgtggtttttttacatatatgggaatctgtgagctcattgacgagtcactcattagccttgtagacaacaagatagagatgcctattccttttcaagacatgggccgaattattgttcatgaagaagatgaggatccatgtgaacgtagcagattgtgggactcgaaggacatcgttgatgttttgacaaacaattcagtaagtcgaactgtgtttagttcttttaacacttcagatacttcgtgcattcgtggttatcctttctttagttgtaacaggtgagggtttcttacttatgtgattgtttttgtcagggaacagaagcaattgagggcatcttcctggatgcgtctgacttgacctgcgagcttagtcctactgtgtttggtaagatgtataatcttagattgctgaagttctattgttcaacctctgggaaccagtgcaagcttactctacctcacggcctagacactttgcctgatgagctaagtctacttcactgggagaattaccctctggtttacttgcctcagaaatttaatcctgtgaaccttgtagagttaaacatgccttatagcaacatggagaagttgtgggaaggaaagaaagtaagtgttgacattatggtttttaaagctgcttgcatgaatttataaccttgcatctgatgactaatcttggttattgatgttgtaaatagaatctcgagaagctaaagaacatcaaactgagtcactccagagaattaactgatatcctgatgttatcagaagccctgaacctggaacacattgatctcgaagggtgtacgagtctgattgatgttagcatgtctattccttgttgtgggaagcttgtttccttgaatatgaaagactgttctcgtttgcgaagtctgccttctatggttgatttaacaactctcaagcttcttaatttgtctggctgctcagaatttgaggatattcaggattttgcaccaaacctggaagagatatatctagctgggacatccattagagagcttccgttgtcaatcaggaatctcactgaacttgttacgctagatctggagaactgcgaaaggcttcaggaaatgccgagtcttccggtggaaataatcaggagaacctgaaaaaacgcagaaatcacctctcaatccctgttctaccaagggattgtgatgtaattgtggtatattctcggaccgtgtattctctatcttatttcccaaacgtttttgtagattaggcaaggaaaggaaaaatcctaattgacacagatttgttaatagatttagatgatcattgtgttttaataatattattgttatttgttgtattttaacagttctataatgataattgtgatctcaaaatctcgtttattattagactttgtgtaaatttgattctaaagcaaacttagtctgaattctggtgcatacctcggtattattttgttttattggagacggtgttaatgttatcatgatcctcattgttttcttatgatatcaaactccaaatctgtaacattaaaagttaagaaatagctagttgtttagaagactaaacacaaaaagtaaagcatgaaaagaaccatgattaaacaaagccatataaatctacttttcaataagtgttttaaaaacatgtctaggtagccgtttagagcatctccatcagtagtgaaaaagtaggagatagagtcatagaggtatttgagaaacttagaccatccacattgcatatattttttgtgtgtcttttcatataaatattattaataaagtatgaatagtctttttaagacccatttatcaatgtatctcaaaatgtcttctttgagacctttttggagagatgtctttcatttaaagaccctcatattatttaataaattaaatttatgtgggaagacatttaaactgaatgtgcaatgtggatgctctaaagcaactgtctttccatgtgtctttatattattggccaaaatctacttttataattcaaaatttaaataaataacttaattattataaattgattaacataatattgttgataaacccacacagtataagaccgatggagatggtcttaggccccgcttagacgcgtagacgaccaagatttgtataagttttgttttaacgttttttcaatttttaattacataaagtttatttataagttctagcttcattgtttaatatgaattgaagaaagtgagatttgtaaaattaacctttttttactacttttttgcaataatacctttttatgttgtccatttttaaaaatactcatttccttgaatagaatgaccaaattaccctcatctaataggaacatgtaattggaaactgaaatttttccgcaaaaaaaaaaatcccgccaaactttttttccgccaaaacaaaaaattcccgccaaaaaaaaaattcccggcaaatatctttttcataacaaatcttttctcagccaaaaaaatacttttaaaaatccttgtaaatttaaagtaatagagagtctaagtttaaattaaagaatttaatataaatttaaacaaaacttagataaacatttaaagtaaacaaaacttagataaacttatattttgaaattacaaatatttaattttacatatagttttttttctatatttaaaagttattctttcttaaattattaaaaaaatactgaaacttaaagaatattgaaaattaaatatactaaataataataaaaacttaatatttatggtgtatgaactaaaattaaatatatgaactaaaactaacttggtatcctttttagttttgttatttttaatttattgcataagtttttaattaaatgaatattgctatttgttagtatatatattcgttgttacaaatatatctacgtgttgtcgtagctcagcggtagagctcataaaaccacgtcgttttgatttaacagaaaattctaacaaaaagttaactccgtttacaaaaatttcacggcatgcccacaatggcccaatcaacaaaatttgactatttaatcaaaaaatcaaaaaaaagttttatgatttaaatgacatttcgaaagttcagatctttttcattccaaatttaaaagctagcacttttttcgacatttttcctttctaaaatttggataaaattgcaatgcaatttgtaatattaaacattgttaagtataagtatgactttttatttatttggatccagaatcatttacttttttcttatattattttttgaacaaatactttaatttaagtcgaagggaacattcactttacatattttttttctttatgaattgagtaaattatgtctgcttttaagattagaatcacaacatatacaacaaaagcattagattttaatttatataaactgattcaaaaaaaatctaaaaataggttcatgcaaagatgaaagaagaattggtaataaagttttcaaaatatcaggtcatgttcgtttcatcagtcagatgaatcatctggatggagatgaattttgatgttcgtttggtgccaaaaacggttcattcagatgatccatccaaatgaatcatctggatgagtttgaaaatttagactaaattttgaaactcatttgactgaactaaattggatcatttggatggagataattcagtctaaaataacaaatgacaaaaataccctaattatttcaagtgattatttagataaaaaacaaatagacttaaatcttattttacaattattttttaaaaaaataatgaaattaaattttctgctaaaaccgcaaaatcattttttccgctacaaccgtaaaattccgttttccagccaaacccgtaaaattacgttttcccgccaaaactgcaaaatcattttttccccgcaaaaaccgcaaaattccattttcccgccaaaaccgcaaaatcacggtttcccggcaaacccgtaaaaccgtgttttctcgccaaaaaaaaaaaccacgttttcccgccaaaatcgtaaaatcacgttttcccgcaaaaaccgtaaaattgtgttttccgccaaaaccgcaaaaattacgttttcccgccaaaaccgtaaaatcacgttttcccgccaaaaccacaaaaattatgttcttccgccaaaaacgtaaaattttgttttccgccaaaactgtaaaatcgagttttctcgtcaaaaccgtaaaatcacgtttttccgccaaaatcgtaaaataattttgtaaatgtaaaaaactattacttgaaatttatttacttttaaatatatcttagattaagaattaaaattaatatgtttacaagtaataataaaaatataattagatgaaaacatgggtattttaggtatttgtattattacaaatcatttggatggagatagaggtaagcaaacgaacaacatctcattcggatggtccagtcaaatgaaccgactaaaaatgaaatgaacaagagtcaaatgaatcatctagatggacatgttgaatagataagttggatggatctgtcaaatggaaaaacgaacagggcctaatatattaaactaagaactaaaaaaagtatacttttgctgaccaaattagagaaagagaaaaaaatattttggaacagaaggatggattccatccaagtattcaaccaatgaaaaaaacacgcggatcattcctcgaatgttcagcgccacaatcttttctatctatccaatacacttgtagaagagactttcctcaagtggacttgtgtaatcatcgacctcctctaatggcttttgcttcttcttcctcttctatagttctctccaaatgcgaattcgacgtgttcgtgagtttcagaggcgcggatacgcgtcatgacttcacttctcacctcgttaagtacctgcgtgggaaaggtatcgatgttttctccgatgccaaactccggggaggtgagtacatctcgcttctctttgacaggatcgagcaatcgaagatgtcaatcgttgtcttctcagaggattacgccaactcctggtggtgcttggaggaagtcgggaagattatgcagcgcaggaaagaattcaatcatggagttttaccgatcttctacaaagtcagtaaatctgatgtttcgaatcagacagggagttttgaagccgtattccagagccccacaaagatttttaatggagatgaacaaaaaattgaggaattgaaggttgctctgaagacagcttccaatatccgtggctttgtatatcctgagaacaggtacctgaaatagcgatactgttcttaaattgcatagattcatcttctagaatctagaggccacggtatatttttgaacatttgtttccagctacctcttgttcaatttgttttaaacttgtatattcgtgcaatctgcagctcggagcctgattttttagatgaaatcgtgaagaatactttcaggatgctgaatgaattgtctccatgtgtaatccctgatgatctaccaggaattgaatcacgttccaaggaactggagaagctattgatgttcgataatgatgaatgtgtccgtgtcgttggagttcttgggatgactggtatcggcaagacaacggttgctgatatcgtatataaacagaacttccagaggtttgatggatacgagttccttgaagacattgaagataactctaagcggtatggattaccttatttgtaccaaaaactcctccataaattattggatggagaaaatgttgatgtcagagcgcagggaagaccggaaaactttctaaggaacaagaaattgtttattgtgctggacaatgtgaccgaagagaaacaaatagaatatcttatcggaaagaagaatgtgtacaggcaaggaagtaggattgttataataacaagagacaagaaactgctgcagaaaaacgctgatgctacatatgtggttcccagattaaatgacagggaagctatggagttattctgccttcaggtatttggcaaccactatcccacggaagaatttgtggatctatcaaacgattttgtttgttatgctaaagggcttccgttagctttgaagttgttaggtaagggtctattaacccatgatataaactactggaagaagaaattggagtttttacaggtaaatccagacaaggagcttcagaaagagctgaaatcgagttataaagcacttgatgatgatcagaagagcgtatttctggacatagcatgttttttcaggtcagagaaagcagattttgtttcaagcattctgaaatcagacgacattgatgctaaagatgtgatgagagaacttgaggagaagtgccttgtaaccatttcttacgataggattgagatgcatgatctattgcatgcaatggggaaggaaattggaaaagaaaaatccatcagaaaggcaggcgaacgtcgtaggttgtggaaccacaaagatattcgtgatatcctggagcataacacggtacatcatatctacagttggtttacttcttctggtattttgtttttatgtcgacctttcactgttccttaatctttttctcttgctaccagggcactgaatgtgttagaggcatcttcttgaacatgtctgaagtcagaagaatcaagctttttcctgctgctttcacgatgttgtcaaaactcaaattcctgaaattccacagttctcattgttctcagtggtgtgataatgaccatatatttcagtgctccaaagtccctgatcactttccagatgagcttgtttaccttcactggcaggggtatccctatgattgcctgccatcagatttcgatccaaaggaacttgtcgatcttagtctgcgttatagccacatcaaacaactgtgggaagatgagaaggttcatctctctatatattttcttatctaaaaaattattattctctagttttgctgctgattagttacattatctttgtctacgtgccacagaatacagaaagtttaagatgggtcgatctcggtcagtcaaaagacttgctaaatttatcaggtttatccagggccaaaaatcttgaaagattggatcttgaaggctgtacgagtttggatctcttgggctcagtaaaacagatgaacgaacttatttacctgaacctcagagactgcacaagccttgagagtcttccaaagggattcaaaataaaatctcttaagactctgatcctcagtggttgcttaaaacttaaggactttcatattatatcagaaagtattgaatcccttcatttggaaggcacagcaatcgaacgagttgttgaacacatcgagagtcttcacagccttattttgctgaatctcaagaattgtgagaaattgaagtatcttcccaacgatctttacaagctgaaatctctccaagaactggttctctctggttgttcagcgctggagagtcttccgcccatcaaagagaagatggaatgcttagagattttgcttatggatggaacgtctatcaaacaaacacctgaaatgagttgtttgagtaacctcaaaatttgttcgttctgtcgacctgttatcgacgattccacagggttggtagttttacctttctcgggcaactcttttttatcagacctctatctcacgaactgcaatattgacaaattgccagataaatttagctccttacgatcgttgcggtgtctatgcttaagcagaaacaatatagagaccctacctgaaagcatcgagaaactttactctttgttgttgcttgacttgaagcattgctgtaggctcaaatctcttcctctgcttccatctaacctacagtacttagatgctcatgggtgtggttctctggaaaatgtttcaaaaccactaacgattcctctcgtaaccgagaggatgcatactactttcatttttacggattgcttcaagctgaaccaagcggagaaggaagatattgtagctcaggcccaactcaagagtcagttactggcaaggacatctcgtcatcataatcataaggtccatttcaatttaactctattgttgtggtgatacctccttggtcataagctcatgcttaaatggttttctttgtaacccatttcagggactacttctggatcctctggttgccgtttgctttccaggacatgacataccctcatggttctcccatcaaaaaatgggatctttgatagaaaccgacctgcttccacactggtgtaacagtaagtttattggagcttcactatgtgttgttgtcaccttcaaggatcatgaaggtcatcatgccaaccgtttatctgtaagatgcaagtccaaattcaaaagtcaaaacggtcagtttatcagctttagtttctgtcttggagggtggaacgagtcatgtggatcatcttgccatgaaccacggaaacttggatctgaccatgtgtttatcagttataacaactgtaatgtgccagtcttcaaatggagcgaagagactaatgaaggtaatagatgtcatcccactagtgcctcattcgaattctaccttactgatgaaaccgaaagaaaactagaatgctgcgagattttaaggtgtgggatgaattttttatatgctcgagatgagaacgaccgtaaattccagggaatacgggttacagacactgttgagcgtacatctagtgaggctcttgtaaccattcgaggtcagtcccactcacggattgaagagagaagatatggcagaataagagatgaaatcatggatatgactggatcctccatgataggaggtcccgagtcttaaaaacaaatgaaaggtagaatacttattggactttattgttcttgaacttctcttagtagctttcatatatttaaacacaatgtagattgatgtaggaacttaaagatgttgcattgcttttcagaccctttggtgtgtcgacagggacttctatcaactaacctggctgcagcttgactttgagcttatcgttgaatgtgactggttcgatgccattcgaagctgattgatgaagtcgtcactagacaactactgtgtcacttcaaaagacaaaacagagtatggtctttactctttgtttctccctttactgtacatcacatgtatgctcaatttctagatttttgtcgaacaactggtccaaaaggctccattgtttcataaagtgtttctcaaaataatgctctggaaattgaagggaaaaatgaagaagttgctggagagatcccatttcttgggtgataagtagacatataggcttagatatatgtcttagattgtgttctataatggatgaaaaaaatggtgtattacgttgtatagatgatattttttgggtaaaagtttttggtttgaagcaaaaggatcaacgatgagcagaagttttgttcgtagctatatattttttgggtaaaaaattgtgcattacgtgatttctccgcgagaccacgttctttattaggttgattcgatccaaactcatcgacgtgaatttccgaacaaaacactcttaacctctaaatttattgtttaaatttcaattctttgcctacaggcttaagaacctttgggtttagaaaagttgctgagtctgaacaagaatgcgaatatgcaaacgatgattttgtgagaggtaaacctgagcttacgttggatattgaaatcacgagattgaaaagttttgtcacaggacaacctttcatgtttgaaggaatcctaccaggattggtttccccggagactatgatagcttattttatggctattaaggagaaattaaagacagctttagcaaaggatatatcaaaaccactttatgaattattggtctttttatattttatctttggactaattatttattttcttgttgttgttctgttgctcgactaaaactaattctttagtggtttaattgtgagattatgagattttggacttttttttacgtgttagtttgataatcttaaagaacgaagcattgttgtgttactatgtctattactaaaatttcatctttgttttggtttgttagacgaaaaactcctcatctatctttgatcagttttgtgaacgcaagttccaatgaaaaagcttctaggaacttcattgacttgtgttttccgaaatttaaacatggatgattgaagaaaatgataatctgatgatcaagttaaggggtcctacgaaatgtcaaaatcataacattaaacgatacttttaatgaaatattcttgataaggagattgtcggatatagacgttgacaaagaaaaaagaatgattgcaaattaaactttaatgatacaaactgaagtatccatcaaaatgtaaatcaaaccacatgcagcacaacaaaagacaagaaaagaacgacaatgtccgtttgtaataattcattaatcgcacagggaattaacagaatgattagacagcatacgccgtaggagggtaaggttgagctccagcattgtaaccttgattggcttgtggtgcagccgggtaagcggttggcattgtccggccaccgccagctttagttatcccttgattttgacccatgtagaagcatcctacacaaccaccaatggctaggaacaccatgaaaatgaacaatggtagcgagaaatacacaatgaacatcgcttaaaatcgtagagattaactaagcagatgttaaagcgataaaaactggtaagcaaaggagaaggagatgtagagggaatgaagaaacaaagaagagagtttcatggatttataagggaatgttgttgttgctacaaggtatattgacttttaagaaaatgcaaagaaactaaaatagtaatgattggcaagtgttctatatttatatgcaagtacagagtaaatgaatttgtatatcaaaagtcagatcatcacatgcaaatttaaacatgtatcaaaggaattgaattatttttatttttgaattaatttgttttataaataccgttttgtcgagtttagggactaatatcttgaaaaagaattaatctaatattatgttcatgtttgactgttgaattccttgttttatatttcccattaatccacttgcgaactacttagacatcactaagtacatgattctcaatccaaaagacacatacctcatgaacaacaacaaagcataaaagaatctatttacatattaatactgagtatttatatgtaattgttctacattattgaaaccgactaagcttcccttctcttctccaactcacgtgctttctcttctccactcatgtgcttcttcctcttagtgtatacttgatacggtataccattgtcatacaacgtatgcaggcttgtaggattgaaagaagacctctcttcacatttctcatacaatatatgcatgaaacaaatgttattgatgtcttatgacagataatttcatgcatgcaagcctactacagaaaacaaataatgtatattcttagcaagtatcaaggttatatgagctacatccatcgatcccctgatttctcttacaacttatataatcgtaaaactgacttagcttacgccgccttccaactaaattattcttgagttttacttttgtaatttgatatatctctttcagcgtctgcttcatatctattaccttctccgttgtaaggctcactagagattcatcatgatttccatcatatggcaattggaagaaccgctctatacatttattaaactcggtctcccatggattatcatggtcgcagtctactctctgaatttgtttccctaatttttttgatgatattagcttcttccgaatatcattggcaactttttcaatcatgtctgcatccgatgccctaccaatagaaaagatcttatggtctcataaatcatgcaaaatgtatataagattattcaagaaaaagcaagtaataatgaattagagacatgtaccaattcaaagaacattcgccagcaatgcttgctgcatcagtcaaagcacgactccatctttgtcgctcatcatttatagtcttcttgcaagttttcttgaaaccttttccaaagtgtccgctttgattccgaatatcggaaggattgaccttgtagaaaataggcatcactacttgacccaactcttcccagcacttcatgatctccatcaattgaagcaagcacaaacttgaggaggcgtaattttccgagaacacaacaaccgcaatgcttgattcttttataactttgttgatcagcgagcggcttaggatcttatcacctatgcatatacgaattcctttgtatacgagcttcttgagaaagtcactgatgaattgtttccgaaaatctttaccatggaagctcacaaaaacatcattgtttcggttgcaaggtgagcccgaagccatagataccaactcttttgtgctagcaggcagcatatgaatgatttctctagaaaaatttcgttgcagaggaggcatcattacttccccattggaagatatatctatgagatacctgccagctaagtcttcgagcgtagactcaattacaaagtcagtactagcaagaaattgtgctagcaaatcagccttctcaccaccgagcaaacatgctatgtaaagaaataaagctttttctctttgttttaaaccagcatagttaactcttaatctctttttacctttaccatctaaaagcttcagtgaatccattgaagaacattgtggggtcatcgtgtttccacttgagctgccagctgcatcattaatcacatagactccacattttgttatagtgcaactatcgcctacatgcatctcctgcttgttgaccgggaatatttcaaagacaactagatcagccaagataccgaagacatctccttcaaataatatacttggatgcattttaagatcaaaaaagacaaacatgtgatcgtcgttaatcttaggaacaacttcgcctggagcccagcaatgaaaaatattatcacgcttatgagcatggccttttttgtcattccatctgcaaacacacctaaagcctaaaccagcagtatcatgaaaatcctttgagaatgaaacttcaactaatattgcaaagcccacgagcgtacttctcgtttttggatttagaataatcattgttgaagatcctggttgtagataaagtttggaatctcgacttgtaggtgaaggtagacagaagctgcaagctagtgcgttttcgagtccctgttgcaccaaggcaaaacaagtcagtaaatgttgaacatttagagcatctccatccatggtatgaaatggagttctaaaaacttaataaaatacaaatattaatatagatactaactataggtgggtttctcaagttttgagagccctaattaatatttaactaatatttatactattataattttcgagaatcctatcctcatactatggatagaggtattttttgaacatctatattcgagatttctcacacactacaaaaaatataagtattcatagcacattagaataacacaattattctgtttctctagtgtaaaaaaaacacgttatggtttttcgcacacaattcttttgttttttccgttattattgtacagttcttatatatgagatatagatagatagaaagagaaagacctgctgtggtttcctgcattctacaatagccggtgcattcgctaaaacttcgctaaccatgtgtgagggtaggccaaagcaattactgaacgtgtaatacctaggaagctgcttgaagtccggagtaattaattgcagtgatgaacaaccgtgcgcattcaagagttgtagacttcggggaagctgtgggagtgatctgaggttttcgcaatagcgtaaccttagactgagtagtttagaaaaatccttgatgcttactggcacctctgtgaaaccgttcctactaagatccaatgtctttagtgaaggcatccaacgtatctcttcaggaatatactgcaaacgtgccttataaagagacaaagtaactctatgttcataaaatatgaagaaacaaaatggcagctttgatcgaagtagcatgactgtaggagctggacgtagttctctgacttttggtagagaacttgtgaatacctcaagctctgagcagtttgatagatcaagaactttgaggggattcaagttgtgcatttccattggcaagtgtcggagtctattgcagttcttcagatctaatgtatcaagtagagctagatccccaatagacggtggcaattctctgatggcagtgccagcaagatataactctattagatttagaggaagatcaacaataatttccagcttcgagcagccagacagtttgagcatgacaagaaattccaatttactcattcccgttggcagaccctgaagcttcttgcagttctccaaatctaatagaacaacttcagagagagtctcaagcagtgttgatgggaactcctttaccgcggtgccggctagatataactctttaaggtttcttgggagttccttaatattctcaagatttgagcagccagacagtttcagcacggcaagatatttcatgttactcattcccatcggcaagtctcgaagcctttcgcaattctccatatctagtttgacaagtttagagatatggtggcacaacgatgatggaacttcttttatggcagtcttagccagatataaccttttcaggttttgggggaaaccctgaatatcttcaagttctgagcaaccagaaaaatcaagaacttcaagagactcaaaaataacaatgtcaggcagacttcccaaatgagaactatctttcagcttcaagacttgcttacggtgatcttggttagaagagctaacattttccaacttccttgttaatctttggctttctgatgaatgattcaacgaggatagatctcttatgccagttccctgaagatgcagtttcctaatagacggtggcacctttggaaaactttttatctttttgcaagttgagagatccacaatacggagatgttgtaattgacccgtgtctggaaaactttgaagctctaaacatcccttgagatcaattttttcgatgtttggagaatattgaagttcatcaacgttaagtaattgcacggaacagctgagcgtgatcctctttaagacctcaagattctgaacaaacaagcaaacatgaaaaaattcttagaaattattccgatgattattacttttccaatagcatcgtgacacatatgcacatcctgcatggtacacatatatatatatatatatttatttcgttttttttttttggtaaatgcggcatatatatatatatatatatatatatattcccataatgaaatgttaaattagaggtaatgacaccctataatggcaactatgatggtaaaaatcactatatgtgtaaaccatgcacgtttgtttttgatgtctacgaaccttggttcctccccaaagtttcttaagtttactgcagggcatattgagttccacaagatactgaaaaccaaagttttgtggaaaagagtgcagaggataacatgtccagtggagaagtcttagctcaggcggcagaaattgagggtcccctggaaggaacaagtcaggatccttcgtaggattaatggagctgtaaatcgtcagatatcttaggttatacatatgctgaaacgcgatatgacctttgaagggtaagttagaagtgtccaagtttatggctttaacatcttcatagccctgaaaggacaagagaaatcaaaaaggtttggttgcttaaattagaaaaaaaaaaaaaaaagtacttgtaagtgtttgaaagaatactcataatgtgaaaaacgaataatacctgttctgattctcggatttctttatgttctataagagattgactgttggaagcatccacgaatctataacacatccctatctcatcgctttgatcattgatgattttgaggccaacatcgtagatcaaattattcacttgcactctgttttctgaaacagttacaaaacttttgtccacaagagcttcgattccaactcgtggaaagaatccacaaccggcaagagattgcattacgttgtccacatttgctcccctaaaggtaaacacaatgtccagaaagatttccttctcactgacactaagtgcatcatagctgcttttaagtttaacgaaaatcttgtcggaaagatgtcgcttgagttcaaggactacactcttcatatctaaaggtgttttgcccttcagattcttgccacaaatgctgagagctaacgggtttccgttagcatagtcaacgaatttcatagacaactccaggaggttctgatctggtacatcttttccaaacgcacatctggagaacagctgcagagactcgtgcttgtttaagccttgaaccttatatatctcgttgacctgacattggacaagtacttgcttatcttgagaggttacgattatcaagcttccaggaccaagccagtcaaattcacaaagaaaactcgttgcacccagtggcttgcgcacatcatcgagaacaagaagaattcttttactgcgtaatgtttttaaaagaatgctcagtcttgtaacttgagggtttacgccaagctgtttctccaacaacccaaagaagcccttctcctgaaactccctgtcgaagtcttcgatgaagcaagaagcttcaaagtcacgggaaagttggtcataagctgctctagcaagtgtcgtctttcctatgcctgccataccccatatacctaagctgcggatgatgcagcctggttgcttgcaaagcaagtattctatcttcgtcaatctggagtagactccaattctacccctacggtcaagtttttgacgcacgtcggcaacaattttttccacaagttcggagtcgctgcatttttatacaaatcgtcttattaaagatattttaatatatcaactaacgaggtcatggttaaaaggattttccggattagacattttcaacattttcggagacatatttattgatctaattcaaaaataatattaaatttgtatattattattatctatcttcatttcacaaagcatgaaggctaaaaaaaatacaaaaaagatcccttttaaggggaaaagggggaaaaaaatctaaattttagaaaagtaggctaattctctttattgttcagcagaattcaagatatttcgaaacgtttttttttttttccccactaatatttcaaaacgttttgtaaaatggtttgactcctaaaaatgaacacacaaaatatttccaaacgttttgtaaatctaaggacgccgttttgataagtaaatttgaacttcagaaaacctcaatcacaaaataatatattttcttgattaggttagttaactatatttgcgaaaagaagcaaagaagaactcaattttctttgggaactcatttaagtcaactgcttttttttgttctgaattaccaaattcgaacactaatcaagatataaaaatggttctacttgtacaaaccttcgcttatgagatgatacgtgtcctcctcgtaagtctgcgatgtcccatagagcgttccgccactcgtctaccttatcgtcaggatacatctttttcagttccaagcaatgtttcttcactatggaatttgtgagtccgtagaaaactggaaccacaactaggcccttgctacgtcggcacttagaaaccttcaaaaactcgtttaggcatcctttggacgaagcgaaattctcagagaaaatcaccactgaaacccttgctttcgctatagctgcatcactctcctccgcaaatctatcatcgcttgctgagtcttcactggcgaaaacagagacgcctttgcgttgaaactctgcagagagatggcttacaaaggagtgccgtatcgtatcctcccatctattaaagctgatgtaaacctccttaccgtcgaccattattctagagcgtctgcttgaagactttcaaaaatgatttcccgttttatggattctatacagaaaattatatacaggccgttcgttgaaaatgtaaatacgtgttaacaataattttatctttcaactaacgtgtacaaagttcttttcccaaacatttcctttcgttttcctcgatgtttcttggaagttttaaagtattaaaaaaaaaaaaaaaacaaacaaacaaagtcaatggtggaagctcccttgacatacatattggttgaccaaggatttattaacgcttctatactgagattcgaatcccagatactgcggtttattagcagatttgcagattaatgaaagcaaatgtgcatgaaatttccaacgatgtacaattataaccgttcgccaggattctacgcagagaatatcattgaagctctccatcaagagcattgaaaagaagaatgaggtatcatatgtcgtaaatctaataagggtcagaaagaattgtccgtagtagaatcgtttatataacagcttttataatttgcaataaataataaatctaagacgacaaaaaaaaagtaagtgaaattttgagaaagttctttcttgtttgcaaaaacaaccctatttttataccaaaaattctattaaatattgatatattattgtaaacagtttaattctaaagagtttaaaagacaaacacaaacttatcctttcaagaagattattgagttttatattgttttacatggtttcggagctgaagtaaattcaaacacatataaactatccaaagtataagtttatctctaatatgaatgaaaatattaatcattttaagatgccatgttaggaatataatattaataagaaaatgtgacataatgtgtccttacacttattcattgttgactagttttcagttacaaattgataaagttagtaaccctcgcaaataagaaaaaaaaacaatttgatcaatccgaccaagatgtaaaagccttcaattgtttatttcctttataagaacatcatggtttgaaaaaaaggggaatttttcaaaatctcccacatttcagaatgtaacattcaaaatctgctacatttggtcaattattttaaaatctactacattgcaattactcgcgtggaattatggacaaaaatgcccaagtgtgggacagagtctatgtcatagacagagatatcttttggttgatatgatgacacagaacaaaaaaatcatggaagaaacataagaaattaggggaaagatagtggagagcagctgacttttactgttgttattggatatttaaaagttgacttgtttaaataatttggctatcgaaaattctgcgagggacaacgtaatatagaatgcattagaggacatgattacctgttagcgggggacaacgtaatatataatacattaggggacatgattaccggttagcgaaggacgacgtaatatagaatgcattcgaattacttgatcatttgaatgtaatccttactacgttgttccccgcgaacaagtaaacatgtcccctaatgcattctatattacgttgtctcccgcgatttatcattagttttgccgatacatatttcttatgttaatcttatttagagatctagaatgttaattaagattacaaagaaagacaagagttatagaactatcaagaaagtagcatccaagtagaaaacaaagtagaataaataaaaattacaaaaaaacataagttcttaaacaaaaatattgaaaggggcatcaaccacggagaggctgaacaaactcttcatagatgtcgacagcaaatctcatcctgagatttttcacgacttcctcagttatgctctcgtggctaatgccttggaaatgaagttcaaaaaatttcacaacaagtgggggacaaaaacccaaaaaatgcagaaggacaaaaagcctagaattttgggtacaaaacgattatatcaaattagatgaggactaataagtaattatgatgaataaaactaagggacaaaatcgattgaaagttatatgtagagaatctgtacagattgtcagagaaactgagagagagacgaaaccgtttcgttttgttttcaagaaaataatgatgtgtggttaaagcgcacgaatgtcgagaaagaagagataaaatataaaagtgaaatggtacgaatattataaacaattcaaatagactatagtacgtatgagttgaaagaagttttcgattgttgtagattttttctttaaaaaactattaagaaattgcagggttttatttgcaataaattaatctacacttattttaactcccgaaccattttatgcccttcctcgtcttggtctcatctaataaatggaaaggccaaaaaaatatatatgcatatagataacgaaaacatattgctgtataaaacatggccacataaaaagtggtcctaatttgggaagatttttaaaacatttttcaatcaatttagtttaatttgtttttcgtcggcaactgaatttcactggaaacaaacacttgaatggccattgaatggctattgattacccataaatactagacaacgatccgcatgcacgcgggatgaaactattcagataaagccattataggtaacattattagatgggatccaagatctgtttgtataaaacaaataatttaataattgtttctattatatccaaatttaatttgcaaatattttatataattttttttctcacctataaaatatttcaacgtggtgaaaaacttccacgtagacaagaagatagagcaagtaactcctgaatttagggtggtacatatatttttgtttttttaataattagagataaagcaagtaatatgcttcaccagcctctgcttagggccggctctggttcagctaattcctatattatcaatattcgttcagatatttgtatgttgataactaaatttgatatttgtgatttttctaaaaaaataatactaaaactaagtgcctgcattggcaggggccataatgctagttatcttctatattagagcgtaagtcaacgatcctattctgtaaggtctaccatctagaattgtaacaatttcgcaatcatccagcttttgctgacccgcccgccactcatctactagtcgtttgtatcacaattccaggtcagctacaatttggccaagttacttctagataagaatcctctggtctaaagtcctctcatattgtacgtaacttacaaaattttattgcaaaaaagaaaaccctctcataattaaataacgacacatggatcattttcaactagcaatggcccattgctagttgtttttggtagtatggcccattaacagtttgatttaagacctgtttttaggaaatttttccaagaaaactcttcaattatctttttataaggaagtttaatacctaatatttctgggttggaagaataatacatatatttataaaaatatgtaatttaacactcaaacaattaaatgttttatacttacaatctcataacaaaaaataaaattctaattaccgttaccatctcaattaattattaatttttagatgatttgacattaatttataattttgaatataattttattttatgttatctcaaaaatataaaatttcatttttatcataattaatttattttaaaattcaacataaaaaattatgagaaaatctaaatactttaaaatagtcatttttacaatcttatttcatcgtctcaatatcaaaaagatgttttttcttgagattcaatcttcgattctagatttcctcaattaatcgctacgagaatcgctgataaacaatttttgtcgccctcttttgccaacatcaaattcgataaccgttcacaatctccttttaatcgccactaaaattaatttgatttcattcgtcgtaatgaatatgatatcaacgaccattgatatgaacttcttcttcgtcgtgagaaactctctattcgaatttaaatccttgacaaataaacaattttcgacaaaatctcaatttgaatctcattgtatttctcatgatttttcaattcataaaaatggctaattttatttttacctttttcaaagttttttttgcttttttcttgaatttaaaaaagataatatttttttataaaaacttttgggataatatagaaactaaatgttaataaaataacttttaaaaattaaataaaattaatgcttcatcacctaaacattagtagttaattgagctagaaatggtaaaattggaattgtatttttgttctgagattaaattgtttgagtattaaactttacagttttattagtactgtatgtgtatttttcttcgaaccggaaagtaatgggtagtaaacatccaaataaaaaaataattgagttttttttgagaattttcctttcttttattaacatattttactttttttgattaaatttttttaaaatatatttaaaatctttgtagaagcacactaatccatttgctaactaatttaaatatgtttctaacatgttcacatatattaaaaggcacgttttgagcatacatatattttggttctcagttcttgatcatctagtgcattatctctcaaaaaccctaatcatttggcctcttcttttccccctaggctaatttacatataatatccttagaacgaccaaaacaatgtgccacagggactaattaaattaaacagcttgtaaaaattgtaattatcttggaattgttggagttggttaaaacactttttagaggcctttttattcccatctccgaccattccaccaaaacccaaaccatttttgtttcgcaaaatcattctaccatggctacctcatcctcggtggtcagcagtgtacctcagcagcaccaagtgttcctcaatttccgtggggacgaacttcgtaataatttcgtcagccatctggataaggccttaagagggaaacagatcaatgtcttcatagatgaggctgtggaaaaaggtgaaaatctagataaccttttcaaggagatcgaaaaatctagaatcgcgctggctatcatttcccaaaagtacacagagtcaaaatggtgcttgaacgagctggttaaaatgaaagaactcgagggcaaactcgtgacgattcccatcttctacaatgtggaacctgctacggttaggtatcagaaggaagcgtttggtgctgcgctcacaaaaacgcaggaaaatgatagtgatggccagatgaagaaatggaaagaggctttgacgtatgttagtctcctggtgggcttcccgtttaacagtaaaaggtacaattttgtttttctattcattttttttttgtgtgttcatccacattatttaattaattaagagcaaatgcatattttactatatataagagattcagccgttcagatagcaatttatttatttaactagtaagttgttgagtttgtatatgattatgttactattgcatatagtatagtagtatagccatgtatgctggtttacacaatcaaaatagaaattagacgaattacttccaaatttagctagactatgcgctgctctattataacttcttcttgtaaaaaaatttcgtcatcctcaccatcaaatgtttactcttatagttactacaatgctgaaaggttttctaaatttgatgaacttattgttcacattacaatatatatatgataccaaatcaacattaattttcttaaatccatttacaaataagtttgttagtaatctttcaggataaatacctcccaagaattttatatttaaatctattgttaataacatagttgtttatgattatttatttgcaacaaaatcattgtcgttttctaatctttaaaatatgcttgtgtattatttttttttgttgttccaattacatgtacaatctatgttgactcgtcgatgcagtttgttacggtttttctatactgtatttgttaaaatagctaaaatgactgcaaaaatgtatatatagattattatataaagtaatttagaaggaaactaaaaattgtgaaaagcttttcctttgcgatatgtcaatatggcatgccatataaatattatttttaaaaatcagtttagtttctaagaatgcttctcagttctcaattatatagaagggagtttatctaggcgtgggataaattagtttaaatacttttatacagttatatataatgaaagcttgaaaggttaacattatgtatatttttaaaaatacatcttataatataacaaaattatgaaaccatatcatttttgttattaataaaataccataaataggaaagaaaaaaaaaactcttgtctatgtcagtaaagaacatatcaatttaccttgacttgagaaaatgacaaagttacgacggactgtagcagctaggcaagacgtagttacacttttagaatatatgatatcaatcatttaagttaattacattgtaattttttttctcacgtacttatatatgattggttcctagagttttttagaagttagatgaataatttgttattaaaattttgtcaatttgacactattgcagcaaggagaaggagaccacgctcatcgataaaatcgtcgacgccgttttgcaaaagctgagtaaaatatcgtcggaagaaagcacaagtggatcagtggatcaaggtcggggagaagaagtagaagaagcaaaggctgataagatttccgggctcaaccagcgcctaaaggaactggaagaaaaggtagccattacgggtgacaagagagacgagactcgtattgtcgaagttgttgggatgcctggcattggtaaatccactctcttgaaggccttctatgagacatggaaaaccaggttcttgagcagcgccttactccaaaatataagcgaacttgtaaaagcaatgggattgggacgcttgactgggatgctcttgaaggagttgctcccagatgaaaacatagacgaggagacatacgaaccatacaaggagaaactacttaaaaacacagttttcattgttctagatggcataagtgacgagacacatatacaaaaacttcttaaggatcatcgaaaatgggctaagaaaggaagcaagattgtgattgcaagacgcgcagtgactcgtgatctgcttcatgaggattcaatggtccgttatacttattttgtaccgctgttgagccatcgagatgggttaaatcacttttgtcactatgcgttccgtcattttgcggcccaccaaaacaacaaggaagctttcatgaaggagtcaaaagagtttgtgcgttacgcgagaggccacccactaattctcaagctattgggtgaagagcttcgtgagaaaagcctctcttactgggaagagaaactaaaatcactcccaaaaagtctcagccaaaatattcgagaccgtgtcttgcaggtaacttatgatgaactgagtcaagtgcaaaaggatgcgtttcttgacatagcttgtttcagatcccatgatttggtttatgtaaagagcttactggattcatctggtcccgccttttctaaagcgacagttacaatagacgctctcaaagacatgttcatgatttacatttctgatagtcgagtggagatgcatgatcttttgtatacgtttgccatggaacttggtccagaagccagggatgacgatggaagagggagacaccggatatggcatcatcacaaccaagataataaaggcaggctcaataggctgctaaaaagaccagtgagactacattcccaaaacacttgcacttattggtccagctagagctttcatttacttatcttcttctctttgttgacattgtggtgtatacagggaggcagcaccagtgtgagaagttttttcctcgatatgtatgtcatgaagacggacgtgaccttaggcactgattacctcaagaacatgcgaaatctccggtacctcaagttttacagttctcattgtcctcaggaatgtacgcctaaggaaaacatacacatccctggagaacttgagcttccacttgaagaggtccgatgtttgcattggctaaatttccccaaagatgaacttccacaagatttcatccccaagaatctcgtagatcttaagctcccttacagtaagattagacagatttggagagaagagaaggtgcgtatctagataaaaaacttgattgcttcgttgtttttggcccaacatagtaagttcatggcttaaactaacttaagtcgctggatcctttccatcacaggatgcaccaaaactaaggtgggtcgatctcaatcactcaagtaagttggaaaacttgtcagggctatcacaggctctaaatcttgaaagattgaaccttgaaggttgcacagcactgaaaacgttgcttctgggtccggaaaatatggcaagtcttgttttcctgaatttgaaagggtgcacgggtcttgagtctcttcccaagattaatttgagatctctgaagactctcatcctcagcaactgttcaaacttggaggagttttgggtgatttcagaaactttatatacgctatatttggatggcactgcaataaaaacacttcctcaagacatggtaaagctaacaagcctcgtcaaattatacatgaaagactgcgagatgctcgttaagcttcccgaagaatttgacaagctgaaagttctgcaagaactagtatgctctggttgtaaaagactcagtagtctcccagatgtgatgaagaacatgcaatgcttgcagattttactgcttgatggaacagcaataacaaagattcctcatatatcctcacttgagcgtctatgcttaagcagaaacgagaagatcagttgtctttcgaatgatattcgtctgctttctcaactgaaatggctggacttgaagtactgtacgaaacttgtgtctattccagagcttccaacaaatcttcagtgcttagatgcaaacggatgtgaatcattaacaacagttgcgaatccactggctactcatttgccaacggagcagattcattccacattcattttcacaaactgcgacaaattagaccgtactgcaaaggaggtaatcacaacctatgctcaaaggaaatgtcaaatgctatcagatgcactaaaacgctggaatgaggtgatctctctcactatctcctcattcatttatcgctctcaagtaaccatatgaacctttaacttttgtatgactttttctgcagggttttgttccagaggctttgttcagcacttgcttccctgggtgtgaagtaccttcatggttttgtcatgaagcagttggatccgtcttaaagctcaacctgctcccacattggaacgaaaataggtttgtcggaatagctttatgtgctgttgtgggatccttaccaaattgccaagaacaaaccaactcttgttcagtgacatgcacgtttaacatagcaagtaaagattccaagaaaggggatccttacaaaatctcctttgatcgactggttgggcgttggaacaaacatggcaacaaactagacaagaaaggcaacaaactaaagaagacggaatcagatcatgtctttatctgctataccagatgctcaaacagcataaaatgtcttcaagaccagcactcaggtacatgtactccaaccgaagctttccttgaatttggtgtgacagataaggaatctcgactcgaggtgctcaagtgtgggttaagattggtatatgcatctgatgaaccccagaagacaaactcagatatggatctttcattatcatcatctgattcaactccgacaaggaacggcagttccaacactactacatctagtggaagtgtatctaccaataccattagagaagaagattccaatatcttacatgaagcacaatctcaaaatgggagaggactttgacatccagaattaatcaactgagtcgtcgtcttttcactctcttttgtgtttggctatgtcttataaaaccctccataatgtatttctctatgtacaacacgatttagatttgcgaggacgtacgtaccttactttaatcactgcattgaacgagaccaatcgcaaatgctggggctgggagggtaatgatgacgttgacagttttgcccatgtctattgctgtaatttacgagaaaacccaacctttgttttttcaccgatatagagatgatctaagccgtcgtctttcgccgtcgagcctgacaattgagtgatctgatcctccttcttcgtcttgttaataagtccaatttgctcggatttcgcttaactttatcgcatttcctaaattgccctcgtcaccactttcacactctctctctccctatggccaccgtcgcgcttcttaggtctctccgccgccgtgaactccacgcagctcacatctctgcatataaattcgtaagaaatgatccttaatctcgttcctttcgcaggtatctaattagcttgaaatcacagttttatctttccttttcttttttcgcagagttctgctagcgccggcgggaggacgacggagctccgactacacggagtcaaagatatcatcgccgttgcgtctggtaaaggcggagttggaaagtcttcaacagctggtacattttggaaccttcttcagttttacgtctctcctaaacattggtctttgagattgaaattgataatgtgagaaaatctgtgaattttgtggttaatgtagtaaacttagctgttgcattggccaacaaatgtgagctgaagattggattgcttgatgcggatgtatatggaccatctgttcctatcatgatgaatatcaatcaaaagcctcaagttaaccaaggtaagatacatagatagatgcctcttgcattttagattaggcgtttcatgtatctatttgcatcatttgaagtacttctgtttttgaagatatgaagatgattccagttgagaactatggagttaaatgcatgtcaatgggacttcttgttgaaaaagatgcaccacttgtctggagaggtcctatggtgtgttaatttgttacatccttccttctagagtttatgtgaccacaaaaagatttcgtttggtaatcaagctttgtggtattgctacaggtaatgagtgctcttgctaagatgacaaaaggagttgattggggagatcttgatattctcgttgttgatatgccacctggaaccggtgatgctcaaatctccatatcccaaaacctgaaactctcgggtatatatacatatctcgttgtgtttttatgatagaaacatattgtgtagttatcagaatgtggctttgttgtttctaggtgctgtaattgtatcaactccacaagatgttgcgcttgctgatgctaatagaggaatctccatgttcgacaaagttagagtacctgtatggtcatcttctttgtgatagttgactgcttcggagcatatattttgctgtagcttcttaacctttctgcatttatatactagattttgggacttgtagagaacatgagttgcttcgtttgtcctcactgtaatgaaccttctttcatatttgggaaagaaggagcacgccgcactgctgcaaagaagggtttgaaacttatcggtgaggtaaataatcaaagccagaaccgattgttttttgcgattttgaatgctttgaagacccttatgccttacataaaataatactatttggttgtctatatagattccactggaaatgtcgataagagaaggttctgatgaaggtgttcctgtagttgtttcttcaccgggttctatagtgtcaaaagcttatcaagatctagctcaaaacgtggtgaaaggactcaaggagctaagagagaatccagataatgagattcagatgaagctaaatgttcctcattctagccactcatcatagaacaaacacttatatatgaccaaagttttgtcttgctgcctcactttctcatatttttgtaccaaagagaatgtttgcaaagagaagaatgtaatttgctgatgataaaagcaatagagccagtcactgtttatgaaccatgtgaaacagcagatcaatgtggttactttcatatattagataggaagatgatgaattttaaaccagacatgtagagatcactatatagtaatgtcaaaattttgaagaagaaacaaatacattcgtttttctgagtaaaataaaacatgttgagatcacttcacaatgtaagatgtgatcaccaaattaccccttcatcatcttcttcatcgtcatctagatcttcaaattcaagattctcattgccgtagcattcttcgtttcctctatacgcatcttcattactgtaatcctcattccagtctggttcttctgcttcttcttcttcttcttcagaatactgagatttcaaaaggctttcttcactgttttgctttgaatattctatttggtcaccaacaacaactggtttatctagctttgccctcttgggagagttctcctacaaagatgtgaatacacataataaacataagagactaagcagagaaataagaggtccattctatcaccaaaaagcagatatctctgacactttgtattcttgcataaaagataatttacaaattggaaagaggggaaaacttacaggatcaaatagcttatccaagacattgtaattgatttccaaactcggtctctgcatgaattaagacaagtaagagaatttttcagataaataaatttaactacagatgaaaaataaggaagatccaaataaatccgaaaggaaagaaatgcaatagtctagacattgtttcagagagtgagctgaagtaatggtatcactgacctttttattttcagtttctgcattgctttcggttttggttgcagaagttttcttactaggagcaatcttattagcaggatccttctttttcctagtggtgactttcctatattttccctgataaacaatcgttaacaagaacgtcaatgaaagcatgcgaggaacaacatgaagttcacttaaacagaaattaagaagattgaagaagacaggttaagagtaaaaaccttctggtattcagggttcatcaattcccatgctctcttcttcagaatgaattccttattattacttagattctcagcaacctgatgagcagcaataataaccatcaaaatcagaacaagtatacataaattgtttttgttcagaagctaaacaagaagacatagacaagaaaggcaaagcacaagaaaatagttttgactaggttatatggtcggagttcagtgaaaccaaacgcgtgatggacttacatgttaagaaaaatgctggttcgccacaatccaggaacaattgttgtggtttatagagactaaaaaccatagatgggattcaaattagataaacatccacaagaacaaaattataccatccttaagaaaggccgagagatgctagctacgataagcatcagttaatcattatttattttacctcagcatcactgatatcagataagtcctctgcaagatcacctttagactgtcgagaaggaaaaactcctgaaaaatcaaatcacatcaccatttaagtatttaccggaaaataaaagatatcatctgcataatctttaacaatataacactcatggagaggggtctttgcattacctttgttgccatatacttttaggtttctagccaataactttactgatttctccacctgaaattgatacaccaacgatcaaaaacattcaaaacatagcttctcaacaaaaaagagcagattgataccatcaaacaaagttcctcataagtaatggaatctatagttttgtcatcgagccaatatcaataccacaaagagaccacatatggtaaactaagtttcttattacattaccatgatcacaaagctctaaaatttaatctagaatcagatcaaaatccgaataaggagggagaaaattttaccattgttcacgaacccaatgcggcaaagatagatcgccggtgagaatctgggttttaaaataaaaaaatatcagaaacctagaacgcctgggtttgaattaacacgtgtcctagtcaaattggttataggctttgccacgtaagcacagacccttttgataataagatatttatatttgtaccctctttaatatcaaaatcttcgattttcccccaaaaagaaaatttccagaaaacgagcgtagtggtggtgaatcactgactcttctctctttcgctcgtcgctgcgaaagagcatttgttttcgtttacgcgtttctttttctcgttgagtgcatttgttctaggtaaagtaacaatcttttcttctgctatatccgaattgatgatttttttttttgggtcggtgaatttttgctacgcaaattttgttttcttttcctttccgagtcatggcatatgcattgtttcatgaatttttcaccattcgttcatcgaaatttacaatctttaccttttgtttgatgaaaattttcattgctcagacttattctttttttctctgttttgtttgaaaccatttccccttgtaatgcgtctgtttcaatgttgatgtctgttcttcagtatcttgttaaggtttacaacaatctaacagcattacaatttactctgttttttttttccagaatttgtgtattagtctaagaagatcattactgtttacataccaccaatggatgaagcattgaatgagaatgcttctggcagtgagagcgatgcttcgtcagtcgcgagcaatctccatgatgatgagattatcccttggttcttttcaagagaagagatcgaaagaaactcaccgtcaaggcgagatggtattgatttgaagactgaaactcgcctacgcgactcatactgtacatttttggaaatactcggcgaaagattgaaagtgtaagtttcttttttcttacctgcgtttgttatgctgcttagttctttcttgagttggtatttcgtaaacttccaccatcttagggacattaatactcttttgacatataagctttggtctgctaattcgatagtgtgatgtactgcagtcaattagggacattgatactctaagttagtttacttttacttttagcatgagatttgtacatccttgtatcttgatatctttattaacatgaatcttaggagctaaaagccattaagggcatacttattcccaagttgtcttcattgtcatagttccatctatatgtatgaagcttttcgttttttggatgaatgttagctgatatgaatttctcaacgcagtccccaggtaacaatagccactgctatatttttctgtcaccgattcttccttcgtcaatcacatgcgaaaaatgacagacaggtgagtttggttggatgtgaaaaaatggtcactaaggaagtatatgtcttttttcctctgttgttttgagtgaaactatgagtctattagctgtctggtgatttaaaccatcctggcttcttgagattcatctattgatatccatctatgtgtcatcttctttactagttctagtcaaagcgtattagttgattgatcagatgagtctacctgattttattcacgataaaactgtctgtgatagagatcaagctctctgtttcttcccgtttggatcgatgtgtatggttagtaaatttttgtgcttgttttgcgatgattgtattcttcttgaaaagtaagaacaactagactagtacttatgcctttgcctgttacatttgctctccagacgattgcaacagtctgcatgctcctagctgggaaggttgaggaaactccagtgacattagaagacgttattattgcctcatatgagagaatacacaagaaggatcttgctggtgctcagagaaaggttttttcttcttttcatactaccgatcctacaactctccttgtccatttctttgttgactagtttagtaggtcttgaaaagatctattgtttactttcttttgcatattaatgttatttcacttttgcaggaagtatatgaccaacagaaagagcttgtattaatcggagaggagcttgttctttctacattgaactttgatctctgtattagccacccttataaacctcttgtagaagcaattaagaaatatatggttgaagatgctaagacccaacttgcccaatttgcatggaattttgtcaacgattggtatgcttgattatgttacttgaaagctttttgaattatgatggttctctatacgccttgtgttttccttcttcatacaatcacaagtctattgcagtctgcgaacgacactctgcctgcagtatcagcctcatcacatagcggcaggtgctattctccttgctgctgagctgccaacagtggacttacaatcttacagagaggtcttgtgtcaagagtttgatatcacaccttgtcaattagaaggtatgtgttagcttttttcttttcttaaaaattattgactttgatgactgtagaccttgttgatgtggttaatttatcatttgcgttttcagatatccgaggccaaatacttgagctttatgagagaattcctacatctcaagaaagcaaagttgaaagtagtggtggtgtggccgtagtgcatcaacctatatctagagatatggcttccacagagaagtgtccaagttctgatattgaaggaggctcatcgcaagtcaatctaagccagagcgatgatcattcagtccacgatgggtctaggtctgaaggaattggagaggtgaactcagaaagtgaagctcaaaagaatctacaggaccattctgttggtaatataatggttgagaaaagtgatgatgttggggtcgtccaattgaagaaagacttgcaactgcatcaagaggaggttgagtctaaacaagagaaagataagaagtcatttgaaaaagatataacgaaaatagatttgatggatgagaaggatttgactgaaagtgaagtagaagatgagattaacaaaacaatgcagacaggaagacaaatctttatgaaagttgaggaccctgatgacaacatgactgtcgaacacagtgagattcgaaatgcaaacaactcaggtgttgatgatgaattggtggctgatacttgtctgataaatgacagtgatttgtaggaaatggtcgttgaagatggtgaaatagtggtttagatgtttagctcagaagctttcgaagagaaccagttttggtcctgagaagagctttttaactaggtgagttttggagagacaactattatatgttttctccaaaagacgaaggtttagtttcaagatttgtggtagatcatgactttgaatcttttctcactcttaagacttttaactacagtggaacgagagcaagttctccttgcatcgtcaatgtgttgtgtaatgtcctaaagttctcttaaacattgtggtatagtttcaagatttgtggtagatccttttcattcaagtaaattgggtttcatgacttcgaatccttgcttttctctgttttgaacaactgtttaactccaactaccaatggaattagattgaacttggatagagacataagataagtcccttgcaagatcaccatcaaacaaagatgctcatggcagtatccataccacaaaagacaccaaatttgttgaacatgcttaaatctttactgcacagattctgatgactatcttctctaatcacagccacacaattcaagaaaattcaaacgtttgttgtatacaatttgtttaggcctgaagtaattggagaggagaagtcagaaagtgaagctggagatataattgtagaggcaagaggagaagtcactgcactaataaatttttccttttttttccactaactaataaaaattccttttttcccgccataagcgtgacgtctattacacgcgtcactcgtctagtggtttatagaaatgtaaaaaaggaaatcaaatcttcgtttagtaaaaaaggaaaatcaacctataaattactgaattgtatttgtaaatcaataaagtaaattcaattttaccgtcttttaatttcttcctcttctctcgtctctctcacgcgacgtttctagggttcttctgcttatctggagattttgcataaactttctttaatgggtattgttttatccaccgaatcgttgctaatctgtttctgatttcgtgtgattattcgttctgtgaattcctgtttagattctgtaaacaaatccactgaacgcttttttttttgtcgtttccttctctgaagaaactctatcaacgacatggaatctaacaaggaagaagcgaaaagagcattggatattgctgagaagaaactatcaaagaatgattacaacagagcgaaaagatatgctaagaaggctcatcgtatgtatccaaatctcgttggtttggaacaagtgttgataatgatcgatgtttatatctctgcaacaaacaagatcaacggagaagctgattggtacagagttctcggtgttgatcctttagctgatgatgaagctgtgaagaaacgttacaggaagttagctcttttgcttcatcctgacaaaaacaggtttactggtgctgaaggtgcgtttaagttgattctagaagcttgggatctattgtctgataaatctcagagaagttcttatgatcagaagaggaaatcgaatcaagttaaacagagaacgagtggaatgcagaagcctaagagaagttctacgcctaaaccaacagagtcagacaagccagcttcttcttatggacctacgcctccacctgagcctaggcctaagcgtaggcctagacctaatatacctgagcctgatattcctatgcctatgcctactaggcataaacctaagtctaagcctgatatttcattgacaacggtgaaagttggaaccttttggacggtttgcaatagatgcaagacgtattgtgagtttatgagggctagttgtcttaataagactgtaccttgtccaaactgcggtaagtatttcattgcaaccgtgataccttcagagttagtcaatgggaggctagtcatcagattgagtccttgtaatcagtcaacatggaaaaaagcaagtgatgatacttcttcaacttcagcaatggcaaagactgtacccgaaagagttaaaagatggtttgaccctatgcctgagatggattcttcaacgcaaaaaattggtacgttttggacagtgtgcagtagatgcaagacacattgtaagttggtgagggctaatcatcttaacaagaccttcccttgtcctaactgcagtcaggaatttgttgcggccgagatgattatagaggtaatcaatgggggtccagtcataaaattgagtccctctgtgcagtcaaatagcaaaaggacacgtgatgcttcttccacaacctcagcatctgataaggcacagaggactgcatatcaaaaagaagaagttttgaaaagagaaaagattgatcctgatgttgcgtctgctgctactggagaaaatgtaaaagtagcagagacccttttcaaggagccgatgacaacaggaaacgaaaactctactactgaagaaggaattgtaaaagaatcagagaccctttgcaaggagccgatgacaacaggaaatgaaaactctactactgaagaaggaaatgtaaaagaagcagagacctttttcgaggagccgatgacaacaggcaatgtaaaagaagtagagacccttttcgaggagccgatgacaacagacaatgaaaactctactcctgaagcagagaggcttttcaagaagccgatgtctacaggagacgaaaactctactcatgaagctcaaaggcttttcaagaagccgatgacaacaggaaatgcaaactctaatcttgaagcgcagagatgctttttgaggatatggcaacgggaaatgcaatctctactcttaaagtagagagaacacatgatagatgtgatataagaagtaagacatttggatgtagaagttaatatatatctgcttttgttttttggtatgcatcagtaatagttttttatttgatttttgaaacatgaatttacgacttaaccttttgattgaaatctatttctttttcattgaaatcattcatctcaatctgctgctaccgaatgcttctctgctcattctccacttatcataaaggctctttcttcttatgttcactctcataattcatataatgaactacacagaattgggattataacattttgttgaagttgaattccttgactgaatctgcacaaagaaaattaagcttgggtgagaagagatgaagaaaagataagaagtagttaaagctagaatattaagtgtgtgaatgtgtatcaagtggtgaaagacaaactatatgtatgtgcgtgaggacttgtaacaatctatatctatccttgtgatccaatattatcatttatcaatgtagaagattaaagtaaagtggttatcttgttttctatctccattaaacgaacaaaacaaagtgttagagatagagagaaacagagaactaacctctaaagagtaaaacagaggttaggatgtgagaatgtcaacacattttacttgagattttatagttagagaatgaagtggcttaattaccatattttagttgtgattgcatgtcttcacttgaaatagtaagttttaatactgaatgattacatacatattcaccgagctgataaagtttccttttttccatccatcaagaaaataagcgttacgtgtcagacacgccctagtggttataaaaaatctacattcaataaaaatcaaatcttctttcagtaaaagcaaaatcaacctataaataaattacttaatagttaataccaaaccattattttacgtctttcaatatcttcctcttctctcgtctgtctctcgcggcggctctagggttcttccgcttaactcgagattttgcaaacactttctttatgggtattgttatattcaccgaattgttgcatatctgtttctgattttgtgtaatatttcctggattttttttttgaaactctgttattttgtctgttgcttctttgattgtttatgtagaggaagaaactctttcaacgacatggactgtaataaggaagaagccaaaaaagcaatggatattgccgagaagaaactttcgaagaatgattacgatggagctaaaacattcatcagcaaggctcaggctttgtatccaaagctcgatggtttggaacaagtggtgatgatgatcgatgtttatatctctgcatcaaacaaaatcaacggagaagctgattggtatgggattctcggtatagatcctttagctgatgaggaagcagtgaagaaacaatacaagaagttggctcttttgcttcatccagacaagaacaggtttaatggcgcggaaggcgcgtttaagcttgtgcgacacgctagggatttattatctgaccagccttgcctaatttacaatgtgtattgcacttattgtttttgcacactgtccaaaaggtaatgtcttcctcctgtttccgtggtttcttctctttccatgaagaatcaggttcagggtcagactcagactcagaagagtcagaatcacactcgtacgcgtacttgtgtggcttacgatcataagagaaaaccaaaacaagttaaacggaagaggagcagaacgcaggatccaccaaagccacacaagtacaaatataagtacgagttccggaaaaggaacagaatgcataagccacacgagtacgcttacgagtatacttctgactcttctgagtctgaccctgaacctgattcttcatggaaacagaagaaaccacgaaaacaggaggaagacattaccttttggacagtgtgcaaaaacaataagtgcaatacacattgtaaattaggcaaggctggttatcttaacaagaccttgcattgtccaaactgccgtcaagaattcgttgcgacagaggtaattccagagatgaaatatgggaggccagtctacagctttaatgctaaatttcaaccaacaagcaaaagcacaagtgatgcttcttcttcttctacaacttcaacatctgataccgcaaatgaagcacaagatagagagtcgtcacaagaagagtttgttcctgctaatgcttcacctgctgctagaggagatgcaaacgaagcatagaggctttttaacaaggtgatgacaacaagaaatgcaaactctactctcgaagcatagaggcttttcaagtaacctatgacaaatgcgaaaataataagtaagacatgaggacttagcactctatatctctattttttattttgtgtgtcattgatagttttattttattttgatcttatgaaacttggatttacagtaatggagacacttctctttgctataaaggtaagagactgatacatcattcttttttaatttcttttcttagcttgaaaacttctaataatgatttggatcaataggtttttgaacagctaatatcattggcatcggtattggatcaatagtactacactgcactatttaaagtaaaagcattgatgttggttaaaggtgttgtctatgtgctgtgcaattgaaagtagagtaaaggcttagattttgattttgaccgtgtgcaatagctgccagacatgttttgaatatgcaaggatattttatctttaacaagaccttgccgtgtcaaaactgcgggcaagatttcgtttcgaccgagatcactccagagatggtcaatgggaggcaagacatcagactcagtactaattttcagtttacaagaaaaagagaaagtgatgcttcttctacaacttcagcatctgatagggcataggctgaaaaacaagcacaagaaacaataaaaaacatagtttgaggagtcacgaaaaaagcttgatgctgctattgctgctgctagaggaaatgcaaactctgctacatttggagaagagagactttccaagaaaccgatgaaaaactctactttcgaagaagaaaggtttatgagaactcaaaagttagtaaaacaaaagacaaatggtttatgagaagaactgaaactactaaaagaatgacgaaagtcagagagagggaaaagagaaaagaaggcgggaaagggagagaggaaaataactactacactaatagtttcccttttccgtccctaaagtctaaaattatttttatgtttgccccaattgtttttaacaaactcgaaaataacccttttgtttctagtcaaaaattacaatttttacacactggatccttcttctttaatttttcgcttctccaccgtttagggcattctgttattcaatcgcacaatgttgcttggttaagaagtgggtctccatcaaaaactgggcttttacacttattggtaagatgattttgctttgcacaagaatcccaaaagtttcttccttctatgggttttgtgtagtgtcggaatcttcaaatctattttgtaattcgtacgattactttgttgctttatatacagtaacttgagaaatctagggcttgttcttttgacttggtgatttgcatgtatggttttgcctataattaagatgttacttactagtttacacgagattcttctttttatgaattgtttttatccattcttcgattgttgtttgtgaaattgtgattgattatgtgtaattatgtagtggctttggatagagtaacttcagattcagagatctgtggctaaggacttgtttttctaacttagtgattttcatttacggttttgcttctgtttttcatccttcttaatcctttttcttttggctcctccaattggttttccatagagacaaggtgcaaaatcgtttgaaggattctttgttcaacaaagatatggaatgcaacaaggaggaagctataagagcaatggatattgctaagaggaaagttgcagagaatgattacaacggggctaagctttttgctaacaaggctcaggatttgtatccgaaacttgatggtttaagacaagtgatgatgttgatcgatgtgtatatctcagcaggaaatacaattagtggaggagaatctgattggtatggaattcttggtgttgatcctttggctgatgaggaagtagtgaagaaacagtataagaggctagctcttttgcttcatcctgacaagaacaattgtgaaggcgcagagggtgcgtttaagcttgtgttagctgcttggtgtttgttatctgataaggttaagagaattgcttatgatcagaagaggaagttgaacgaagttaaaccgaaaaggagtcgaaagcagaaacaacctccaaagaaaccaccaaatcagccgaaacaacaaccaaatcagcagaaacaaccaccagatcagcagaagcagccaccaaatcagcctagacagccaccaaaccagcagaagcaaccacaaaacgagccgaaacaaccaccaaaccagcctaaacaaccaccaaatcaagcaagtactaatggtagagctagaagcaaaaagcccacttccaaagtttctatcttttggacaatgtgcaacaaatgcgagacacaatatgagtatgtgagggtttattatcttaacaagaccgtactttgccgaaattgccgtgggaattttaaggcaactgagatagagaaaacaccaactgagaaggaaaaaacaccaactgagaaagaggaaacaccacaagcaacaaacaagaacacaaatggtgcttcgtcttcttgtgatagagattcttcactaaatgttaattttgattctagttttcgacgggattcttctttatcaagaatgagttactttaacagtggaaatgtggcaaatcaagcagaagaaagagggaaaagagaggtaagggagtcagaagaagaagctggtagaggaattgcaaactctgatttgaaagtagaagagagagtttttaagaagctgaggacagataactatgcagagtcaagtagtgaaatcaaggtgtgaagtaagctgaggacagataattagaagtttaacagtgaagtaggaactatgacatttagaagtttaacaatcaatgattttatgattatgatatttgaatattttgcatctagactaggatcttgtacagtggaaccaggttagttcttcttcctgtcatcttcaatgttgaatctgaaatgtcaaagctttattttatttttgttaacaatgtgtgctttaacaacgtgagtcaaattaatcaaagtgggttcacttaaattgttggaagaaattttacttccactaactaaatatttccttcttcggtcccttcattctcaaaagtttttacttttgtccccaaatattttaacggagaagatttagtctcctacttcgggtcatcatatatcacttgaaaatcgggatattcgttaaaaatcccccttttttttttttcttttcttgcttcctccctttttttttttttttgttctttcctttctcgcgtttcttctcctagggttagggttcgacgaacgcagctgttccacgcgtttagtttcaattctccatcgaagaagccataatccggtgcgtaatcatcgtttttgttatatgtttccgattaggtgtattattttccgtttgttttctcgggtttggtagtttcacgaacttttgcatctctcagatctattgtacgttttttccttcgtttgtgacggatttttctgtgaaaagagtttaaatttccatggagaattactcgattatctctaatttaactctttggcaatcaaatttttcgattttattgtttttttctggatgcgtgagcttagttatgaacaaggagggtcaactcgtttacatgattctctattcacagtattttcgtgggaaaggagcaattatgtttttgttttcatgattcatgtctttatgttgcatattttggccccttttactctcatttagactatgtggtgtttgttttgatgccattgttttgattttccatcaattagtaattttttcagtccgaatttcaattcttcgtcattgaccttgttgatgattcctgtgctttcagattcctaaagagcttacatttgttactcaactttaaagttttgacgctagagattactatcctcttgctgggaactcaacgtgaccaggtataaatctcagctcatagataagcaaagtagtttttttctacatctcttagatttgtaccctttttagctcacagtatcagttcaataaccaagctgatccctcttatgaacttacattcattggttctgtttttgctagactgtgtttgaaagatagcaatggctggagtattagctggggattgttcattcggtgagagtggtgtttcatcttactccaggaattccaatgaaaagcaggacgaggttgcccgctggtattttggaagaaaagaaattgaagaaaattcaccttcaaggttggatagtattgacttaaagaaggaaacatacctccgcaagtcatactgtacatttttgcaggatttaggcatgagattaaaagtgtaagtataaatttctgacctatatatttcagctttatacattgcattttccatttgattacttcttgcgagcttggtctaggacatgctagtttctcctaccatgataattgcctctattttgcttatagtattatagtgaattcttgatccccttacattaggttctgtaggatcgaattttgaaatttatagaacttgatatcgtagaggtcattagagcatgaataagctagtcagagttattgccttattggcaacaaaaaggtgaaacttgtgggttcatcttgtgttgtatggcccaatagtcctttaatggctttctgaaatttagtatatagtgatgaacacaatactctgaatttatcttcatattgacatggtttcatttgcactgatagctttcacttttggctctctcaatgaacgcggctaatatatttttctaatacagtcctcaggttacaatagctaccgcaattatcttctgtcatcgattcttcattcgccagtcacatgctaggaatgacagaagggtgagtatatattctttgcacatggcgttgtgaatacttatatacatgggcctactgtttgttgttcgagccagtctgctgctatctttgtttgcatgtatttgaagcattaaatggctccttttccttgcgtccgcttatattcattgtctccatgtctctgccagtttcctttgtatatatatagagagagcaaatcggctgatgcattagatgaatatacactgacttctcgcgaatattcctgccatgaatattaagcgttctcttagtctatttggttaatgcatctagttctttgtccatatttatccttctagaaactagcgcagaacagtattaagattattactgagtcctttttccatgttgtcctccctcctcacccagacgattgctacagtctgcatgttccttgcgggaaaagtggaagaaactcctaggccgttaaaagatgttattgttgtctcctatgagataatacacaagaaggatcctactactgcacagaaaatcaagcaaaaggtctgaatattctaaactttctctaatccggtttcctgtttagtaataagcgaatttgcactgtttctcgcatattctattttactatgacataagttttctactaaacccaggattgcacttgtttgtgaacaatcctcctatgatcattgtccttgtcgttggatctctcatctgtgctggtcaccgtctctattatttctcttctttgtactgaacgtatttcacttttgcaggaagtatatgagcaacaaaaagagcttatactaaatggagaaaagattgtactttctacgctgggatttgacttcaatgtttatcatccttataagcctcttgtagaagcgataaagaaatttaaggtcgcacagaatgctctggcccaagttgcatggaattttgttaacgatgggtacgttaaaagtctgtttccttgaaagcttcagatagatctatctgtcttgtattttcttcttcatacaatgaaaagatgcttgcagtctgcggacgtcactctgcctgcaatttaagcctcaccacattgcggcgggagcaatttttcttgctgcgaagttccttaaagtgaaattaccatcagatggagagaaggtctggtggcaagaatttgatgtcacacctcgacaactagagggtgagagaactatctttatctttgaattaattttatgaaactgtttccactttttctgtttgacttgtatgccttattttgcatctgatgctaagagctactcccttatgtatactgcagatgttagcaaccaaatgcttgagctctatgagcaaaaccgtgttcctgcatctcaagtaagcgaagtcgaaagtagtgtaggtggaggatcagctcatcatgttgggtctaggccatcagcacgtctaactcatgaacattcaaattctgataatctcgggggctcgacaaaagctacacaaaaccggagcaatgataatgggagtggtgaggcaggtagtgtcatcaccgagcagaagggggaaagagatacagaaacgaaagatagcatgcatactgaaagtcatccagcccataagtctagatcgggagttgaggcacctggggaggataaaatagagaaagcaggtgcacattttccagaagatgataaatctagaattgttggtacagctgatgtcacggtcagccaatccccaaaagacataaaaatgtttagagataaggtgaaggccaaactagaggcgaagaaggtccaaggtgaaaagacgagaaagaaggatttggtggatgaggatgatttgatagaaagagaactggaagacgtggaattagctgttgaggatgacaaagatatacaaaacaaaagctccatgggtacagaacatggcgagattcttgatggaaacaacttggtggtcaataccgaggaaggtgaaatgatagatgatgtttcttcaacaatgcctagccggaagagaaaaatggaaagtccttgtgaaaaacagttaggagaaggaaagagacgacacgacaacagtgagaatgtggaagaaggtcagaagacaaacccaggaggaagtagtcatagttatggtgacagagagccaagaagacactcccaagagaggtagatgatcaaaaccttctcatggtctattagagacatttcccaaccatgatgcgaaatgagtccactgtatttacaatgttggttatcttttcattttccttggcacttgtattcaacagttgagaaactaaatcaggtttccatccatcccataggatttagggtctctataattttgatctttgttagcattcccttttgtatatcgggggaataaaaaagaattttgacgaatttatttagagccaagacaatattagtgttttgtcattcattgccgaaggatgttttgataataacaatatgaaacagagtggtcaattgatttgtcaatgtgtagttgtttttgtaaggtttgttttatgttaagtccactcgtaaccttgttcccattgtcattatactgcttttcgtatgtatcggttagcttggtgaccaatccggttaaccacaaaatcaggcggaatagttgtcaaattaaagagcaaaaaagactcatgaaaaagagctgtaggggttttcattttttcaattcgttttcaaaattttcaggtttaaaaataaatacaggtctgaattaattcgctcggtttgaattttcgggtttagtccagtgtgatttagtcggttaagttgctcaaaattttggatttggttcggtttattcattatcaaacacaaaaacacaaaaaaagccaacctaaagaaggaacaacaaaagacctaaaaaccctctcgtcttctcttcttcttcttcttcttctccttgctctctcttgtcgtcggcggcagattatccaatcgttaggctatcgttccgacactctacagtcattacaaacatttcaatacaacaaaaactcatccttttcttctcttattaaccataatttcggattccctttctaagtatacagctttcccagaacgagctcttgcaaagccaaagaatgtaagtatttgtttctttagggttttagcgaattcaatcttagtaagtcatcttcttcttttttcgacctttgtataattgcaggtcgaggatttgtgttaagaatttgccaaaacatgtgaaagaggatcaacttcgagatcacttttcacagaaaggagaaatcactgacgccaaattgatgcgttccaagtatacttctactactctatcaaactccattgttctcgcaactaaattttgtacttttattgattgttttaatctgaatcacactctgttttttttggtgtgctttttgcagtgatggtaagagtagacaatttggttttattggattccgtagtgctcaagaagctcaacaagctattaagtacttcaacaatacttatcttggtacttctcttatcattgttgaggtttgtacttaaaactttgacactctgttttaacttctttactagttaggaactctgatttagactttcatttggcttatagattgctcacaaagttggagatgagaatgctcctcgtccgtggagtcgtctttcacataagaaagaagaggaagctaaaaaatcttctagtgaaggcttaaaagatggtaatgctaaaggaggtaaaaagaggaaagcagaggttgatgatcctgaatttcaagaatttcttgaggttcatcagaggagtaagtcgaaaatctggtctaatgacatgtcgattcctcctgctcctgaagaaaccggtaaagagaaggtcttggtgaagaaagcagatgagcaaatagtttccaatggtgttgagcctaagaaagctaaaaaatcatctgatactgaaaagactaaaaagagcaaagttgttgctgccagtgatgatgtttctgatatggaatacttcaagagtaggattaagaaaaatctgtctgattcggagagtgataatgaatctgaggatagtagtgaagatgaagctggtgatgatgatggtaaagctgagacagatggtcaggatgctgatattcgttattttcctattgatggcgatgttgaagctggcggagttggtaaagatgatgatggcgatgccatggaagtagaaggtgatggcaaggtggctcaagaatcgaaagctgtcagtgatgatgttcttgacactggtcgccttttcgtccgtaacctgccttacactgcaacgtactagatcttcttgttcatctcatacacttgttttctgtttatctttctgttattcatcttatacatctctgattgttgtcaataatctcatgcaatagagaagaagagcttatggaacattttagcacattcggtaagatatcagaagtccatcttgttcttgacaaggagacaaaaaggtccaggggaattgcctacatcctttacctgattccggaatgtgcggcaaggtattatttatgtcaaaaagtagttttattactgctggtaaccccttgaggtctaagtgcatgcttttcaagaagtagccttgtgttgagctctagctgttagttcaggttttaaaacatttgatggtgatgcagggcaatggaggaattagataactcaagttttcagggccggttgttgcatattttgccagctaagcaccgtgaaacatctgataaacaagtgtcagtggcctaccctttctaagttttggtcttccaacttgtaaattttttttggactagcttttctgttagttgtttaacatggcctttttcaacaggaatgacacttctaacctgccaaaaacattcaagcagaagagagaggaacaaagaaaggcatctgaagctggtggagatacaaaggcttggaatagtttattcatgcgacccgatactgtacgtttttcctgtttaaagaatgcatcctttagtgttttttaaatatagcttgcttcatgttttttttcttttcctttttgtgttgtagattctagaaaacatagtcagggtgtatggtgtaagcaagagtgagttacttgaccgtgaagctgaagatcctgctgtacgccttgctttgggagaaacaaaagtgattgcggagaccaaagaagcccttgcgaaagctggagtaaatgttacttctttggaaaaatttgctacaaggaatggtgatgagaaaaaccgaagcaaacatatcctcttagtaaagaatttgccatttgcttccactgaaaaggaactggctcaaatgtttggaaaatttggaagtctagacaaaattatcctccctccgacgaagacgatggccttggtacttttctttccatgtgtcctacgtcagtatattggacgaatagttaattgctctctaacctgcccttaattacatgacctgcaggctgtgtttctggagccggctgaggcacgcgcagctcttaagggaatggcatacaagcgttacaagtaagctttaaaattaactttaatgtttactaaatcaggaggggaagaacaacttctgtattaatgtctaaaatccgtttgtctttccctaaagtgcttcttggagataaatgaccatgctagttaaaactaaactacttcatcacattttcctattatcacagagatgctcccttgtatctggagtgggctcctggaaatattcttgagccaaaaaatcttcctgacaccaatgaagagagaagtgacattgaagaaaatggcgtgagaagagtcaacttggagcagcaggttgaaatcgatccagatgtaactgaggtatgtccagttatggtagctgtgaacgttttgaaatcatatgttttttttctgtttgagtggatactagctatcagaactgaaaggtagttgagaaaatcttgattagcttaggaaactaaattggatattagtcttacctcgtggggctatatgcgggtttagtactatctatataatttctgttcattaaatttatgtatatagatttttttttttttctgatccattttgtagacaaagaaagttgcatatgtatctttgaattggtatgttcgtaacatatcctttaaataatgcgttatatttcagtcaaatgtccttaatgttaagaatctgagcttcaagacaactgatgagggtttgaagaagcatttcactaaactggtgaagcagggaaagattctcagtgtcacggtaagttgttgttcattactgacatatggtcttaactgtgagagtctgttttaataatctattattttccattctaaacagataataaagcataaaaagaatgagaagtatctttcaagcggttatggttttgtagaattcgactctgtagagacagccaccagtgtctacagagatctacaggtatataatagttaagtctctttgcatatgtatattttaaagttgattggacttgatggagtagagtggcactttcttctttggcaggggactgttctggatgggcatgctttgatcttgagattctgtgaaaacaagcggagtgacaaggttggaaaagattcaaacaaggacaaaccttgtacaaagttacatgtgaaaaatatagcttttgaggcaaccaagagagaactaagacagctattcagtccatttggacaggtatgcacttatctttaggatagagtgatgttatgggcacagcttattagttctatgttacaaaccatgaacacatactgttattctcgtatactggtcttatgtgtgtaaaaattctttttgttagagaaactacatgggtatgaaacatctgacaacattcctgttgtttatgcagatcaagagtatgaggcttccaaagaagaatatcgggcaatatgctggttatgcttttgttgaatttgtgacaaagcaagaagccttaaacgctaaaaaagcattagccagcacccatttctacggacgccatttggtaagtcttatgttgtgcgcttgtctctcccaagccagatatcctttatttatccattctctttgactgtccatttcaggtgctcgagtgggctaacgatgacaatagcatggaagcgatcaggaagcgttctgctgctaagtttgacgaagaaaacgataatgcaaggaaaaggaaaagctcgaaagctgttgaaggcaaaaatgaagtttgagagaataatagctatagtttgtattgactgacccatggtgttataagtcgcttactgtgattctccatggttgaaattttgttatctactgttatatacagtacagatatttcgttcaacagtttataaaaaacttttcattgctattaattttgtccctttattttttacacaagaaaatatataattatactacttaataactttccaatacaagcaaaagtaatcaattcaaatgtaatccaacaagatcatactttacaattactatagtttgttttagtggtcctctcgctacagagttgatatcccctctttcccacgatgcatgataaaagacaccacacatttttttttttggtcaaaagaaagaacacacatatcccatgatttgattataataataaagacaaaaaataggctaaaaccggggagataaaataacatttgcatgtccttaaatctaggagaacacaccatttaggttttaaacaaacataattatgttaacacaaacataaaaacacacataggtttcaaacagacatagatctaagttaacacagccataaacataaatcgtttacacaaccataaaatgagatacagctgtatatctcattcatcatcgtcttcttcttcatctgttgttgttatgcaatcataagcttcatacatgacacggtcaataagcctatcacaagaactcacctcagatctgatgatggtgagagtacgaaatgcctcactagcttcggtggtaggaagagggtgcaaagcacttagatagtcctcaagggcatgattcttcaaaaacttaagaagttttttcgcattgtctctatgctctgctcggagtcgtcggctttaggttgaaccactgtatcatcaacggctaggccctcttccatcagacttgagtttaacgccaagatgcatttgctgaggcatctgatcatagccctcacttcatctctagtggtagtctacaaaaacctaaacaaacacacacacatatacaaaatgaactctttcttagtcaaatgtactacttacagttcttttgataaatggtttcacatctcgaattagtttcttggcaaaagcttcagtttcttctgtcaaagtgtccttcaatgtttctacatcagggagaggaggaggagatgttacactttcagcagaaatgtcaggaaaatctgaatcatcagagctcgacatactgcattttgagtttggaactctccaaccctaattttatatatatatacactgtacactactataaccaattgctctattcttttcatgtgatatgggcctttttacttgtttttgggcttccataaaactttgcttgttcccttttgtttcatttattctataaccaacatatcttccacacacaaaaaaaaagactttagaatattcgacaatgatcgctagtaaataagacgacaaatctctatagtatttttagaaggatttcttggcgggtggggcaaagtcggtcggatcttctcggagccccatcggtttgtattttttgttcatgaaaattttacttgtgttttcacgcccgacccggaccgcccggtccgaccttgaaccgtgactcgaatactttttcggtttgggtttagtgctaaaacccgacaagttcaaaaccataaaaatccacaaaaactcaccattaactcgtgactcggtgaaccggttgaaccgaccagggatcggttttacaaaattctcttgattttagaataaaatatgagattttagactttattcaatcatttttagaaaaaatttcagttcttaaactcatttgatgaagacttcacaatgccgccttaaaaatgaatcgaatggtgagtgaaacatgcgatattagttgtgtgaattcacgatattttgttagtttatctcctactggctactaggttcaataaactttagcaactttacaatcatcagacatcaaaactcagatggttaaacaaaagacatacaatttatgccaaagttttgaaactataaaacatgaatcctttggcattatttggctcagagaggtagaacaacattttcatagggaaagtagctaattacctaagcaaacaagtggtgaacatataaatcttggggaaagtcttcatcctcataagccaagtagaatcttcaccgggagcattttgcagcaactaagttattagcaatcataagatttttaattgttagtgcaatacgatcttgatggaacattcataacaagtccaagaatatgaaagcattcagtgaaatctttagtaagtggcaaggttgatgaataaacagatagacactagaggtcacaaatacattgtttctgaaaaaccccaaatttcatcgccactaactaaagtgttgttgttataatacaagaaagaaagcaactttaattaacccatgaaagaggagcactagtagtagtagtagtaagtaggaggatgatgattctgatcaaatctgtaaacgttgtaattctttggctgcttctttggcagcttctttggctttgaatttggctctgtgcttcctacaagctttgagcatcatgtcccttaaacgctcaggttggcctctaacgaaatcttcatttctaaattccattttcccagagtccgtcttcttaactcttgtaaagccctaccaccaaaatataacacagaatcataactcgcacgacgacagagtgacatgattccaaaactcgattcggaggatatatagaaaacttacgtaatacttgagctcggagagaaactctgagagtttgccgcaattgaatctcaagagtatcttactgcggattcgcgcttcctcattacacatgacgaaaccattgttgcttttgctccacgagattattggatccgacgaaggatcttccacaagtttataaattccgatgtagaatgtacccaatccatttgggaaattttgacccatctcttaagaataacacttgcaacctagaacagaagatggtgagagagatacaccagtcccagatccctaacacgaaagaaatatatcaaggaaccccaaactctgaaaggacctagtttcttgtgaaaaaggaccttttggggcctgggcttacattgaagatgtgaaaattggcgagcaagagacatgttgtttagttgtgaaaattaaaaacaaaaacaccaaaaccttttcttttgtgtaattctagttatggtgttatttctcttttcttttagttcattttgatttcgatcataatttatatataaaatttcaaaggctatgatttgactgtgaaatttgtgcatatcctactactagtactagacaatgtccgttatagattgattggtgatccctccttacatttcctgtcctccttctagctatatcatatgactttggaatgctactcttacctcctcaggaagatcacttgcctcaaggtttgtaacgcaaaaatgctcaaaaacgttttaggttatatatatagtagcaacaagggacgatcacacacactcatgtaactgggaatcgataacagcatcagtcaagaaaatactagacgagtaaaagaggaaagtccaaatactaagagttgaaaatatttctgttatgacaaatcttggggaaagtctccccacttcaccaaaaaaaaaaaaaaatcttggggaaagtcttgatcaggtagatctcgcacaacaaagtagaatcttcaccggcaactaagttattggcaatcataagatttttgattgttagtgcaataagatcttgatgatcattcatatataacaagtccaagaatatgaagcttttcaattaaatctatagtaagtggcaagttccaaacaacaagttcataacaaatcaaatttgtaaaacgttgcaacttgcaattcctttgctgcttctttagctttgaatttggccctgtggttcctacaagctttgagcatcatgcccattaaacgctcaggttggcctctcacaaaatcttctttctaagttccatttcccaaactccttcttcttaactcttgtaaagccctataatacatagcagcaagattcaaaatcattgcaaaagagagataattccaaaactcggaggatttgaacaaaaaaaacttacataatacttgagctcggggagaaactctgagcgttttccgcaatggaatctattaagtatactgcggattcgctcttcctcattacacatgacgaaaccattgttgcttttgctcacgggattactggatccgatgaaggatcttccactagtttatacattccgatgtagaatgaacccaatccatttggaaaattttgagccatgccttaagaacaacacttgaaacctagaacagaagatggtgatacttgagagacacggatcccagatctgacgctctcagaaccccaaagttctgagaataaccaaccctaaaactctatttataattttaatatgactgactacgtcaagaaagaccctacaatgaatatgtgtcttcatggatgagctcgtagcgatgagctcaagttgtagaagaaaacttatcaatgtcatacaccaggtcaaagatcctgaaatctgcggaagcagttccattctattggaggctatacaaagaattcgaagactatatagagagagaggatgataacttttacacattctaatataaatcaaatccaattcgtcgacactggttgatgcataaacagtttatcacaacaagataacaaaaaccattaggagtgtaacatgactatctcaagaacttgaggtcattataactaacgtagtatagaagttacttgcttcccaagcaaagccactaaagagaattgatacaagaaagcaacttaagaaaagtttattctaatcaaatctgtaaactttgcatttccttgactgcttcgtttgctctctgtttcgccctactcttcctccaagctttgtacatcatcgtcttcaaacgctcaggttggcctctcacaaaatcttcatttccgaattccatttccccagacctcttcttaattcttctgaagtcctaccaaataattcaacataaaaggattcaaaactgtacctgacaacaaataatgctctgacaattattatgatatattttgctatgatagtatattagtattcatgtcttttagttgaaaaaactttttctttaatttgcaattgcaactaataacgctctctcaaccctaaacctaatgaagatcgaatactatttttcctaaagcttcgtcgttacctcaaagtattttcgttaattttttttttatataattggttttctatgtttgtttttcaacctctggaaatatgggaaattattcccaatattaaccttttctttctcaaaactcaaaaaatcatgttacttggtagttggttcattcaaagtttatagaaatttacaaacatttcaataatcttagaggactttgacacttcacaaaaatcctcttcgagaatgtcaagagtgagtgataaagctttgcttttgtaggcatgtttgagtttattttagagtttctataacttgaaaatatttgcgttatgacaaatggatccatagccccctcacgcacttagttacttagttgagtattagatttatttacaaaatagtggagatcaaatctcaaatacgtaaaacaaagcaaagagacgcaaacacagaagtccataactttaaagtgaccaaaagatctctttttaagagaagtgtgtgccattacacaatataactaagcacaacaagatgagctcactgccctatccatggccctgtctggcagaaccattcctgttgggttttctgttggctgtactcgcggtagccttcttgctgtaccagccaaaagaataagtatgatagggtttaatatacgagagacaaaaattgtgtgaactggttatcaaagtgtaaggaaagctcaccgatttcatagaatatctctttgacattagtagcggtttttgctgaagtttccatgaagaaaagaccgttttcctgagcatatgtttgtgcatcctgcaaaggatcaagagtgtgagatatcatcaggaaatacgtgaatcagtgagattcagaagcaaagttaaagggtgcgcacattgtctatgtatataatgtctacttcattagagatgcatatctctgacacacaacagaactgtgtttttctgtcctttgcaagtcacaactgaactttaatgcacaacgtaaatgattctaacagatacttcaaaaggatcagtcttgagaaatgctacttatctaaaatctaggcttttggcataagacagtaaaatatggacttgcgggattgcgggataagaaaggtcatatgaaaacatatatatcattctccaaagctggttagagaaaactgcactatacttcttaatgaaacattaactgtctatacaacaagcctaatttatgatttgttaagtgtgtggggtcggtttaggtggcttggtttgtcaggttaatgtcaataaggtagattgtaattttacaacaaagagatatcacctaatgttctgactcctgtcaaacgtgacatgtgaaatttcaaaatacagcttaacacgttcaacatgatgatcagctattacacacacatagctcaactttatatttgacagtaaaatcctaacctcataatgagaaaaatcagtcaggacagagaaggacttgcttacctctgctgtcaccttccttgcatctaataaatcagatttgtttccagcaagggccatgaccatattagggttacctattcacacaaatacatttattcagtaaaacccacagacagaaactaaagcttgacggtgcctgcaactggaagtcataaactaacaaagaactatcaaatccagaactcagctatacaataccttgtgcctgcagttcctgaacccatttctttgccctctcaaacgaagcctaagaagatagcaagaaaatcaaacaaacttaatttaatagaatgccactaaattgcatttgcatctacttaatttattatgtacctgattcgtaacatcaaaaacaatgattgcagcagcagcacctctgtagtacattggagccaaactatggtaccgttcctgacccgctgtatcccaaatctcaaacttcacagtggcatcgttcacagctaacgtttgtgagaaaaaagcagcaccaatggttgattcctataacataaacatatatcaaagtcaagaagcacacacagaatgtgaacaacaacataaacatcaatagaagagccattaacctggaattcaacaaactgatctttgacaaaccgtaacacaagacttgattttccagcaccaacatctccaagcaacacctgaaagacttaaccaagtacacagaaacaaatcaaaataagcaaaaaaaaaaaacagaaaccaaatcaacactgtttgcaagcaccgtgttcagataaatccctaaaaccctattatggaaaaacctaaatcaaaatcgaacataaaccctaacaacaaaatctgatcaaagctctccaattcaacatcacgtatcaaaattctccaaattagaaacagaatcaaatccagaaaactgaaaatctaacaaaacgggtctgcaaattcaatcaattttacgatcatcggagagagacaaaccaaccacaagggaactcaaaagaatcgagctaataagactgaccaatttggcgttaatgctcttgtttccagctgcagccatggattatcgatctgaagagaatcgcaggtcgatacgataatcttcagctcaaaactgagattgaagatcaaaagacgacggagacacaaaaaggttaaaaaaaattagtgagcggaaacgcgtcgtcaacaacaaccaatctcctcctcctcaattaatgttgctttctttctagaactaacaaaaaatacaagtaaacaaatattacacggcaagttaatatgacacgaaaaaactacgaatataatcgttggcccaatgtagatttaggcccaagtctttttgggttaagtcctctattgatttcgtacatggatttaagtattcagcatgcatagggactgttgtgggaataatgggaatgagattttgaacataattagtgtataagctaaaagttagaaacaaaccatatctttgttgcttataaacttgtaagattcttcataagagttttatatttacataaaaaaaaaaacacaactctttcttcactgtcttttctcaagagttttcttcaatcccttcactatcttaccaaaccagatcaagttcatgacactcaatgaaatcggtacaacaaataccagtagataaccgaatgtatgcatctctatcacctgccgaaaaatccattgatcatcaattcattatctctaaacctaaccaatacaacagcaaaaaaaaaaaaaaaacagagtaattcctatttttcctaaaggctagaccgtttggtttagagataatcaaaccgaaatcttgattacctgatcataatgtgtgtagacatggtaaaacatgtagatgaacagaagaattcttgctgtctgcaaacaaaacatcattgctataaaaaaggagatcaagttttcagacatttacaacgaaaaacaaaggttttaagaaactcaccaaccaagcaaagaatatagcaactccattaacaagataagctttagatcgtttcaaaccagcaatgtcaaggtaccatctaagattgatctctggtgtagtcacttcagagattaaaaccatgtatgtgtaaagctgagcctctccagagaacaaagaatacgctactgctgttccagataagcagtgatgtaatatctgaaacaaaaaacacaagattgtcaagtaattgaagaccacataagctttcatgtgtctaacttacatattctgatcctcctaaagaagggtataaccaaaagatcattccaagatccgcaagaaagtaaccaactgatacctatgcaaaaaacacatcacaacaaagtaccatataagttgatcaatgctcatgagtaggacttgtgagataaaatgaagaaagatcaaaacttactcctaaaccaaaggtagacagaggcgagttacgaaacaccgtaagggtttcaaggcttctttggtcagaaaacaaatcagagaagaacgcaaagtataatgccatgaatgagataaagatcgcatggactgtagaaattcccctgtcaagccaaagtgataagagactagagcataacatataaaggctgaaacaaggaacctatacatacctgttgttccattcaattctctttatttttgtgagagctgagtatgatttgacatgaattgagctgaataactccgtaagatcatatacctaagaacataagctacactgtttaaaaacagaatgcagaaaaaagtgaagtttctgcaattgtaagtgaagagaagcaaaacttaccaatttgcaaagacagattccaacaagaacagaagtatatggaagaaatggatctgctaataaatagtgttcaacaaaatactctgcttgattttggtaagatttgatctccatgactgtctctagttctcaatttcttctttggtgaatggttttaactcttcttcttctacagactaatcacttctctcaagctttatcatcatcattactgaaatatagaaaagaaagagcaaagtaagaaacttcatttctgaacaaaaagtcttttcaaggattatacaaatggttttgtgaattacatcagaagaaaccacaaaaatcttcgttatacccaagaagaagatactaaaagactctgtttttatcgtttgatcagagaaaatccaattttgtaacaataagtttaaactttaaaacggacaaaaagtagagacagaagcaatcaacacgtgaaccgcaaaaggctgcagaagaaacgcaaagaagatgaagaaggagaaggacgttacagagacgattatgagagaagaaaaaaagggttctttcttcagagacttcgagaaattatccaaagttaagagagttttttaccaagtaacttgaagcgcaagagggtgcagtagtaattaaaaaaacaaaactaccaaagtagttatcttaagaataatcgagagagaagacaactattgacaaagataattcagtttgggttttgttttaaggatatgcttaatagttaataacatgtaattagggaggaaacaaaggaagcagaaaatggttgtataaattatggattctgaccttgttagacgatttaaatcgagtgtgcaggaaaacctaagggagaatatgttaattatgaaatattatatcttttatattgaaagcaccaaatcatcttgtttttggttgtatcttatatataaaagggtaaggtaggtggattttaggaggagccaaggatttgttttttgttttttcttgcagaaatttggtaattttggcttttataattttgttacaaatagtgaataaaatattaaaaaaataagagaaaaaaatatttaaagatatagtgaataagatttaacttcattgttataatctatatttaataatttacttataattataattaaaaattcacttaaataagacatattaagatctttgaaaataatttatattgtaatttactgtcaaaaggttttgaaaaaaacaacatttgaaaaataatcaaaacaaatataaaattcatccgagtaagccacaagttttatataaagctgttttacaaagaaaaatcattcctctcaaacataacaaatagtcaaacaaaacatatgcaagttaaacaagagtcaagttatctttttccatcatgttgaactaaaatctaaatgcacttaagatagtcagaaatattttgaaactaaaactagtgattaaaagaatacttgttattatatgtttggtaggcgttttagcttgaagatgatgacctaacatgaattgaatctaccatggaccacttgaaattgacctaataaaaaagttacatatctataaaatcaaaaatcagaaagacgaacaaaccatttatgctcgtgaagaaaactcaccgtttcttgctgcctttatcttgcatacatatagtcagctcaaagaaatcaccacttggttgggttttgaagtcgttttatagtgatatacttgaagaatttgtaacgctcgtgataataacacgatttcgtgtgatatgtttatcacttttgacaagtctaaacttgacaagtctattaattcggtatcaaaagaggaataataatatctcacgtcaagtcttttaaggccaagtgttgatgatgcactaattggtacctttatgatatttcggaaactcttaggcacatattgaagtatagaaaaataagattatggtcgtttcggatatattataaacgtttaggggcttctctgaaatttccaccttaatttgaagccagaacaaggtttaagcaaagtaactgagatttggctatgaaccctaagaatcttgggaaaatggttgattcaaatgcttaataagccctaatttcaggtaaatttcttacttgaaagagtaagcattgagaattcttcatagctctctatttgattgtgactttcacctgtttctctttgttgttaggttgcgatgttattatccagaaatcagagaagagttcataaactgttgaatatgatttcaaatctcaactactgtataactttctcatctattcctcgtcaaaacccagttcaaaggttcgacctttctcgtgtttcagttccatttcggagttttcagattgaaagctgtgttcgtcaggataaatctaagttacaacaacactcgtctcacttaccaactaggtttttcgttaatccggtatcaagggctagtaggaatcaagctcaagaagctctttttgattacttgcattatactagaagctttacttttactgatgcagagcatataagtaagaattctccttgttttatgtcgactttgttgtctaagattgatgataatcagaaagatgtatccaagggattgactaagttccttaggtacaatccgataaacgagtttgaaccgtttttcgagagtttgggtttgtgtccttatgagtttgaaacgtttcttccacggaagctaatgtttttgagtgatgatggtatcatgtttgagaactttcatgctctttgcaactatgggatcccgcgtggtaagattggccgtatgtataaagaagcgagagagatttttagatatgaatctgggatgttggcgatgaagctaaggggttatgagaatttgggtcttagtaaggctacagttattaagttagttactagttgccctttgctactggttggtgggattgatgctgagttttcttctgtagttgataagttgaaagggttacaagtaggatgtgattggcttgggcggtacttgtctgaccggaaaacatatagctggcgcagaattc

SEQ ID NO: 599 - DNA, 95417 bp, Arabidopsis thaliana
aagctttagatcgtttcaaaccagcaatgtcaaggtaccatctaagattgatctctggtgtagtcacttcagagattaaaaccatgtatgtgtaaagctgagcctctccagagaacaaagaatacgctactgctgttccagataagcagtgatgtaatatctgaaacaaaaaacacaagattgtcaagtaattgaagaccacataagctttcatgtgtctaacttacatattctgatcctcctaaagaagggtataaccaaaagatcattccaagatccgcaagaaagtaaccaactgatacctatgcaaaaaacacatcacaacaaagtaccatataagttgatcaatgctcatgagtaggacttgtgagataaaatgaagaaagatcaaaacttactcctaaaccaaaggtagacagaggcgagttacgaaacaccgtaagggtttcaaggcttctttggtcagaaaacaaatcagagaagaacgcaaagtataatgccatgaatgagataaagatcgcatggactgtagaaattcccctgtcaagccaaagtgataagagactagagcataacatataaaggctgaaacaaggaacctatacatacctgttgttccattcaattctctttatttttgtgagagctgagtatgatttgacatgaattgagctgaataactccgtaagatcatatacctaagaacataagctacactgtttaaaaacagaatgcagaaaaaagtgaagtttctgcaattgtaagtgaagagaagcaaaacttaccaatttgcaaagacagattccaacaagaacagaagtatatggaagaaatggatctgctaataaatagtgttcaacaaaatactctgcttgattttggtaagatttgatctccatgactgtctctagttctcaatttcttctttggtgaatggttttaactcttcttcttctacagactaatcacttctctcaagctttatcatcatcattactgaaatatagaaaagaaagagcaaagtaagaaacttcatttctgaacaaaaagtcttttcaaggattatacaaatggttttgtgaattacatcagaagaaaccacaaaaatcttcgttatacccaagaagaagatactaaaagactctgtttttatcgtttgatcagagaaaatccaattttgtaacaataagtttaaactttaaaacggacaaaaagtagagacagaagcaatcaacacgtgaaccgcaaaaggctgcagaagaaacgcaaagaagatgaagaaggagaaggacgttacagagacgattatgagagaagaaaaaaagggttctttcttcagagacttcgagaaattatccaaagttaagagagttttttaccaagtaacttgaagcgcaagagggtgcagtagtaattaaaaaaacaaaactaccaaagtagttatcttaagaataatcgagagagaagacaactattgacaaagataattcagtttgggttttgttttaaggatatgcttaatagttaataacatgtaattagggaggaaacaaaggaagcagaaaatggttgtataaattatggattctgaccttgttagacgatttaaatcgagtgtgcaggaaaacctaagggagaatatgttaattatgaaatattatatcttttatattgaaagcaccaaatcatcttgtttttggttgtatcttatatataaaagggtaaggtaggtggattttaggaggagccaaggatttgttttttgttttttcttgcagaaatttggtaattttggcttttataattttgttacaaatagtgaataaaatattaaaaaaataagagaaaaaaatatttaaagatatagtgaataagatttaacttcattgttataatctatatttaataatttacttataattataattaaaaattcacttaaataagacatattaagatctttgaaaataatttatattgtaatttactgtcaaaaggttttgaaaaaaacaacatttgaaaaataatcaaaacaaatataaaattcatccgagtaagccacaagttttatataaagctgttttacaaagaaaaatcattcctctcaaacataacaaatagtcaaacaaaacatatgcaagttaaacaagagtcaagttatctttttccatcatgttgaactaaaatctaaatgcacttaagatagtcagaaatattttgaaactaaaactagtgattaaaagaatacttgttattatatgtttggtaggcgttttagcttgaagatgatgacctaacatgaattgaatctaccatggaccacttgaaattgacctaataaaaaagttacatatctataaaatcaaaaatcagaaagacgaacaaaccatttatgctcgtgaagaaaactcaccgtttcttgctgcctttatcttgcatacatatagtcagctcaaagaaatcaccacttggttgggttttgaagtcgttttatagtgatatacttgaagaatttgtaacgctcgtgataataacacgatttcgtgtgatatgtttatcacttttgacaagtctaaacttgacaagtctattaattcggtatcaaaagaggaataataatatctcacgtcaagtcttttaaggccaagtgttgatgatgcactaattggtacctttatgatatttcggaaactcttaggcacatattgaagtatagaaaaataagattatggtcgtttcggatatattataaacgtttaggggcttctctgaaatttccaccttaatttgaagccagaacaaggtttaagcaaagtaactgagatttggctatgaaccctaagaatcttgggaaaatggttgattcaaatgcttaataagccctaatttcaggtaaatttcttacttgaaagagtaagcattgagaattcttcatagctctctatttgattgtgactttcacctgtttctctttgttgttaggttgcgatgttattatccagaaatcagagaagagttcataaactgttgaatatgatttcaaatctcaactactgtataactttctcatctattcctcgtcaaaacccagttcaaaggttcgacctttctcgtgtttcagttccatttcggagttttcagattgaaagctgtgttcgtcaggataaatctaagttacaacaacactcgtctcacttaccaactaggtttttcgttaatccggtatcaagggctagtaggaatcaagctcaagaagctctttttgattacttgcattatactagaagctttacttttactgatgcagagcatataagtaagaattctccttgttttatgtcgactttgttgtctaagattgatgataatcagaaagatgtatccaagggattgactaagttccttaggtacaatccgataaacgagtttgaaccgtttttcgagagtttgggtttgtgtccttatgagtttgaaacgtttcttccacggaagctaatgtttttgagtgatgatggtatcatgtttgagaactttcatgctctttgcaactatgggatcccgcgtggtaagattggccgtatgtataaagaagcgagagagatttttagatatgaatctgggatgttggcgatgaagctaaggggttatgagaatttgggtcttagtaaggctacagttattaagttagttactagttgccctttgctactggttggtgggattgatgctgagttttcttctgtagttgataagttgaaagggttacaagtaggatgtgattggcttgggcggtacttgtctgaccggaaaacatatagctggcgcagaattctggagacaatagagtttcttgataaagtgggatgtaaagaggagaagttgagtagtcttttgaaaacgtatccagctttggtaatcgaaggctccggaaagaaattctatgttctgtttggtaggttgtttaaagcggggcttcaagtgaatgagatttataggctatttatagacaatccagagatgttgtcagacaaatgcgtgaaaaatattcagaagacgttggatttcttgattgctattagaatggaaacgcagtttatcacgaagattttgctgagtcatatggagcttattggttcatgctctctgccagcacctagaactgcttgtcttagtttgaatgttaaacaagacgagctatgtaagatcttaaagaaagagcctttgagattgttttgttttgtttctacaacgaagaagagaaaaagcaaacctctttcggaagactcgaggaaatacttagagaagacagagtttttgttgaggctagggtatgtagaaaactcggatgagatggtgaaggctctaaaacagtttcgagggaggggagatcagctacaggagagatttgattgccttgtgaaagccggtttaaactataatgtggttactgagatcatcaggcatgctccgatgatacttaacctgtctaaagatgtcatagagaaaaagatacattccttaaccgaacttcttggctatccaattgaatcattggtaaggttcccggcatatctgtgttatgatatgcagaggatacatcacagattctcaatgtatttatggttgagggaaagagatgcagcaaagccaatgctgtcaccaagcactattctcacttgcggtgatgcccggtttgtgaagtattttgtcaatgtccaccctgaaggtccagccatttgggaaagtataaaccaatcatctacctgaagttaaggttattggcactatttcttgaatttagtacaactgagacagtgaagggtttttgatatcaatgccacctaatgaatcaaaaggaagagtttggagaattccggaacagagagatccattagtgttagccgatgcttgtgaaagagcaaatgaagtatgtgctgagttacagatttgatgcagatctaaaatgttgcgtgaattcattggaaatattctttagatagtactgagaagatctgcaaattgtttgttggaatattcctccttagccgtcctacaacatctgtcctgcaacatctgtcctgtaaacaaacagatggacacgcataacattcgaaggagacagtactgatgatttgtccagagtctgttacaggttactgaaagatctctcatgtgattcatatactctttagtaatagttagcttgtgttatgtaattgactgcttcagttcaggtctaaaggaaagcaaatatttttgtaacaattgaagacataaatccaagtagtagaattttctgaccaaataagcaagcaatatgttctaaatgatttggattcagagcatcatatttttcctttacacattttaaaaatcaaaatcccttgtaatacaaattgaacctaaagccaaaatgggatcttcaatcttttcaaaggaactatctctattctctagttcctgttttgctatcagaagcaggcttagattttggtattgagattaattcaacacgaggatctttcccctgagaaagtgcctgtttagtaattctcttgcaagaagcttgaaaatcttttaactagcttaacatttttcttgtgcttctcgttctgctcaatcgttgcttcgatttcacttccatatattacaattttctgactaaagaaagaagcaaagcaaaaaggaaaggttttgctttatacatttcaaaaatccatctcctttaatacaaaatcaaacctaaaccatgtaataaacctgaataccaaaatgggatctccactgttttctaaaccaaaacctataaaatagctaatttcttccaaggaactatctctagtagcattacttatctgggacaagatcatgttggattctctaaggcttctctaagagaagaagctggtgatgaagaagaaagacaagaccgcgcgactttgtctttgctatatgcttttttaacgtcgttcttcagctcgttatatctcatcctcttctgtcttctctctttcacagtgcctttctcgggatacgacatatcagggatttcttcgtccatatactgatccatgtacttatccagaacctcataacaagatgggaagtatctccgacctgtctcaactgcgttgttgaacggtttcgaatcagtcaatcttgtggtcagagaataaaacttgaaagtacatttccttaagcttttacctgttttcatgagggctttcatacgtgtaagcattcttttcgtttgcacataaggcgtttcatttaaatcgactttacccaagttttcagttgtatcatttgatggaggtggagttagaagacctgtgcactcgcttgtcccttcaacattagcaacgtccatagccacattggcttctgctgggaagaacaactgagcaagtcccactgcaatgacacatacaagaattcaataaagagacatcaaccttaagctatgagaaatatatatatcgactaggtcaatacctcgcttttctaagtataacaacctcatttggagatcctcgggcatcgaatgggaacaagtgggtgtatccccactaaccaatggattccttctaatttccctttccaagatatcgatgcataagcggtatttactaggttctttccttgaggttttggtatgataatctttcggcctagtgagtctcctacatatatttaccgcactgcgtccatcaaacgtgaaatctgaagcattagctcctttttgaataagtggtatgataattgttggctctctacgcatagcagcaatatgaagaaccgtataccccctggaatttctgaaattaacatcagccatatctagatcaagaacctgtgtcacaactttcggatcactgtatgccactgcataatgtagaccattggcttggtctagagttatatctgactcagtcaaaagaagcttcacgagttctacatcatctgaatccaatgccttgagtactttccctgttctctctatcgatttatcctccacctcgggtatgttcaccgacttaactcgaagctgtttgattttttccaatacttctaaaggaagctccttttcgatacagaatctgtctaagtctgatctcgccactctctcaatgcattgatcaagaagctgtgtcaaatcacaatgaaacgcaactaagaggataggaagaacattctctactagtgacttctcaacatagttacgaagcttccgctgcagacacaacaacacacaacattacagccttgaccaatcaagaacagattatttaccagcaaaatcacaaagaaactttatctcaaacctgaaatgacgaaacaagatccgggatttggaacacaaatgaagcatacatcaactcaacagcaaaatcaatggccggtttacaagaatcatgagcacaaactgaatcaacacaagttgaaacctcgataggaaaaggctttaacctcccagtgtagatatagctcaagaaatgcagaaatgcctcacgtcccacatttccatatggtaataaatctttcatttgatacttaggtttcttctcactactatctttatctttcttaaacagatcaagaaaaaacttgctcctagcagctaaaacacatctatgaacactcacagggttagcttcttcttcaatgatgatctctgcgtcagtgtaatcgcaatctggattagtgagaagctgctccaagttagagctgagctcttcaagattagcagctgagtgataagtagtaacaacaggagaagggtttgataagtgagaagatgtgaaacttatagatgaagatggctctattgcagttgcagccattttgttccccagaagtatcactcaaagactctgtttttgatcttcaaatccccaaggatacaaaaaccctaaatctaaatccaatgacaaggatcaaattttgagaagtgattggatcaaaaacaatacagagaagatcatagatatgaaattaatcaagccctgaagaaaagatccaaactttatgaaagaacattctaatgaatcaatgtgaagaacaaagtcaattcgagaaatgcttcaaaaagtcaacgaaaatggcggatgagaaaaaaaaactaaatgaaacttaaatcataagagaaagaactgaatagatgggtagtcttcaaaatcattgcacaaatgaaaaagatttcaagaagaagaagacaatctcagaacagatgggagaaaaaaatcagaggtttatctaaaagctaaaggtgagaaataagaagactgaccaaatagtaaagtctttggagaatagtaaagaaagagccaattcctaatccaatctcctaaattttgtgacgacgattcaaaaaccgtaagcaatgtcgtcagcaattgaagacgacttgagttgtggtgaagtgggtctatgacgtcttaaataacgtcagctttgagaaatatacacaaaatgctaagtagattgatgataagtggaccctttctaataaggtcataacttataaaatgggttatgttatgtctacacaaaaactcaagataatgcaagagtagattgatgataagtggaccctttttaatgggttctgtattttatttgaagagcatgaataattgaatttatcaaactttttctttacttggtagttggtatatatatgatgatgctaaccaagttcattttgattagttcttcaaccaaattttggtagattaaatatcataacataacactgaatataaaagagtgttaatctttcttgcaggatttgtagaatggagatgagcaaactcttcttcttataattgcaaatagtttcatcacaattcgtttgtttgagttcatcaagaatctaaaaccctcccaacaattactttcgagagtgagatactctcgtttggcctctctgaaccaaaccaagccggatcctcaaggctattaaattacaattctactactttcactggctattatactcttcatagtaatcatcacttataacagacacaaacctctcaagccaaggaagctgatgaagatctttcattgcggcttcaacatatgatgactctgtacatggaggcggcggtgactgataagtagtatggtgatcactgagactaaaccctccacctgctaagaacctttggatcagagcaagctgagatctttcttgctctgagtacgcgtccattacagttggaattgagttaaatgtgtcccaaggccattgctcaacttcttgaattgtgttttcctctactgcgttttcttgttcttcttcatcatcgtcccaaaaagcacacgtgcaagtctgttgcccttctctgtactctgctccacacgagtagcaaaactcatgcccgcatctgcggaaaacacagagagttttgacatttatatgcgtaagaatcgcaaaagaaacacttgctctagaatactagatttaaacgtaggcgagaaaaaaaaaaccttagaatcatatggttattacgataccgtgattctgcagttaaagggtcaagactaactatattttattggaagtcaaaaacctaactttggtggttcaaatatgtatagatacggaaaacaatgtgtagccatagatatatatgtgtgtcttaccggcaagtcatgtggttgcagccttgagcaagctcgatcattatacggcattgctgacaccgcctccacctcttataccttgccaagcgatgcaatgtaatatcatctgggtatctttcatcaactggaagaatctgaaactcttcacagctcatagaagcatgccaaggaacaccacagtccacacacacaaacctctcacagactggacactccacacagcagctattctctgactgagtagacgagcttgagctagcccttcctgatgatagacattcttgcgggtctaacagaaaagagcaattgggatatgggcagtaaatcttcccattgtttttactacacacatttgcttcctcgaatgatttgaaagtagtgacgggaaggaacgatttgcattccgctgctgagagataatgcttgcattgcacttgaggacacctgatgggaacctctgaagtctttactttcccttcaacgtacgttttcatgcagtgcgaacagaatttgtgagtgcatttcaatgatagcatcatctcagactgacggtcttcacagcagatcgagcagttctcgatcggtttatccccatcaagattagaagacacgattcctaccgctacttgagccaagcttagagcttcatcaagatcacagaaaggagcaagctttagaacaaacccattaaggttacttgttttctccaataccctttctctcagagctactaaaagagggatctcgagctgctcctcacgagttatctgcaaagtcaattcatataaaacgtgagctcaaacctacaaagagatacaaaaccatatgaaagcaagtctcttcaacaagctaaagaagagagactttacctgattatagagcaactcggagtcggttacagcaaccacagagctgagattgttctgtaaagctacttcaagaccatccataagagctaaatagttagctacagactcttcgacataaaaatccaacttcttctgaacctgaatcaactccaaatctcctgacctctccaacacaacaccaattcccgaataaccagaacccaaatctcctctttcgaatatcgagactcctttaaagaccatcttaacagagaactcatcatcaagatcatcttttttctcctcctctacaactttagctatatcatcactaccctttaaccaaagttcttcatcaccacaacaacttctaaactcttcctcatctcctaagtgattcaatggaagctcctcacattcacaagaatcctcttgattttccatgtctggaaacaaacctatctaaactacaaaaaggtacaaactttcttaacttagcaacacaccaatgaaacccatatcggatctgcaaatttcatgaaacaaaaccgaataaaaatgagataaagctaattcttttagatatcatctaatctcaattataccatatactgagagagagaggaaagggaacaaaaaaaatgaactttgcattacagatcaacaaaacagctaagcttgatgaagttacataaacagatcagcataaatcagagaccaaatcatttgaaagtacacagaagataacaaaagaagcagctcgatttgttgacccactaaacaccaaccagaccctcaattattacatatttcaaggaagaaaaaaattctaatttatttaagtagcagaaatcaccagagattttgtaataaaacgagatcggttgaaattaaagtatcattaagcaagaacagaaatccagaagctttcttaccagtggaaggagatttacacttggaaactaaaattaagaagaaaactctaagctataataacatcttcaaaatctctgtttttttccaggaaaaaaaagaaaataaacgcattgttttggatgtttctactgagtttttgtggagagaagaagaagaagaagaagaatcatcggttcttctggttttgctctctcttcgaatggcgtaagagaaaagttttacttttttttgttttgtttctttattctctctttttttatttattaatttattttatttttctgagtttttggcttcactttgctgtcattctcgtactgtacaatgttttatattttcccacaatgaaataattattttcacattactaatcatcaagtatttaatttaaaatatatagtttaaataattgaaactgtaataatggaattggattagaacctgagcatgaagaattatagcttaagaaaccaaagttagcacatggactttgtctcctctcattgagaaaaaaagctgtaacttcattaaaaaaaaatctttctctgacttttaacatccaatagttatattccctttgaataaagttagcaaaaagaagtacaaaaatgaaatttttaataattgtatttctgcaatagaagacactcgaggacagtttatggcagcaggaagtttgaaaatggagacagcaatcattagcttaattgtttataatcttaattcaaatgggaaatgtgaacatggacttatcttttattgcagtgtttgtggcatctgaagaaacagtaattaacagaggaaataaacagaacaaatgcgattactaatgaattaaccaaataaatggagcaaacacagaacaaacaattgaacatcatttctaatttgaataacacttctcatttgaatcttgtacatcatttctaattttaatttgtaatatatgggcctactgagacatatcaatgtggcccaatatcaatagatggcctactcagatttttcctttgaacacaactaattagtaattcctaatttgctaataatgaaaacataaacaaattttgaagtaggaaataacgatatattaccaatggatatgacaaagaaaacgacaaattttgtagttttttaacagtttgtaaattgtaacatattcaattcagcgatgtcggtagttcaattttaattcaacattaaaccaatttagcaatacattttgacagtaaaataatacgacatttcatgtatcgtttggcatgatccacaccttccaggcttctcttcgattaaacaaaactataggataatataaaatacaatttaaaacctttttctatctgataatgtacatacacaatcaataaaatcaggattccgattctctagtgtaatcttttttctattgatttagtcataacttgactttccaaatcagcagcaccgagaacaagccggcaaatcttctatataagacaaccaaagacaaaacaatttatctcatcaaaaattcaaacatcatatattataaaacaatctcaatactaatggctactaccaagctcgtctacattctcctcatcctattcaccttcaccgtatctccggcgatctcaacggccccggaacattgtgatagcggctttgataacccgtgcatcaacaaagctaaggctttaccactcaaaatcgtagccattgttgccatacttacaacaagcttgataggcgtgacctctcctcttttcagccgttacatttcgttcctccgtcccgatggcaatggtttcatgatcgtcaaatgtttttcttctggaatcatccttggaaccggtttcatgcacgtcttgcctgactctttcgagatgttgtcatcgaaatgtcttagtgataatccgtggcataagttcccttttgcgggttttgtcgctatgatgtccggtctagtcactctagccattgactccattaccaccagcctttataccggtaagaactcagtcggaccagtgcctgatgaagagtatggcattgatcaagagaaagcgattcacatggtaggccacaatcatagtcacggtcatggtgtagtgctagcaactaaagatgatggacagcttttgcgctaccaagtcattgccatggttagtacatatgaaaatactacaaaacggtcttgagttcaaatcataaattaatatgtataaccatactcaagctatttttgaataccatgaataggtattggaggttggcattttatttcattctgtggtcattggactatctctaggagcaactaatgattcatgtaccattaaaggactcatcatagctctttgcttccatcacttgttcgaaggcataggtcttggtggctgcatcctccaggtacgaatatacattcatactatatagtttatgtctcttatatcaattagaaatttacgttcatatgtatataatttatgttaacaggcagattttacaaatgtgaagaagttcttgatggcattctttttcactggaacaacaccttgtggtatctttcttggaatcgcattgtcgagtatctatagagataacagtccaaccgcgttgattacgattggactgttaaatgcttgctcggccggaatgctcatctacatggccctcgtcgaccttctagctaccgagttcatggggtcaatgctccaaggtagcatcaaacttcagatcaagtgcttcacggcggctttgcttggctgcgccgtaatgtcggtcgtcgccgtgtgggcttaaacactctttcaacataatcaataaattatttgatttattattcaaggcgacaaatactttcgcctttgtatatttgagtttttgtttttaagtttgattcatttattagtttgtatagtgcatgtaagcgtttgaaagaaatttctttttatgacattgtaaatttatttttatgaatgcgatgtttactttcttctttggaatgacatgtatttaattattggagtttgttgattgtcaatgttagttagaaaaaattaggtccgaaatactagtgacacggaaattaaagctatatgaattaatactatcaattatatttaaaattactctcttcaagaaaatgtacatacagtctcttgttttaataaagaaaaatttcttactttggttagatttaaattacacaatatttcatgacaactatttaaccataaaaactcgataatgtactatatctaacacataatttgtaggtgtgaatggcttaagctaaaaagcttataaattctatgtatttcattccatttcatggttttttggttgaaaactttaagtacaataacagacttactaactaatttgtaaatttccacacatgttttgattccatacacctggaatcatatcaaatacttgtaaattctgaacctattgaaacaagttgaaccatttctttctaaagattaaatgcattatcttgaagtataagttcttagaacatactattaaataactttgaatagtcttcaattttactaatgccttaatcaagttttgaaattatctttttcaaatcatacacacttcatcctgacaattgtaaatgtttatagtttttagaataatttttactattttttttaatttgtgtcaatatctgatttggtttgattctagacttcgtttgttttctcaaattgtgcaagtaaaaaacacgaatatatctattttttattttatgttcagaaaaaaaaaaatatatatatatatatatattcgtgttttttacttgcgcaatttgagaaaacaaacgaagtctacaattaagcgaaatcacacattgacacaaattaaaaaatatttcttttctcgaccgaaaaaagaaaattatttcaccaatatggaaaatctccccaagttcattctattttctgtatcaaagttaacgaatagacatataagcattttgtcacgtcggtggagtatgagtttggcacgttttgtttcgtgctcgtccaaccatatgaaaacgtgggaggtaaaccactcaactaataatattatacctttaaaaaaactatattataaatccagtttgatgcttattttattaatcattcttcaaagaaataaaacttaaatagtgaaaattataaccgaagttgactagttaggaggcatgccatggaatattggatacatactcggcatggacagtattgaatatacaggataatgtagataactatattttctataatttattttgtgtcaactattttttctatgattctgatgattaattgcatgacaatcaatcaaattaattatgccttcttctatataaccatgcaaaaccaaaaaaaaaaagattatttcgaaacgacatgagaatcaaaagaactcataaatcctaatagacatgaaattatgtatacagttataacattgaaatatcttaataccttacctaaaagataactagattaataaccataaaaccaataatcattaagtcaataaccccataatcttataaatgaagtcagtgactatatgttcatgtaaaaatgcgtaagttcatagctagatgtcccttttttaggagcacatggattgacacattaaacattcatacccgatttcatggaattctatttgtcattatcctttcccaaaaacttagttgtttcttagttattaaaccttgaaaaaaaatcaattcaaaaatgaaaaatgacttatatgtatgtcatttttgaaaactagacatcaagctatgaaaagaggaatctatttaccgaataaaggaggaggaatctacattcatatgtagtgtttttggtgactggattgcaaccatacactgagcacaagctgtcacgtgtgatgttgtgctcgtagcataaactataaagtataaacctaattaagcttaaagttaaaaatagtacaagattaaaaagtaaacgtttgtgagagttgactaacagaactatagaagacgcatggggttgacttcaagcggtctgcaaacggcatgaacaatgcattcaaacgataatataaaccttaattccaatatagcctttttcaaatttaaaaactcgaatgtttacgaaactataacttgataaaactgattgaaataaaatgtacttacatttttttaataaaatatacttaaattttttaaataaaatatactttaaaatatacttaattttttaaaatcatactatggattttaaacaaaataaattgtcactgagtcatatttctttggataaaagaactttacataagtgattggtacaatataataatatgcaaatttaagacattttattaagtttatattatcgtttaaatgcattttctatcaacttaataaaatctagctaggtactttcataattctatcattattccttttgaacgattaattactttattttctcgtttcacactggaagcaaacgagtaatcaaataaaatttcgtcatcatcgacaataaatggcatgaaaacaaccagcacacattactatataaaccgattcatctagtaagtccaaagtcacacaaacattaaacaatctaaacacacaacaatccaaaagaaaaaagaaaaaaaaaaaaaatggcttcaaattcagcacttctcatgaaaacaatcttcctcgtactcatttttgtctcttttgcaatctctccagcaacttcaactgcgccggaagaatgtggaagcgagtcagcgaacccgtgcgtcaacaaagctaaagctttgcctctcaaagtcatagcaatcttcgtaatcctcattgcaagcatgattggtgttggagctcctctctttagccgtaacgtttcgttcctccaaccagacggaaacatcttcactatcattaagtgtttcgcctccgggatcatccttggaaccggttttatgcacgttttacctgattctttcgaaatgttgtcatctatatgtcttgaagagaacccgtggcataaatttcctttctccggatttctcgctatgttatcgggtctaatcactctagccattgactccatggccacgagcctatacaccagcaagaacgcagttggtatcatgccccatggtcatggtcatggtcacggccccgcaaatgatgttaccttaccaataaaagaagatgattcgtcaaatgcacagctcttgcgataccgagtcattgccatggttcgtacgcacatatatacataccgaatatcattgtattttaaatgacatattaccgaatacataggtatatctaactttctacggatatataggtcttggaacttgggatcatagttcactcggtggtcattggattatctctaggagcaactagtgacacttgcaccattaaaggacttatagcagctctttgcttccatcaaatgttcgaaggcatgggtcttggcggttgtatcctccaggtaaatatactttagataaaagaaaaaaaattatctttagccaaatgttgaaattgtatatacaaatatgaaacatctaatgtttaagataatttcaggctgagtatacaaatatgaagaaatttgttatggcgttctttttcgcggtaacaacaccattcggaatagcgttagggatcgctctatcaactgtttaccaagataatagcccaaaagctttgatcacggttggacttctaaatgcatgctccgctggattgctcatttacatggcactcgtggatcttctagctgcggagttcatgggacctaagcttcaaggtagcatcaaaatgcagttcaagtgtttaatcgcggctcttctcgggtgcggtggaatgtcgattatcgccaaatgggcttaactaatactccagatattgcggaattgaaatcatgtggatttcattatcgaactaaaaccgttttaggtttacgtctcgattctctatcggttttttatcttctcttacaaaagatttgcgtggatctatcacattttaaggaacatgtcttttggtagatatgtaaatgtgataggccccacgattcatagttttcttttgtatcttcctttattttgtcaaggcagtatagttcatatcgtgtaatgtttttgcatctcatataaataaataaaacttttgctgctttttcaagataagtaaattaaagaaaaatatatattattttactttgtaatctatattcgacaaatctaaataccaataattggaactttaatcacaatcacgtagtctataaatatacttactagcttggcaatattgtcaatcacttgcatatcgtcccatactgctttaaatctcaaatttatttttgagtattactaggcattgatatccttgtagttgatttaagtatataatttaaacaagttctctaaccgggttctgttgataaaatcaatatgtctaccaattgaaccaataccaataaattttagtcttcgcttgaaactaaagtcaaagttcgaacaaacaaaatcagatacatagtcgaagtttataaactttatatgcagattcagtcgatttccaaaagcgctggttttacttggaaaatgtatatctatcgacccatttatgaaggctcacttgatttgggtacgggcattactttcagcccaattatgtgtccttctaacaaaaaacttatctccactcacctaactctatcttattagtgagaaggcatcctacattgagataacagctcggattggtgaagagaagaaccaaactcgagctgtgatctcaatgtaggatgccttctcactaatatatctctctatttaatctatgtatctgttttacattggtcactaaactatgtaacgtaccattttcatataaatatggttctcgtgaaccatattgtcgcttctccaattataacatttccatgctctggattgaatcacataggacatgaacataagcctcttgtacattgatgttcctctttcttaatttgtcatcctcttcatgactatgagtatgatcatgaccattgaaggaagtgaagaaaatacatcattcatcagtgaagcagtatgtttatagcttagttataagcattttagagtctcaaaacttcacaatattgtgctttaactttaacattttccaaatttatgctgtaatatatgtatcgtttttgggtgacctacatctcgaaaaatattgaagtttaactgtagattcactttaattttacttggttatctcattcttcttctaatggagttacttagcccccattccccaacatggtcacctcatttaggttaatttataaagtttgaggtgtcacaatatgaatggatttacataattcagtattcttttaattaagatgctggtgggataaagaggaacaatattatcaaggctgatttgttcatacttcatactcatgcagtcatatagctaggatatttccatggctcttctcactgttttcttttgtaggatattttctctgacttatgttttcgtcaaaatgtaggtttacggtagaaaagtcctatcaaaatttccgttctaagagttgtaagatttcatcatttgcatgattttttttgtagtgtgctagttcataaacaaaaccaaaatccaacaaattatagccactctttatgtaccgttacattttcatccaaatccaactaaatgttttgataaactcaaactaaaatatctattattattgttattgacttgtttctaatctaaatttgatttgggaaaataaataagatactggattgagacatggtaatcgtttcttggacgcgttcattgtaactcgtgaattcatcacatcgtcgtattcatcgttttgtctatacatgcaacgcacatgatatgacccaatctaatatatttattgcacgacaacaataatgactatgcaatatttttagtcggatggagaaatatgattcttttttattcatatatcttgtggacggttggaatacacgtaagatgcttctgttttcaaacccctctcgagagttcgaatgtcatgtaataatagttacatataaagtactgccaaaattaacaaatctttactatgaaagtaggactttcattaaaattcaataattctttccaaaaatattttgcaaaatgaatggagcatgaggaagggccaaggaagaagagaacctacgattttggaagaatatcacccattcactttacatgtcttgtcctgagattctattgtttttttcttcggatatcctgtctataaataatttaggatcttgaattttcatctccgaaatcgccatgtgaaaaatatacatatatattatatatattaactaagaactaatgtacaattatacaaattcttatcaacatatcttaaatagacgaggttagttccaaggttgaaatggctctttcgtccctattataagacaaaattaagttttcttttctacgattcgtcatttagttttcttatcgattgtagcactgtgtttgcgtctatgtttctacgtatgatgaatcactaattggccgatactcaatttttatagatgttggatgtaaattacgataagtatttttgacttttctcaagatcagtgattagatgagcaattaatgtaaagaaatttgctattgaaacccatttaagaagtcggcgcaatatagaggctcgtggtcatgaaatcagtggatagagtgctagacccgataacataacgatatattcgctaaaaaaagtttgtgcagccacttatcttcgttttgatatcttgaaaaataatcctcagaacaaacaaatttcagttcaaatgatatatggtaatgttacgggtctagtcactctagccattaacttcatggctacgaaagtaatttcacaattttccgaaaattctgtatgtgatcatttttgaaactggttttacctgattcttttgatatgttgttgtcgggtgctttgtaatatcgatcttctcgtatgattgcctcctcttgtctttctagtttttttttcttatggaatctatcacattatacatgtcttgtggtagatttgtaatgggattggtcacacgatgtcatagtattcctatgttccttttttctctccaaggtatcttgccgtgtaatatttttccatctctcaaatctagagtactaataattaagaaatctaaagcctaatagatagtgtatggaccgacaaaaaataatagatagtgtatggaagtatccgaacagcccatttgagaagccagcccttttacggaatcacttcttctagtatttggttgttattcggataatcggatcttctaattcatgctaggtttggtaatggtacgacgataatgtttgatattattctaaaataaacgataactatcctttaaaataatatctaagactttagaaacgctttatagatttttatagtccccacaaataataacaaccatgattttttctgatatctaaaattataagagtatttcgcatcagaaaaaaaaaaagaatacaatccaaatatacttatgaattgttggaagtaaattttttagacaaagctccaattagtcacaaacattatctttgcaacaatcactaactaatttattttttcttattcccttgtccaaactcgtataaagtataaacaaattaaaagatagggttaggtgaatataacataaaactttgggcgagggtaagtaactacgtaatgtaggggcatggccaaaaggaaaaaaataagtatgggtaagaacgaagacatggaaaaatgtgaattcaaactctctctttaattaatttctgtacgaatcatcgcagagtcgtaccattttcattttcgccactatttcgtttcgtgccatttgatccaaataattctaagacataaattaaactaaattattggatagagacatggtaacgtttcttggacgcaatcatcgtaactcgtgaattcacacatcgtattcatcgttctaatttcgtcgtttatagaattaatataggatataattttaaaaatccattttagtgggggtattttattttgtctagacatgcactgcacatgacatgatccgaatatgaaatatttattacacgacaactataatgactatgaactgaaaatgtcgttgagacaatcgaattcagactatttctttttcttttatcataatttattttagtttcgatagcgaagtatgattcttctggttgaatatagttgcggggttggaaagataaaggatacttccaaattgcaatagtatatatccatagaccatttttatacctttttcaatttatatcgacgctatgataatctttaaaaggtggtagataattcaaactcatgtgatcgactttgagaataagcaaccaaacaacggtgcaacttaaaaagaactctggaatatttacttttcaaaacattttcgaatcactttaaattcatttatatgatttattctttctttttttcccacacataatgagaggaggagcctttaaattctcttcgacaaattatttcgtctttcttttttgcaattttcagtcttggattccatttaagtcgtaagaaaatcaagagttaaccaaaaactaatttatatgtacttacaaaaagaaaagaatcaatttgctatttcttttgcgaatataatcctaaggaaacaaaaaaaatataaattaaattgtaacgaacaaaaaaaaaagatggtcaagaagacatgttaacatgcacactagcgttcatgaccatatcgcaaaccggacaagtccgtaacaaagccgaaccaccacaaaccgtacacaaacacaaatgacgacatggtaacaccaacacactcgcttctctctcaccgcaccgtttacaaccaccaccaaccgccgttaccgcttcaccaccaccatcaccgcaacaacttccacaactcgattccgcatcgtcttctacaacggctgaagcggttggaaacgtttcgagttgagcaagaacttggtctaggtttgttcgaagagtattagcgtttgcttcgttggtttgagcgatatcacgccaaatctgattttcgacgtaaagactcttcaccctctcttgtaaaacccagtttaggtttcgaatccgtacgatttcatcgtctttctcttttagtttcttggctataacgttttgaaccgcagacgctaacatccgcgtttgcgtttgttgccttgcttcaatctctattcttagcttctccgtttgctgagctacgaacctatcgatctctgactgttgttggttttgaatctgagatacgagttcaacgtttatcaacgacggtgatgatgagtcaaacgctacggacctccgtttaaccggagcgtttgagtctgagaattgaaaatctcgctggcgttttgtagacagaggaggaacagtgaaattgtaactgagaccactttctgctttgttgaagttggctttcgcagctaaaggctcaacggcgaaagattctccggttattaacggaacttcaccgccggtaaactcaaactcgccgtggttcatgttttcttgaaatttaacacaatctctgcaaataacaaaaataaaaaagattagaggaaaataaaaacagaggaagtttgtttgtgagaagaatataaaaatgagatttttacctgtttggtgatataaactgagagaaaatgttcatgtgatgagcttgaacagccattgttgttgaaaaaagctcctagagattctgaaacaaagagagagagaagagggaggagttgtggcgactggtgaagaaatctatgggattggcttttatttaagggagagaaaaaagtcaatatttttttaattttctataaatacatatttattacttttactatttaaatattttagatatttagaataattatgaattcaaattagatattgactttcatggtatattaccaattgtgtttagtaattaaagtttttgtaaattaaatgttagtaaaatacagttgatttttgtaaaaggaaaaagaaaaagaaacaaccaattttatgaacttaaaaggaatataatctagagaaatataaaatatactaagtttttattcaacaatatatactatctttcttgaagtttgcaaatattgggacgtgtaaaaagttttttttttgtaatatttctttcttatttattgatgcactcatgcatgtttccttagcaacatccacataaacatatgcaagcttgactagtcaaagagccattataaaatcaataaatttttttttgctaatatgttaatgatattagcataaactattcgattttttcttttgttgaaaaaactattagattttatgttcttgtccatccttttttgtattatttctaaaatttaaagatgcaaatcctataaaaaaaggtgcaaagctgttttttccttaaatgcatttttaaaaatgtgtaaagctgtctttcctaataaaatttttatgttagttcactgtattctcttctgtaaaaagattccaaattaacctctctttagtcaacccatatttttcttattaacttttccttattttgtgattactgtaattaaatttcatatcaaaagatagtattaaatatgcatactcttcatttcttcagttttattttatttaaaatttaaaccattcccatgattttaattttacaaactataaagttactctcgtaattttattcaatgtggcaaagctccgctttatatctgccatgtcatcttccaccgtggcatatttgggacttgtgatttacttttctaaattttccgtgagctatcttaagatcatgtagcggtgcattgtattaaacgaaatggcacaaaacaataatttaaccattgtaaatacatttctaaagttaatatgtttcttaattttgttttgtcgtaactggttaagttgcacgtgagaagcgtgtggggccatgatgtgaagattgaggccacgtctaagtgggaccaagaaaaactttctgtttcatttcttcgtgaaattttcaataaattaataattgtttagaaataaataaaaaagatttattgtttcggtaccaccaattttgtttgcttcttgaattgtcgtctggtcgctttttaatttttaattagtaatttccgtattaaagaaaaaaaaaaggaaagagaaaatcggaatcattcgataatgttatatagtacggacaagtaggtcttgtcataaaagtgtgatttcctcggtgtgggacaggtcgaccacaccaaacgaatagtctttttcttttccttattttcgttttcatgcctctctctatttttttttattgttaatcgattttttatccactaaacaaacattatcatgatgcgtatctaatgttgttcataccaatttttacatagtaacttgagcacaaaagagttaatcgattatttttgttatagttattgaaaaaacacatatatatttattagggctagacataagtactcgttactcgtcttatattcgctacttgattcgtattcgccttgaaaaaacaaatgctcgtttttaacaaggcaagtaacaagtagtataatttagatacttgcaagtacaaatcaagtaacaagtaatgaaaaaaaactaatactcgactcgtttgactcgatactcgtcattattttaccattttctatacatatattgtattgttttagtgttagacacattttaaaactatattagaagtaaagtaaattttaaataagtaaaaaatatgataaataaaataataagtaattttaagtaattcgaaagtgttacttgcaagtaatttatttgcaagtaattcgcaagtagcaagtaataactcgtaaatacttgtaaataactcgtgaatatcaagtagtaactcgtaagtacatgtaagtaactcgcaagtagcaagtaacaggacaaggcaagtaactcgcaaggcaatcatattttagcaaatacttgaaattgtaagtactcgttttcaataaaccaaatacaattacttatttgattactcgtacaaggcaagtcgagtaacaagtatccctaaaatagcaagtactagccttgcgcccacccctaatacttacgttaaagtggacgatctcaatctctttttacaaccgagaattgtgtaaatatcggttcagtctttctttaccgatacatcatatctattttgaactcaacaacattttttggtgtaatagaagtttttccacatatgatattaaaagaaaaatcaatttagaagaccaaaccacgattattttccttaaaagtaacagtactgaacaactttgaggataaaccagactcgtcgaaaaagacaacttcggttgtcttttctttctcaacttcatttgtatatatattttgtcgacatattcgtttgtctaattatcgattttgctccaatgtcagaaactaagcctaacatcatcacttgttcagagctttttatcattttagaatagactacttatttgtcccattatacgttttcaaattcattttcaatttatattctatatgtggatttctaattaatattgatttcgtaagttagacaaacgaacaagatagatgtggacgtacgtggccgagttcatgctatatatgaaggaaacgtgacaagatgaaaactcctaactttttaaaatcaaacaactagtgtgaattgaattctctaatcatgtatatagctagtgtcgtcaattgctttattttataaacatatacattgattctttcagtcgcggattagttattactaattatttgcgtaatagatagatatttttttcaaattaagtttcaaaaattataaaaacaacgagatatttttttcacctaagatgtttatactttatagagactcaaacaaatattcaacaattttacatagatgatcgaacttaatatttgattttgatccacttgacaattttacatagatgtttttttttccacaaaaaaaactcctacgtttatattgtcccttttacagttaaaccttttcattttcattttgttttatatgctatgtgttatgtatgtactatttctctttaacaacagataatgacatgacattaatatttacattcatattatataaaaagacaagaaaaaatgcggaaagaaagttgaagaacgacatatataacttttgaaaactcgaattggtccatccttatcggcaccaactactagtaggtgtcagtcagattgatccatcccggcttggtctatgcacgagtttaacggatgacatatacatataaggtcgattcgttttttttttagttcacgggtcattttttgttttctttctaattttattctgattctaatttaagggttagtctggttgatccgttttttaatatgtatattatgattttatgataaataattacatatctatatatatttatgatgaatatgaaacaagtctaaaaatataaatataaaaacatgaaagggtcatatatattgattggttgattctccgaagccaccaccactatttctcttcattacatgattgcattaatgataaaaaaaaagattatttagtaaaactatttggttagaaggaatcgtcaattcacaaaagtgatgctcatggtgtaaattggttcgatcatcacctcccccttttttctttagaaaaagtaataataaaagaaaatgtcgcataatgttcttttctttggttaaggtgacgaattttttttattcaacaaacatatttttaagaagtcgataattttatttggaaaaggttaatttcttagggcttctcgattttgccgaaacgtcaacatgggagtatgacttatttttttcacaaagtatgagtgtgtgacttttttttgggtatacatacggcataaaaagaaaatttcttacgaaacattgtgcatatgggggatgtgaatttggttttgttttgaaaagacaatttcacagacgtaacaaccggactaaagcaaagcaacgtgtaagtaaagaaaacacgaagatagataaagttgagactactaaataaaataaattaggaagacacaattacaatctgtatatatccattataatttcaaagtaaaaggtttatctgtgacaaacaaattaaaaaaataagaggttcatctaacaagcatattataacaattaggtggtgatctagacttgggaattgataattatattaatcatgatgtaggataagatataataaattaaatagtgcttgctaagttggagaagggagggcatattaggtgaagattttagtgtacttttagaaacacatgcacagcttaagaataattagtggagactgatcagaacctacggctaatttgtctgtattatatgataatgacatcgtaaactttattaaacatctaatagaaagtcctataaatgcttaatcatgtgaccaattcgtagatcacttttttgtaaatattattttaattaaaattcatgactgtatgtgtttaccagcaaacaaacaaatttcatcatatgcatgccacaaattgtatttaatatctacaaatatatatatgtaagaagctctagaacatatatgtaagcagctagaaacaaaagcatgatattgtattagttattataatgatccctaaattacgaaacttaatggtgcgaagcatcgtaaaaaagttacaaaaggattcaaaaatggtggactacacttgtcgaaagcaaaaagaagaaaagtcactttgccttttaacctgattttcaagtgacttttttgttttttgttttttaatataataatttcataattagagtaagggataatggcaattatgagcatccttatttttttaaccttccatcatgtatttgccccccttccttcatgtttgcttaagtcagtgggacaaaaaagaaaaagtgagatcaaaagtaaaccaactaattatataacaaagtgcacaaacgtagtattttattaggactttaggagtatctaatctggatttttactttctaatattcggattatggttttccgactctatagctataggaatcgactcaaatccatatccataattaatatggttcatatttttgtcaaacaaagtatataactggtttaaattttctgaagaagctttttaatttagtattttctccacctcataatttagcttaccatatattatctaatgaagacaaattaaaagtcagatcaaatagttcaaaccaatatataaactacaatgtataaaagggtcgactcccaaacttgagtgaaattaagtattttaaaactcacacgttattttaatccgtgttttgttcaggtttataacatatcgtttaacttggaataatgtttggttccactataagtttatcacacataagttttggtccgatattcgcctttaaattctacttttccaaacgtgagacgaaacttttttgtttactttggaacaagttcttgttctctttgcttttataaagtaacttatttgattttatttgcaaatgcgaccaatgtctaaatggatatctacatatacgtctttcttttgtttatatatacaaaagcgtcgaccatatgaggtcacaaaaataagaaaaaaactaactatttaaacctcgaaaagggttaatagttgagaataaaaggaaaaactgatagattagggacaaaaatcgatgactatgcaataaaaagaaaggttggacaacgaagttgataaataaaaaatggttacaaaatgaaggagtacttgtcattaagaaaatcgaattaggttagatttattgtcattactcattatcatgattatcatcatcgccaccacctatctaaaatcgaatcatgtaaatgcactccacatttcttttttttccccaccaatcccgccgattaagttttgaccacgacatcgatcagatctaatcacactcactccatcaaatatctttgattactttatatatttcatataaaacaaaagataaattagtaagtattctatgattaacattgtcatgatttggacaaacatcgactaccgtgctaatctttgaactcaatatgccttaaatttatgtccaacggtgcattataacttggtttacattacaataatagtatcgtgattagctgaccgctttaaattttgagtgattaattattacaagaataaccggccacgctaattacatataggttctgtataaaacttacgcgtgtatacatgagttttctaagtcgtaactcgaaagatatctcttcaaatatatattttttgttgaagtcttcaaatatatagttgaacatgaataataatgtttgtctatatctatttttcatcttaataaaaatatgtaactttagagacgattttgagaaattacaaataatacagtactattttagggttacttttcaaatatatcattttgtttccacatatacaatttttagtctgtctagcgtgatatctttttttttaaaaatagcgtatgtgctaacttaaaaaaataaaattccatgggcatatcaatttaagaaaaaactttacatttatgcatataaactatacatttatgttataaactaaaatttacaaagaaaacagttttcaattaaaatcactatgctcagttatatctttgtaaacttctggtgagtatatatgttttaattagtgtaatgtcattacaagtaaaagagtaaacaataatgtctcataaaatggaactttaaatctaccattacgatgtgaactgcatttcgcctcaattataatatcatattttcgcatttatctcatatatagtaatgctatacatttttgtttaaatattaatttgagattcaattctaacacgccagactatacctacatagtctattttcctttgaactagtgtctatataaatcatctatcatgctttcgtaagaagggttccatttcctaatataatgctctattattaagaagaccatatgttaaagtatgagcagaagggaaataaaagataccaacatatttaaactatatacaattatagctagtcaatacatgattatatgtgaatgtgactatacaatatacacatgtcccatatatagccattaatatcacgagatttgtcaacaataataataatgctcaaccacaaatgtcataggagggggtccaaataaaatttcaataatgtctttttttctaaagttgagtacgtttgatatgacaaaaaattttgggcttttatttatctgtgtactattaaattaaaatgtgaatatatataaggacaaaattgattagacgttttacgagggtcttctgtttatttttggcttttgattgtttctatcacttttgtggaccaattcatgttttcttataaactaataaaggataaatattcgaacaatcaaactacttttatttaggccatgagagttataattgtattagtctaaacaaattagaattcttttacttaagaaatttgtagccacaatcaacatagtttcttttgtaacatctctactagaacaataatattgacattttacatatgatttgagaaaaaaaaatgaagtagaacaactaaaaagaaactatctagctaatcaaacaggggacacgcacacgatatattagccgtaggcgacccaactgagctaatgctaatggctcccaccacactaatagatcagtcccaaccaaaaacctatgtggtgtttggaattagaggggctattaaaattttagttatacccgaaaaggaataaaaaatgcgtcaatatctttaagcagccccaagattctaatcttaggcggctatgatgactaaaaaaaccaatcaaaggaaatgtgatttggataatttttagttaaatgtcaatatcagtcccaaccgatacgttgatgagactattactatatcattcctcgatatgcatgcatacattcaagttacagcaaattgtctcgttactaaaatattcattatttactctttaagttatgaaatgattgaaaaatattcatttttatatctaaataagtagtatatatataaaagtagtaaattaataatgtttttttttaatcaaaattcaagtatgccacctagtacaacaaaaactatactcctgtatatttgtaacaacaattcatacagtcaaaatttcatttgttaaaaacatgagatataattaataaaatacaatttcttgatttctagctatggaaactaatattctcccttgagttggattaaccgcatgacacatttatagatccaatacggtagtatgcgttgtcaatctaactattgacagtttacgctcttgctcattaaaaccaaatagactatcgtagattttgtctaagagttgcacaaaatgtcttctatcctttcttttcacaaggattgcatatgtttgactttcttcctcgtaacatcaacgcctacttcgtaaatttttattttattttgtctcgataaataataaattcatatttcatgacaattgttagatcctcagaaatctgaaataccagtatgctagaaatgccacatatttgtaacttcttttagattcaacttgttgtatttcagcttttgcttcttagtaaaattaatttcggtggtttatttttgaaaaatcacacatacgacatcatttgatacaagtgtaaaaactgtttagtacaatttttcaattccttgaaagctaaaagggtttcatattctaaaacgcataacaaatacgatacatattcaaatgcacgtagatgtatataccgagatacatgtggtttaacctgctcaatggtgaaaaatccaactctacaaacgttaacaccataattaattgttttcatagtctaaacgcaactaatttcctgtaaaaagtatcagtaccaacatggcctatatcaagtacacaaaaacatcattaactgttattccaatttcattgagcattgagttgtatcagcatcatccatgttggttcatgtgggtcattcacgagaccaatggatggtgacagaaaacatgcattttcaattagcaggtgagttaataaatgaactaataccacttttattattataagcttaatgagtgtatttggatattttttgttttagttaaagtaaacatacataatgatgacaaaaaacaaacgatattttattttgtcaacatttcctatacgatgcatagacatgatcaatgcagtgagatattttgtcaactaatcatatcaatgctcaatgaaatcaaaatggatattttgacggttcacggtttgattggtctaacacaccggtccgacaaggctttggaaaccattttttatatccatctgattaccaagaaaatatactgtataagataaacacaatcaatcaatagtatataagaccattctctaaacactatctttaattataatgtgagtggatcactcgtatctcggatttcagcccaatttgttttaacatgataggcttgttaaacgagaggctggctcatccatcgaattcctttgacatgatccaaagttactcttatcgcaaatagattagactacggttcaagccataacacttaaatccacacttcatagtctcttgaccaaacaacacacttatgcacactatctttttaaataaaacaaccgtaatttgggtcgatacatatagggttccttatgtaagcccaaaatgtaaattggctttaatcagccattaaatgggccaacaaggcctttaaatcaaaacagtataacgacaaaaacgtacttggacgtcaaaaacagatagacacgtggcagtttattgttgatagacaaaaatcgtgaagccgcttcttggaatggagattcttcactttggtggactagagactctttgaggtctcaagttaactctttaaagtttaaaccttttgacttaattcaaagccgtacaactttttttgttcgccgccgcgtcgccggaaaatcatcaccgttagtcttcttctcttccttggtttatctttttgctgctaaaatcaaatttagggtttaatcacttcactgttgtaacaattactgattcttactcaaattgattcgttgaggcattgtcttttcgaatttgatagttttaactgaatcttcttgtattagcttcaagcttatatactatgtgaatttggtagcaggtatatgcgataaacatggcgactctgaagccgtcatttactgtttctccgccgaatagtaatccgattagatttggaagttttccgccgcaatgctttctccgtgttccgaaaccgcggcgacttatattgcctaggtttcggaagacgactggtggtggcggcggcttgattcgatgtgagcttccagattttcatctatcagcaacagcaactactggttagttttttgttttatcttgatatatgagtttttttggaattgtagtcataatgtattgctcaatttggttacagtatcaggtgtatcgacggtgaatttagtggatcaagttcagattcctaaaggtgaaatgtggagtgttcacaagtttggtgggacttgtgtgggaaactctcagaggatcagaaatgtagcagaggttataatcaatgataattccgaaagaaaacttgtggttgtctcggcgatgtcgaaggttacggacatgatgtatgacttaatccgcaaggcacaatcacgagatgattcttatttatccgcgttggaagctgtcttggaaaagcatcgtttaacagctcgtgaccttctcgatggagatgatctcgctagtttcttgtcacatttgcataatgatattagtaatcttaaagcaatgcttcgtgctatatacataggtagtgtgatagtaatcttatttacttttactttgagatttcagaggaaggaactgacatctttcatttgcagctggccatgcatcagagtcgttttcagattttgttgcaggacatggggagctttggtctgctcagatgctatcatatgttgtcagaaaggtttgaattatgagttatgataattacatgtgaagttattgaggttgtatgcttttatcatctctcttttctttttactgtagactgggcttgagtgcaagtggatggatactagagacgtgctcattgttaatcccaccagctctaatcaggttgatcctgattttggtgaatctgagaagagactcgataaatggttctccttaaatccgtcgaaaattattattgcgactgggtttattgctagcactccgcaaaatattccaacaactttgaaaagagatgggagtgatttctcagcagctattatgggtgctttattgagagctcgtcaagtaaccatttggacagatgttgatggtgtatacagtgcggatcctcgtaaaggtatgtcctgttttttttttctttgcctgtaaaccgttttacaaataactagaagttttgctgcagttaatgaggcagtgatactccagacactttcttatcaagaggcctgggaaatggtaaactttgcgttcctgttatcctaaattcaggaggccaagtacaaacttctgatcaaaactcttaacttcatgcagtcttattttggagcaaatgtgttacatcctcgcaccatcattcctgtgatgcgatataatattccgattgtgattagaaatattttcaatctctctgcaccgggaacaataatctgtcaacctcctgaagatgattatgaccttaaactgacaactcctgtcaaagggtttgcaactattgacaatttggccctcataaatgttgaagggtaagctactttctccgttgatgtgcgagtgttatttccattcttttaaataacaagctgcattcatacctatcctattgactgctctcttccaattcattctgatagtactggaatggctggtgtacccggtactgcaagtgacatttttggctgtgtaaaagatgttggagctaatgtgattatgatatcacaggtgccttagtttctaactttaccttagtattatagcaaattttttcattatagaggcagagtcttatgtcatggatatattcattgttcaggctagcagtgagcattctgtgtgctttgctgtgcctgagaaggaagtaaacgcagtctctgaggcattgcggtcgagatttagtgaagctttacaagcgggacgtctttctcaggtctctctctctctgattctgttttacctaggacaggtcttccctgcataatctaattcagcatatatttgataaatttttctgggccagttcactattttgaacaatagtatattttattttctcagattgaggtgataccaaactgtagcatcttagctgcagtcggccagaaaatggctagtacacctggagttagttgtacacttttcagtgctttggcgaaggtgattattacttaaatactgtaaccagcatgatgagggatcatccatctcatatactatcgtttgcttgattgctcccttgtaattgcttgtttttgtatctcgcttgtaggctaatattaatgtccgagctatatctcaaggttgttctgagtacaatgttactgtcgttattaaacgtgaagatagcgttaaggcgttaagagctgtacactcgaggtttttcttgtcaagaacaacattagcaatgggaatcgtaggaccgggcttgattggtgcaacattacttgaccagctgcgggatcaggtgaacttcataatgttgttgagtcttttcaaaatgctacattaccttctttctggctctattggtcctttacgaagctgattaggcatttaattatgtttttcaggctgctgttctcaaacaagaatttaacattgatctgcgtgttttgggaatcactggttcaaagaagatgttattgagtgacatgtaagaatgactaattctgtacatttcttgattctgtcgcggctgtagtattttatctgaaagacattcttattcattctgacattttcttctatatccgcagataattttctctgttttaacaccacatgtgtacctacgttttttattgcagtggtattgatttgtcgagatggagagaacttctaaacgagaagggaacagaggcggatttggataaattcactcaacaagtgcatggaaatcattttatccccaactctgtagtggttgattgtacagcagactctgctattgcaagccgttactatgattggttacgaaagggaattcatgtcattaccccaaataaaaaggctaactcaggtcccctcgatcaggtaatatattcttctcatcaagtatacttcttatgaaactctgttaaagaaactcaataggaaatgttcctgtcctgtgttggtttcttactccactgatgtttctctgtttgtgtgctcagtacttgaaactgagagatcttcaaaggaaatcctacactcattacttctacgaagccactgttggagctggtcttccaattatcagcactttacgtggtctccttgagacaggagataagatactacgcatagagggcatttgcaggtctgttaattaacagatccaccacagtttgactctgagttcttttctgatgatttctcttttggattttgtttttttgttctttcctccagtggaactttgagttatctattcaacaattttgttggagatcgaagtttcagcgaggttgtcactgaagcaaagaacgcaggtttcactgagcctgatccaagagatgatttatctggaactgatgttgcaaggaaggtacgttaactcttctatctatcaaactaacctagtaaagttctgaaactgatgatagtctctctcattgagccaaaacccttctgtttgtgcaggtgattatcctcgctcgagaatctggactgaaattggacctcgctgatctccccattagaagtctcgtaccagaacctctaaaagtataagatctctctatatgtatatctcattaacagcaaaactaacaatgtctgcactcaatgtccttcctaattctactttcagggatgcacttctgttgaagaattcatggagaaactcccacagtacgatggagacctagcaaaagaaaggctagatgctgaaaactctggggaagtaagattattcacaacaaacgttttccctttcgatcaatgtgatcatattttaaccatatatatatgtatgtaaacttgaatttaggttctgagatatgttggagtggtggacgctgttaaccaaaagggaacagttgaacttcgaagatacaagaaagaacatccatttgcgcagctcgcaggttcagacaacataatagccttcacaacgacaaggtacaaggatcatccacttatagtccgaggacctggagctggtgctcaagtcacggccggtggtatattcagcgacatactaaggcttgcatcttatctcggtgcaccgtcttaactggtgaagaaaacaccccacattagttatcagttttgctattatcttcccgcttaaagtatcagcttcggatcaactaccttttgctggtctttgtagttttttgtggtaacatgtacaatagcaactagttttgttggatatgttttgattttttttaatacagtttcatttgtttaatatttacaaatcaaaacgatttgatatttaataaaaaggagcatttagaatatctatttttttggttttatataatataattaattctccttataagatttctgcaatgtactaccatgcattttttctgaaaaccatgataatacaaatttacaagcggctttccaaatatcagatttaaaatttaaaagcatgcatgcatagatttacacgtaagtgatgttttttcataatgcgtatttttatagaaaccaaactttatttaattattttttgtttacaatgatttaattagcaagcgtgaaaacaagatacgcacacttcgttttaataaaaggcaacacttacgagaaaaaaagaaagaaagatacgtttgtctaaaaaaaaaaaaaaaaaaaaaaaagatacgcaagacgtgttttatatgtcttagaataacataagccaacatgttatattctttactcgtcattatttatttcttcttctttagtggttgtctccgctggttgtctttgtctctttagcatcccatgcttgcgatgcttcaaatttccaaaaatccatatataagacttggtacttatccgatatgacactaaatatactttttgttgcaattcatgaaataagaatagcaactccgttacgaaaatgtaaataaagaaaaaaataaagattcataagtacaaaaagacgaacctgcacgagataggccaaaattatcatcagctccaacatgccatgagaagtaaccaagcaaacctttctgtttagcgtattttactttagccacgacgctctgatgatcatcgtacccaatcaaactcgtcccggcaaagcagtaatctccaaccaccgtcgagtcaaaaaccggtcttgctttgtgatccactattaacctttttatctgatcgtagttgatagaaccctcagctgatgtagctactcggctggtggccgcatcattgccgcttcctagactccaggtccatccaacgtatggaaatcccaagactgctttcttcgccggaagtccggccttaatccactctttcaaaccatagtccccacatggacctatcaaccaaattatattacagttaaacccttgaccaaccaaaataaattactcacctgattttactttttaattgataaatcctatgatcgatctggtcagtcctagtaagaacacacctagtgatatttgtacaaaaggttttaggcaaaagtctgtaaacctctaaacccgaaaccaaagtatgtaatattagttttttttcaaaccccacaggaacacacatactaatatttgtacctttcgggtttgagggatcaaacagagcggcgggtggaccaatggttgtggatgaagagtagaaatcataggcaataaggttaacccaatccaatttttttttaatctcccgaattgggtaggaaacagaatcgtaaaccggagagtagtaaaccgcagccgtcaatagcaaaggcattctttcggtgcgttcagcatcgtcctcaatcgcttctcgccattgttcaagtagttgaccaaagtttctcatctccacatcatcttttgggtacttccaaaccagatcaagtccgtcaaatcgatagtatctagcgctggagatcgcagaccaaatgaaggatttacgagaagtggggttacttgccatagacgcaaacgcggatttatctgcgtttcttccgccgatggacaagagggtttgcacgtgagggtttttcttcttgacgattttagtgaagttggagaattcttgttcgtgagcgccggagacaacgacgctgttggtctgagggtcaaggtcggcaaaggcgcagaaaagatgagtgaagagagttgaatcgattagcacggctgaggattgtgggactacgcttccggtggttggggatgatgcaccatctgggaaccaataggatgctttaactacttccgtatacatttttgtctgaaagtcttttacgaaatgctttctgtgttattttgtttgttgtgccttgcagtacaaactaagagggtgctttcattctctatctatagggaatttgggaagaggtattataaatattgaaagaaaagaatattttcaactttgaatttagaaggattatagtggatttaagttgattttcaaagactgccaaagtctttgttaaatgttgtgactgtgacaccagacccatcaaggagcgcattcatatcatagttgatgtattttttatttcacaaatctctttttaagtttaaaaattaatttatggtagtcaagtagttgaagaatttaacgtataatataagtataaaagttttggtttgactactcccattatgatttcaatcaacgttggcaactggcaagaatatctaaacaacaacatatgttacagatcaacaacatatgaatattttaccaagttatacgtctaataggtatgtcatatctctagagtgggaatgtttatattatagttttttccaacatgaaattaatacactaaaaaggaaaagtatagtcttccaacaatagaaggaataatataaaaaaagacttggttatagtccatagaattaaaaaaggctccggtcatatagtccatattaacaagtctatttgtctaccaatgaactggttcacatgcattataataatattgtacattcttcattaaactggacattaattaattgaggaattcctataagattattgtatgagccgtgcatgtgtacaacattatcgcaactcatataactttgaaaattcaaaatgaaataatgagacggtttggtctagaattgtcacaacatttttattgaaatgtgcagatcagattgtaaatcaatctgttagtcataaaagaatgcatgtttaaaaacaagcacctctattacaattttattgcgttcaagttagtcagaagggagtagattgatagtaaaagatatgctgcatgcttgattctggaatctcttttcattgtggttcactcagtgtcggtcctgataaatatgaggcccaatacaaaacaatttttttttatataagttttgttgataaaagttaaaatttgagaccaaatcttaaaatttcgggaatcagacctatttttgcaataacaaatagataaatttaaaaattaagattaaatattaagtttcagaaacataagacctagttttgcaataacaaattttttgggaggtctaactttgttactaaaacgtttatttagttttggaagctcaatacccatgtacctttgaatgattagttaaagagaatttcaatgtttttctcttatatcgattcagctcttttattcttttcttttctttaggggtttataaagattttagcttttctaaactattgtaaatgatcatttcttttggtatctaaattcatatatcattatatatatttttttcccgataagatgtgaattattgaatgattaaacaaaatatatcaaacaggccacagtaattgtatatttatacgttaatcataagtttgtaagttcaagtcgtacggtctaaatttgttagatgatctcttaataatataaagcaagcatgttgtttgttatttttcatatagaatcaaacatttctttaagaaaagaagaagatatatagaaatcaaacatttttatttattgtataaatttttttttttgtttacaaggatatgatacaacaagcatgttttatttttattacagatagcaagataccgataaggagagaggcgtgttttattttatatcttacaataacacataagcaaacatgttttattcttcactcgtcttttatttatttcttcattcacttttacttgtggccggaactccaccgatggttgtctattaaacaccccatgctttggatgctgtaaatatcaaaatacatatatgagagactcggtagtgttgaattaatcccatatataggatttataatttttgctgcaattcataaacgaaacaaaaaaaaaggtatttatgtagaaaaagaaagaggcgaacctgcattagatagaacagtgttatcgtcagctccaacgttccatgcaaagtaaccaagcagaccgttctgcttagcgtatcacactttggcctcgacgctctgagtatcttcgtacccaatccaaatcttcttggcgaaacaataatgtccgacaaccttggggtcataaacctttgctgcttcctcatcccttatgaacttgtttatctgagcatagtttatagaaccgtcctcagatacgtcatcctcagatttggctacgccggcagcggccgcattataaccggtatctttatcgttttggagagtccaggcccagccaacgtaggagaatcccaagactgctttcttctcgggaagtccgtccttaatccactgtttcaaaccagagtcgccgcttggacctatcaaccaaagtaccaatatatagttccaagttaaacaaaaaaaaaaaaaattgatcaccgaagtatcccttcttaaatgatatactacaactatatatgcttaattataccttcgttgttagaagaaacgtgcagaccggcggttggaacggtaaatttggaggacgacaccggtccgtaaaaatcataggctataatattaacccaatccaagctttctctcatcacttgaaccgggtaggtaaacgtcttgtaaaccgaggagtagtaaaccgcagcggtcaacagcaaagtcggtttgctgctgcgtctgctctcggcctcaaccgctgctcgcaattctccaactagattcccaaagtcggtcatctcatgatcactgtacgggtactcccaggctaaatcgagaccatggaatccgttggatctagcgataaaaatccaagaatcaatgaacgttttccgagactggtggttacttgccatggacgcaaacgcagaattgtttgcattttttccgccgatggacaagagggtcttcacctgagggtttcgaatcttgacggtttccgtgaaggtggaaaatatgaattcgtgcgcttgggagacaaaaactttgtgggagttagcgtcgagatcggcgaaggcgcagaaaaggtgagtgaagagagctgagggaatggtttcggccgaggttatggggtcctgggtctctccatctgggaaccagtacgaagcttttacctcggcggagggggatcccagaatcacagtagaagtcattttggtctcaaagtgtttctttgctttctctttgtgtttctttgcttgttttgctttgtagtagtacctaagagggtgcttcccttctctatttatagggattttggaaatatattttttaaaaaataattaatccagactaattcaattcttgaaaaccaaaggtctttgctaaattaatgctgtcactgtgacaccattcattaagaagctcattcttattatacttgatgtattcttatttaacactttttgtgaagtttaaaccctaatttattgttgagacgtcgttgaagagtactttatcttgctagtttttaaaactagggtccgtctgactttttccacggtgattttaattatgttttcatgctatcaatgtcatggatacacacccttttacacacatacctgatcatatttaatctgctggtattaggccttcagcttatgtatgattcatctattttgtctaacaatctattggttcacaacttcacacgcattaaaaattatatagtaatatgtaaaaaaccgtattcactaaaaattgcacttcatacctggtgtctaattattaatcaaaccattggtcaaacactttactaaagaaacttccacttttagtcatatttaatctcattctataaaattgtgaaaaaatatatttgtacaacaaatttatctgttttatagtgtataatatatgactgtataaatatttatagttgtttaaatgtgtcaaatttgaaaacgcatatttggctacgtctatatttccgagtacatatacattcgtgtgcgtgcatgtttgagcataaagtaaactacacagaaagtttgtttaagggttcggttttcctacatcccttggacctatttcataacaaatctactaaaacaagatagtaattacaattgcacatgatattgaatactattatgcctatcattcattttacatgaataaatcactaatatattttacatcatatttggtggggtgacttcacatacctccttatgtacattttttgaaaataccttgaagcatgcagatcttcataaaacgacatcttggtatttataacaatcgctcaaccgtaagtaagacaaattttttaatttttgtacttaagagttatttagttttagagttctcaccaaatttaattttaaaatatactattcattaagtatttttgattttttaaatcaaaagcttatcttttagaatacttaactaaaacttttgtgtgtttgaaaaaccagtgcaaatatatttattgttcgtccctatatttgatgatgataattttgatttatgtggcgtccataagtctgctattaatcaaaataataaaataaagacttggttatagtctttttaaatattgatattctaacaagtctaagtgtctataaaattgtacagtacacatgcattacaataatattgtgattagattggatattagatattttgtgattaataaatataaactaccatgttggtcactttaattataggtatattatctaattattatttttggaaaattacatatgtaagacttttatttgacaatttaaaagtttttatggggaggaaaaataaaagtttaaaagtttattgggtttccaatttaaaatttaaagttattgtaagccaagttcattagttttttaaaacttttattggacaaaactttaagtatacagtacatcgcaattggatgattcaattgactttaagttcatttgaagtaattgttcgtttagtcgactttgattatgcaatttcatttaatatgtcttccgcttttattatacttgatatttaaagttttggtacaccaattaaggaattttttattttttttattaaaactaaacatcatttataagtttttaaacatgattcaaccaccaataaaacaatctatcgaatataaatcgacaaaaccaatcaaaaactaattaattttgcattaaaaattgaaaacatcatttattttaaaataaaaatattttctcctaaaacataaagtaaaaaaacggagggagtatagtttttcactctacttaataatttttgggataagtgaaattatctatatttttactaccaatgaaatagcatttccccgttactatgtcaaatactcaaattattaacattttacgttataaactgaagtcattgtcgtatctttttttagttaccagttttgcccgagctttacacatctagttatttttacacatatatgactttttaattctagctttggccaagataaaattaataaaagactcgctatagtttatatatctaacaagtctatatgtcacactttataaaaaaaaaaggggttattttgtctaacaatgtgtcggtttacatgaattacaataatattgtgacaagacttgatatttaaatttgtttcgtgattcactaatacatgctagaatatataccaaagtcaaataaatagtatagaagaaaattgtttgatttgagatttcctaaacaatttggttcatataaaataaaattagtagtattatcgttgaatgtgtcaaatacgacaaaacatgtgtgattctgcttattgtgaattaatttttatactatgctctaagatatgtggaggcagcatgacatatatatcttgtacataaaatgacaataagaaaagaatcgattatagtccatatatcataactattattttctcgttataagctataacttttattagtgtattgtttgtttttgaaaaaataagtctgtaattacttatacgagaagacaaaaaaaaaggactcggttatagtctatatttctaaacaagtctatttgtcgaacattgtattagttcacatgcattataataatattatgattagattgaacattagacattttttatgattcatacatgttaaataccatactagtcatttagtaatataggtatattactttatttatttttgaaaataacaaatatatttcgaatttaagaattatttcaatagatatatagctttaattacaatgctagcatttaaagtttttggaaaaagctttatgtacatattcattgcaagctcttacaccaactttttaaaaatttcgagtacagttttgttgtttcttgagtttgattatgcaattctttcatcataggtttttattctactctaaagttttttcaaaccctataagtataatattattgtgattagacttgatatatagaggacacatttgattggataactagttttacaagattagtcacgttttgtttttagttatatttttgagatgctaatgatatctagcagaattactttgtaaaagcattaaaccgtgaaaatttgaggtatatcttgaatgataaaaaataacggaaccacaaaaaatagaaaattttcaataactattatacttatattatttcataaattaaataattacatgtatttgatatttttttgtaacgtaaagtttgtttttcgtattatcacaaggaaaatcgtatattttttggtttacaacgatttatacactctcttataaaaacgtgtatgatatatatcgtaagtgagcataatgtttctattaccctatatctcacctttaggtaccagagactatatgtttagttttaatagtttaaagcatatatatatatagaaaacgaaatcctttatacatctagttattattataggtttttttgctcatgcactatataaatcaatagtccattggaaaaataaaaatcaatagtctatagtccaatcaactaagaatacaaatcaaaacgagtcgaggtacttggactgaaaacaaaatatttgggtcgggccttttaaccgttttcttctgcgcatataaaggattttctattaagaaatgagcagaagaaaatggctttttttcttctcaaggacaagttccgttgttcaaatgcatgcatacatttgcacgttaatatacatatttttgtttttgttttaatcgaataatagataatagtcatttcttagttaactgcttgttggttttactaatgcatttttcacagaaatcaaacctttttttaattgtttattttttggtttacaattacaagcaagcatggtttatttttattacagaaaacaagatacgtagccagaagtttttttttatttctatcttacaataacataagcaaacatgttttattcttcactcgtcaatcgtcataatttgtttcagctttactcgtcctcatgagaacccctggggtatttattctccaccacttgcctcagtattcccccatgcttgtgatgctgtaaaataccaaattccaaatacgagaggttaagtacattttcataaaaagaaaggaaacgaatagcatctacaatatggtttcccttgtggaatgtacaaaagacgaacctgcacgagagagacgagacacatcgtcagctccaacgttccaagcgtagtaaccaagcagacctttgtgcttagtgtatatcactttagtaacgacgctctaaatataatcgtacccaatcaagttgtcccagcgatacagtaaaatccgaccacttccgagtcataaaccgttctagctttgtattccgttatgaatttaactatctgatcatagttgatcgaaccgttagcagtcacggcaactcggtgggtgaccgcaacatcatcaccgtggtccttgtcgtcgtcgagagtccaggaccagccaacgtatggaaatccaaagactgctttcttctccggaagtccggccttaagccaatgtttcaaaccggtgtcgccgcatggacctaccaaccaagttaccaaattctattccagttaaacccttgaccaatcaaaagctactcactttttctacgtagggattatatttagttacgtttatacctttaatggaaggatcatacaacccggcaggtggaccgatttcagtggtcaaaccataaaactcataagcgataagattaacccaatctaagcttctgttgatcgcttggaccgggtaggaaaccgaattgtaatctgaggtgtagtaaaccgcagccgtcaaaagcaaaggccttattccggtacgttgagactcgacctcaactgcggatcgccattcttgaagtagtttcccgaagttgttcatctccacatcattgtttgggtactcccaagccagatcaagtccataaaatccgagagatctagcgatcgagatcgaagacgaaatgaacgattctcgagaggtgcggttacttgccatggacgcaaacgcgaatttgttgtctgtttttttcccgccgatcgacaagagggtcttcacgttatggtttttctacctgacgatttcagtgaaggtggagaattcgtattcgtgcctttgggggatgaagactctgtgggtttcaaggtcgagatctgcgaaggcgcagaaaaggtgagtgaagagagttgagtcaataaggattgctgaggactgtgggattacactgccggttggtttggtttcgccatccggaaaccagtaggcagcttttactacgggtccggaggaggatccgagaatctgagaatcagtcatttcttcgagactcttttttagcaaaattatgctttatgtgtttctttgtttgttgtgctttagtagtgatacaaactgaaagggtgctttctttctctttttatagagattttgggagtagatatcttgaataataaaacaaaagacaaattcaactttgaatttaggagggttttattggttagtggatttttgtttatattttacagccaaaagtctttgctaaatgttgtgacaccattaaaagctcatttttgtcatagttgatgtatctttatttcacatatccttataagtttaagaatttaatttatagcagtcaagtggttaaagattttaacatatactataataagtatgaaaatttgggttcgactactctcattatgattttaaccaattttggcaagaacattagagcacatatattgcataattttggaaagtgtctttaaaactaaaattacaaaatattaataaataaagatgaaaggtctttaaattaaagacaccaaaatatctctatcaggatatttaaaacatcctactattaaatttaaagacacccaaacactaaaatgaaactttacatgttatattttaatggtgagaaaaccctctcataatatgagcgatggaaatggtcttatataggttacccgtacatacatgtctttggattgaattagcttttttccttttctagatcacatattagattatattttggttcaagagcctccggtaatgtaattttaaatttgttacctaaacataacactatcgcacatgagttattgaagaaatttgttttgttcttctaaacgatatatatatatatatatatatatatagtaaccgaaaaagttgaattgtaaccgaaaaatctagtaaacgttgggtatttttaaaaaagttcatggacggagattttgatttgcaattactgttttcttgtttgcgactctgattaggcgaagtcaattgtgtagtttttcacttagtgcaacaaaactcctatttaatctattttgattttgctaatagtatatataaaagacttcttatacgcgtatattatgataatatgatttccaactaggtttatcataatatgaaaatataactaagcttagagaaccaaacaataatctgcttttaattaaaaaaataactcgattttatatatatatatttctaacaagtctatttggctaacaatgtatatattggtcactagatatgtttaatgatatatctagcaagtctatttggctaacaatgtatatattggtcacgagatatgtttaatgatatatctagcaagtctatttggctaacaatgtatatattggtcactagatatgtttaatgatttcttattataaaataccagagttgtcacatgaattatttaaattctcttttggccaaaaaaaaaaaagaatgatttaaattctcttattttgtttttaaaattataaaatttactttatttatcaattttaaaaatgtacttcttcgattcattttaaaagtttttggaaaaacgtttcattacaaatcaacttggataagaatcggtatatatatatatatatatatatatatatatatatatattgctaggtgttggacaaacttttgaattttcacgtacagttttcattttttgtcaacttttactatcgatttgggtagtatactttttcattctacttcacggttaatatctcaaattattaaattttactatttaaatatatccgaaattagacatcttaagctttgttaattaaattagacatctagttattaatattggatatgtatatagtgcggattcttttttttttgtaggttgtccgacataaaattaatactagcttacaaaagaaagtctgctgttaattaagcagagataaaaaagacttcgatatagtccatataacaagtctgtttgtcaaacaatatattacaatgattaaagagtaccaaatgtaacaaattatatgtagaggtatctatacattgcatgctagtcatcggataatgtcgccttttagtattcggatttggatagtatatatactttttcattcaacttcaaaatttccaaaaatatatgtgtgaaatcaactacaaatcttactattcttggcatttttttgtaaactactagtgaaatattttttacggttaatatctggaattatgaaacttatactgttttaaaatatactgaaaaaaaacttttttatcttatgctttgctagtaattaattatacatgtagatatatatgtatgtgtgtgtaatattgaaaagaaaatattgttttactttttttttttttttgttagggtgaggggtgactaaagtccccccaaattattacaaaataaagtaaaaattacaagcaaacatttcgcacaatcgcagatattgttttacccttttgagaagagatattttcaatattaaaacaaaagaaatagtaaacttttgcatttgccggaaatttatcattagttgaaaaaaaaaacgtcgattttaagtaagtcttttttatgatagaaatttattgcttttctaatagatgttcacaatttctgtctttgaaataatctaaaaaatttatttcaagatagtattatatattttacatcatttggatcgtatgatcaataccacaatccctactatacgagataacgtgatttattaaagtcaaaatctggtagagaagccatagaagtagaccgtcaaccactttactaagacacttgatttaaatttaagtttaatatttcaaatacgacctttttagtttattatttatgctcacattataaatatgattgtatatttgtatatatttattttatttgaatgtgtcaattttattagaaaatttctgtgattacaattattgtaaaattttatataaagccgatacctctgaaaagtggaaaataaaagactgtattatatatagaccatatatatttaattgtttatatagaaaatgtagagtaaattcatcattcttttttgtagtatataatgtatagtatgtatttatcattgaatgtgtcatatactataaacctgtgtaattaatgcttataatatgctctgatatttgtggggcggcatgacggatatcttgattcttgaatataaaagaaagtaataataaagactcgattatagtccataaatctttattgttattttctcgtcattatctatataaatctaacccatatcttgtttcacgacttcacgttacgctaacaactaatatattgtgactagattaagtaaaactaatccggtcacattgattatatttagtatctctgtggtagtagtgtttatgcctaagtttaattataaaagatttaacaattaattaagacttaaaaccaaaatttcgatgccaaaaacattcttcaaggatattccattgcgtgtattacatctttgctctccaaaacaaaagatataaaattattatgtctcatgttaggtagattgtgagcagcccaaaatagtctttgcacataaacctcaaaattggaggttgtggtatgaatgattttccgtgcatcaaaacgaattatatcaacaaaaaaaggattccgaaaagttatttcgccatatattccaaggtgttaaatatattaaaacgaaatctttagtgttttttgattattccacaaactttttattaagttcaactctttccgcaatttaattactcggctatttcgttattataatattttctctgtttttttataattgattttctagaaaaacacatatattaagaaaacatattaaaactgataataaaaatattaattttttgtgatttatattttgcaataattcttaatcaatgatatttaattatttgtcttgaattttaaaattcattattaataactaataaacagtatataaaaaacctaaaaaattaattttttgaaacaatttttttcttctaaacaatcaagtaataacaaacagagaaagtagtatttagctgactaaaccctttaaacactcatactttagatttatggtaatgtgaaaactaacatgttctttcgtatataacaccaaaaatcactgttatcttattctataaaggagtaccgtgtcttatcgaaaacaacatgtattaaaattataatcaagacgacacatagtatcaaggaatatatatagtttaaaatgtgttaatcggtcaattatatttattcgtattttgatattttctaatatgtttatacatggctccaaatatgtaatctctttttttattttttctgaaaacgtggacaaagtgattcaaatgcttatttcataaaaataaaactgtagcattctttaacacaactttctttttttgtttttacttttaaatatttagaaatttaagtcctaaagtttttcatcttttagaggcaaaatccacatcatattacttttttttttttgaaaaagatcctttttcaataaacgtcgaatcaagtatctccaccaaaataaattactgctagccaacatcacgttggtcttcgacacaacttcaaatttcaaacgaaccaatatgtagtatgggtaaaaaaataaaagacaacgcctttatttgattttacaataagataagcaaacatgtttttatttttttcttgaaagagataagcaaacgcctttagcaaaacaagcaaaagaaaagaaaagaaaagaaaatgaaacgtctttattttctgacaattagacaagcacacaatatatttttcacttttcgtcgttgtgggaactcgtcttggatttttattctccggctgctacacttccatgtccggtggatagctctgtagtatcccatgctattgatgctgtaaaaaccaccaaaagccatttaaaactcactactgctaatctgatcagatactaattttttttccccaattaatagattcaaatatatagtataaaaaaaacttgcaaaacaataatttccgaatgtgataattcaaatttaaggatatagtaaaaagaaagttaatgaaaacgaacctgcacgagaaagaccacaattatagtcagctccaacatgccacgagaagtaaccaagcaaaccttttagcttagcgtatctcactttggacacaatactctgattatcatcgtaaccaatccacgtggtcccgacgtaacaatagaatccgatcaccgccggatcatggaatgtggctgctccgttatcgataatatagttccttatcttggcataggttatagaaccgtccgatgatatcgctgctccatcggtggctgcatcatagccgttattctcggcgtcctcgagagtccaagcccaaccacagtatgagaatcctaacactgctttcttcgccggaagtttagcctcaagccacttactcaacccggagtcgccacttcgacctatgtaattcaactttaattagataaattggttttgagtgcaaaatatatatgtaaaagtaaaatgatatttataaagtaaaatgtaaaatatatatgatattaacaaaattcacaacctctgtctaaaataaattttttagaaataagaggtaataatgcagaaacctgtaatttaaatcacaccataataatatatttcatgatttggttttaaattttgaagtcgtagatgaatgagtgaatgatgttaagcatttattttctatcaattttgatttcattgtctatgtatatatatatgttgatagtaaggaaaaactgcagttgtgttacgggtttagttatggtttatacctgctgggttggaaggatcaaatagagcagcgggtggcccggtcactggcgaccaacccggtccataaaaatcgtaggccataatgttaacaaaatccaaattgtcggcaatggcttgaaccgggtactcctcaccatagtaatccggggagtagtaaaccgcagccgtcaagagcaaaggcagttgattagttctgtcagactcttccacaaccgcagctcgccattctttcacgagtttcccaaagttggccatctccacgtcattgcttggatactcccaagctaggtcgaggccgtagaaatccttcttcctagcgatatcgatcgaggaatcaatgaacgctttccggtttttgctgttacttgccatggacgctaacacagctttgtctgcatctttacccccgatcgacaagagagtttgcacgtccgtgtttttgtctttaacggtatgggtaaagctggagacttggcatgagttcgcggcagagatagtgacttcatgggtggaagagtcgacgtcagcgaaggcgcagaaaagatgggtgaagcgagttgagtcaatgtttccggcagggaagtcgttttccggcttcacaacccagtaggaagcttttacgatcgagttggttcggagaaactgagtttgatcagccattttggtcgagggtctttagcaaagtgctttctgtgtttgtttgtgttttgtaattatgaggatggtatcgttgtctatttataagggtttagagaaatgatatggttaagttttggaaaataaaaacaaacttcaactttgagtttagtatttcgaaagcaaaaagtctttgctaaggatgtgagtggcacaaaaaaaaaagcttgtatatagtatttcaatttctaatttcgtgttgggatttttatttttttaatatggcttgtccaacatgaaattagaaattaacaaaaaataaagtctacggttaataaaaagaaaataaagactgggtttcttagtctatatatctaacaatttatctgttaacgtcgttctaacaagtaccaagtattggctcacatttcaataatgaaaattgcgattagatgggatggggtgggcatcgaatatgttaaaatgattaactaagacaagaatatttatcaaaaataaactaactaaaacaagaatactaaagcagccaccataatgatatgtatgccaagtattcttcggtttcggtacacagtacatgaattcattgtcgttgacaatttatacattcatatttgaattttcatcatcttaattataacacggtgattggattagtacaaaaatttagattattactataagatgatatcatacagataaatgtgttttatcataattagtattatataatcttttatatttccgaggtgaaattagtagctgccaataaagaatagtgtatgaaaatacaaaatttgtcttcaaaaaataagcaaggacaaaaagacggtaaaatcaatgaaacaacatataagaaaaagggaagaaaaagactggattctaaagtccattatatgctcaaattaatccttaaacttattttctcaaataaaaagattgaattccacaaaattaaattattagtatttgaaatcaccctaaaccagaaattaacgttaattaaaagacaaataagtgaataaaattaaattgtaaatcaaatagattaaagtgttgagtataaagaatttttcagaaaatatatgaatagcaaatctagcagttaattagaattattaccgaaccattctaaaactcaaataactattgtaaaatcaacaaactttcgttgtattgataatttgtgcctaataatattgattccaccttatatataaatccctagaactagtcaagcattaaatttaggatttgataatttcacataggtttctaaaccaactcttgtttgtatctagttatttgtgcccacctaagatagttctagtaataaatgctctttaagatcatatctattaacctaagatcaagttctaaatgatcaatgtagaactagcattaagaataatcaaagatggggaactctatagataaattctaagaggttatcgatctactaattcatccaagtccataataagaatccctaaatccaacaaggtgattactcagacataattatatgaacactaatccgaataaattgaattaaaagagtaaagagataaagtttaagggaaatatgaatcttctcttaaggaatctgattattctctccaaactagtacaaaatttctttctacaaaaaacgttacgtctaaataatgaccttaaaaatctatttatatgttcttaaaaacgtgcataaacttattttgcaaatagaaaatagttatgggcttttcgtaacttttgaaacttgtgaaaaaatgggaggcttcttgacacaaaggttgtcaactgacaccaatgcagtgtcgatcaataccgacacctctttgacgtttcaagttgctcttcttagctaattagctccaaaaactctaaagctctctataaatatatatttgtgaagactcgaaaaaacacaaaaaaaaatcaaaaaaaatctaaaaatcatactaatatcatagttaaaaacagtaaaaccatgatatatcagtccataattctgtagataaacattttgtgtcagcctgtcaggcaaacatcaataacagatctatacttctaaacatcaataatttttctactatttaattgtaagagttgaactttttaaagttatcagggttttaatttctcaactaattaatctttaaagtttttattaactaaaacattacaatgatcaattatgtatatctttatagatcggtcatccactttcattagtaaatgaaaccactagctaaaactgtatacatatgtatataacaggctaataaactacctatagactctatcaataaacttttggatatatagacgtgcagaaaacatgttagatctgtcatctgtatacctaaagccattaatcaaaaactggttttagaattatccagacccatacaagatggaaacttttaataagaaaatcaatatcataacagatgttttaatatgctttttccataaatcttaggttaagatcacaagaatgtttcagttacatatcataatctcttaagttggtatcaatccattgaagacgatcgacacgacgacaattctgtagttctacattggaactctcatcttcgacgttgaacttgtcaggaacaagaggccttaattaacaaaaaaatcatttagtacttataatttgctttttctacaaagtatatatatatctagtagaaaaaatatccacttttggagtatcttttaatttgtgaacggaatgtttcaattttgatataaacgagctagtttatggtgtcttactcacatcttcaccagatacactttagcttgtcgaattctaaatttaaagttgtttgtttactcgaaatattaataattgaaatgtgaaccaatatctacattcacataatatagacaaaaatccagtctttttattttcttttttcttagtcgtagactattattattattttgttgtcaattactaatatcatgttgggcaagccatattacaaaataaatcccactttacacatatcctatgatttttttttttaatatatagaaatacttcaacttgatataaaatagttttttttttttctaaatggtgccactcacatcatttacctgaaatttgtttttattttccaaaacttaaccatatcatttctctaaacccttataaatagacaacgaaaccatccccataattacaaaacacaaacaaacacataaagcactttgctaaagaccctcgaccaaaatggctgatcaaactcagtttctccgaaccaactcgatcgtaaaagcttcctactggtttccggatggcaaatcccaatcacccgagtgtttaagccaaggaaccccatcctcgtttattgactcaactctcttcactcacctcttctgcgctttcgctgacgtcgactcttccacccatgaagtcactatctctgccgcgaactcataccaattctccagctttaccgaaaccgttaaagagaaaaacacggacgtgcaaactctcttgtcgatcggtggtaaagatgcagacaaagctgtgttagcgtccatggcaagtaacagcaaaaaccggaaagcgttcattgattcctcgatcgatatcgctaggaagaaggatttctacggcctcgacctagcttgggagtatccgagcaatgacgtggagatgaccaactttgggaaactcctggaagaatggcgagcggcggttgtggaagagtctgacaaaactaatcaactgcctttgctcttgacggctgcggtttactactccccgcaatacgatggtgtggagtacccggtaaaagccattgccgacaatttggattttgttaacataatggcctacgatttttatggaccgggttggtcgccggtgacggggccacccgctgccctgtttcatgatccttctaacccagcaggtatgaaccataattaaatcgtaacacaattgaagtgtttcccttactatccatacaaacaaaaaaaaaatagagaaagaaaatagaagtttttttcttttttgttaatcaatcaatcgagaaaaaatagaagtttataacactcatttttacacgtttaaatatttgtttttctcttggattttaagttttttaaaaccaaatcatgaaacatattactatctatggaatgtgatccaaataacaggtttctgcgttacaatagaattaattatttctaattataactttacgtagatttttcgcatatatatttatgaaatagaaatttaaaactgaattacaacacaggtcgaagcggcaactccgggttgaggaaatggcttgatgaggctaaacttccgccaaagaaagcagtgttagggttcccatactgtggatgggcttggactctcgaagacgccgagaataacggctatgatgcagccaccgatggagcagcgatatcacccgacggttctataacctatgccaagataaggaactatattgtcgataacggagcagccacattccatgatccggcggtgatcggcttctattgctacgtgggcaacacgtggattggttacgatgataatcagagtattgtgtacaaagtgaaatacgctaagtttactggtctgcttggttacttctcgtggcatgttggagctgactataattgcggtctctctcgtgcaggttcgttttcattttaacttctaatcaaactttttttttttttactatatcgttgaatttgcattatcacatttgaaattaataactgtgctgcaattttatatctttctcttacatgaattcgaaagaaatagtatctgatcttattaatagtaaagagttttaaatgacttttgggtttttacagcatcaatagcatgggatactacggagtaaaacacaggacatgaacttctcgccgaagaataaaactcggagacgaccaaaagtgaaagaagaaaaacaaaataaaaaataaacacgtttgctttcttttctttttctatttgtttgctaaagacgtttgctgttcctttcctttgatttgttgctgaagaggtctgtttattggttatatattatcgtaagaaaaacataaagacgttttattgtaaaacaaaataaagacgtttgcttatattactgtttttttttaatgaatgttaagttttatactatttttgattggagacagatttttacagtgataaacaagtggcagaaaaaaaaccaaaaattacaaacgaaataacaaacaaaagcctacaatttcacaacggaaagcataagccaaacaaacactaaaggcccgagaaaaaacaccatttccaaaccgtgaagtttatttctgagataaattcaaactgaaatagaaactcaattcgcgaaagttttcaaaagtataaaatatgagaactaaatatttaaaatgttacaaattttaatataaaaattttccaattaacgcgtgttaaaatagttgacatgtgttgtgattaaacactaatatgataaaatttatgtttttcagaattatatacgagaaaaaagttagttttcacaacaccacaaaataaaaaatatataattgttttaatcttggaccgtatatcaactaaacagtgcaataacagaaaaatcgagtaataaaatagcggaaagaattgaacaagatatagcttatgtgggtgtgtagaatcaatttgttaagtttcacgattttcaaattcataaccaattgttaataagaaagcgttgtttttcctataaaaatatgcaaacatgctttttttatttgtacaacaatagcgaagcaaattattatcaaagaaaaaaaattcaatatataagcaaactggttgttttattcttctttttgacatcaactagtttgttttctttaaaataagcaaacaggtttataaaaggcagcaaacgtgtttgttggtctccttcacttgccaatgtcagaatcagggtggcaaccttagaagtttaaaaccatatttcggatcattctttctccgtattatcccatgcttctgacgctgtaaaaaccaaattcaattcatcaaacttcctagttcctactgttataaattatcgtcctagagtactccaagtgctatttattatatggatcggatgataaatcttagtatatttccaattcatacatcaaataagtatatggtaaggagacgaacctgcacttgagagttccgatttgtcgtcacctccaacttgccacgagaagtaaccaagcagacccttctgcttagcgtatatcactttggtgacgatgctctcctcactgtcgtacccgatccaagttgtcccggcgtagcaatagtctccgataactatgttatcatgcaccgtcgtcgctttgttatctactatccacgtctttaactgactgtaactgatctcaccgtcatctgatatcgctggtccagtggtgtctacgtaatatccgtgattcttggggtctgcgagagtccaggcccagccatagtatggaaaccctaacactgctttctccgcaggaagtccggcatcaatccagtccttcacgcctgagtctccacttggacctaaccataaaagtgagaacagaaaacttaaggtgttggatgaagatatagtgtgtaaaataatgaagaaatagtaaagattataccgtcggattgaagatacagagcggcgggtggacctgtaacttcggtacaacccggtccgtaaaaatcataagccttaatattaacccaatccaataattcggaaatgaacttaacagggtacactaccccattgtaattggaggagtagtaaaccgtagcggtcaagatcaaaaccggtaattcgctgctataggcctctccctgaacggcgtatcgccattctttcagtagctcagcgaaatcgctcatctctgccgcgtttctcgggtactcccagtctaggtcgaggccatcgaagccgtacgacctagcaatggagattgtagacagaatgaatgatttcctaccgtaggagctacttgccatggatgcaaacgcgtctttgttagcattcccgccacctattgacaagagggttttcacctgataattttcccgttggacagtccttgtaaaatccttgaaatctgattggttcgattcggcgatagtgatttcgtttaaatcagagtcgagatcggcaaatgcgcagaagagatgagtaaagagatttgagtcgatttttctatggccggaaaatcatctgacggggaccagtatgaagctttgacgacggagggagacatttttttggtcgagagtcttttaagagaatgctttgatgtgagtttagtttgttttgcttgtagtaataaactttatgggttcgttatctatttatagaggatttggggcaaatatatttttaatttctgaacataaacgaactcaacattaattttctaatttcgattagcgaaaatgtttctggtgatgatgtgagtgggacaccataaacaagctcgtttatatcaaaattgaaaacattctgttcacatattaaaagatacttcaaaagtggatattttttttatcagataccttgtccaacaagaaaataagaagtactaaatgattcatttgttaaggcttgtctatttgctgaaaagttcaacgtcgaagatgagagttctaataggaaccatgctcgagagagaaaacatggtgaaagctcaatttctcattaatgatccaaagagtttgttacaattatgtatagtgtacagactctattaaaccagaaataaccaagagatccaccttaattagatgaataaaccggacattacagagcccttaaccaactctattatccacaaatatagcctaagtatatacaagctaataccccccctcaagatggcagtggggcaaaaatgttgcacactcccatcttgccaataagcttgtgaaactgagccggataaatggccttagccaatggatcaaccacctgttcgccagtctccacaaacatggttctaagaaaacctgattcaactgcctctcgtgtcttataacaatcaagttccacaaatttggttcgctcatggaacactgaattgttgacaatgtgtaaagcagctgtgttgtcagaatagagataagctggaggaatgaatggtaccttgaaatcatcaagaagtctagaaagccaaatcatctccttagtgccttgtgacatagctcggaattctgcttctgctgtactcatagagactgtatcttgcttctttgatttccatgaaacaagagaatctccaatgaacatacaataagcagccacacaacgccgagaatcagtacaggaaccaaagtctgaatctgtgtatcctcttaaatcgaacttgtcatctgcaggatagaaaagaccctgtccaaccgtgcctttgagatagcgaagaaccttatgaacagcattcaaatgaacacttgttggagcatgagaaaactgacacaaagtgttaacagcataagcgatgtcaggtcttgtaatctgcaaatacatcaactttccaaccaactttcgataagaggtagaatcagtcagaggaacaccatcttctttattcagcttaacacttggatccaaaggaatcgaagacggtttactaccaagaaaacctgtagtagacaacagctccagaatgtacttcctttgacaaattgaaatccccttttctgaacgtgcaatctcaataccaagaaagtacttagctgcacccaaatctctcaacttgaaataagacttcaattctgcagtaaactgtgccactcaccatgttacacacaatagagacctatacttagactttaggtccttagaaaatacctttgttagactcccaaatgattgtagagtcaagatagcaggcataggattcattcaactgtctgatgcaatctctctacataatgtgctttatattcctgaatttaaattcaatttgatcagtgttagtgttcttactaagtttttgaaaacaaaagtgagctttacatctgatgaattttttgttcaagaacttacaaaggagttgatgattggtagaggtagtgaagttgggaatctttatgttctggatttcaatgaaaataatcatattgtgtctttaaaaggtactgcttctatgtgtcctgagttttctgtttgttcttctgttgttgttgattctgttacatggcataagagattaggtcatcctgcttattctaagattgatttgttgtctgatgtgttgaaccttaaagataaaaagataaataaagaacattccccggtttgtcatgtttgtcatttgtcaaaacaaaaacatttatcttttcaatatagacaaaacatgtgttctgctgcatttgatttagttcatatagatacttggggacctttctctgtccctactaatgatggttttaaatactttctcactatagttgatgattttagtagagccacttggatttatctgttaaagaacaaatcagatgttttgcatgtttttcctgcttttattaatatggttcatactcaatatcagactaaactcaaatctgttagatcagacaatgcacatgaattacagagcccttaaccaactctattatccacaagcatagcctaagtatatacaagctaataagttccaatgttgatatgaagtactaaaatttatgaaaaaatcacattaaaacttttgttattaaaattgattttcttataacagatctccatcttctatggcttgatatgaagtcccgagattacatgtatcagcaacttctaaaaggtgtgatctggataattctaaaacaattttttgatgaatgagttaggttaggtctataaatctattttttttttgtcaacgtctatatatctaaaaatttgttgatagagaggtatttaattagcctgtttggggtaaacaagtatatagttttagctagttgtttcatttactagtgaaagtggataaccgatttataaagatatacatacttgatcattgtaatgtttcttttaacaaaattaatactttaaagattactttataaaactctgaaaaacgcatgtaaatgtcacgacgaaaaaaaaaacgcatgtaaatatcattaaaatgaaaagtcagggattacaagattacttaacctaagatattgagagcttggaaaaaacgaataaaaccaaggatgtcaatagatatatgggaaaacttttgaaaggacgtttctctcttcttaatgtgatgttgttcttgatgtctcggtcaatacatttgaagatcgcctatatagtttggatatatatatatatataggggcttttttaaatggttttctatatgacggatgaaagaaaaagggttatttgttaaataaacacgttttcaaaaaaaaaaagagagaataggtactttgaaaagtatttagaaaaatagacacattttggtttttctgagatagagaggtgtgtaatagattaaataacaacaacatatcagagactaaatttacattgtgcaatagagatatatttatgtggatccacatttattttatttttcttttttcttttctttgtttgggtaaactctttatttattcttctaattttttttcttctgtttacatcattaaattgaacatgaaggtgcacaagcgtgagtacaccattatattgaagtaataatctgtaaattctcttatagtatatagcaaagtttgtacatttcgtatatcaatctcgtattatttaaaaattattttgtacattaacgttcgtacatctcatcattttgtacattgatgtttgtacattatttcataaaccatcaaatacactgatggaaatattatttcataaaccattaaatacactgatggaaattgttctatcttttatagatgtggtgtacaatagatgtgaaaatgtataatgatgtagacggtacactaggtggtgtatagcccgacctaccatttcgtcgttttatgtaatactatcaatatcatgtacatcatcttattttatagttgtacaacgctataagttatttttttgtgtactattttatacaatgtcgtgcctagtataccacttcttatatcaatattatacattgctttttacattattatcgtacaataccgtatgtataccacttttaacattatcatgtataccgttaaattgagattaaaataagataaaatattacatatctgctaaatataacatatatggagattttagattcacataataaaattaaagattaacatattattgtgataaaaaactatgaatatcttttaacaaaacaaactaaaaagatttagctgaaaagaagaaaaagaatatatgaggaaaacaataaaaaagatactagtgacataatacataagcctttctattcgaggaaaggagagaaaagtgttattctacaaaatttttgtaaaaaagtgtcttctcctaattaaaactcttaaagttgtctactttactaaaatttttcattatatatattatcatagactatctataaagtgggattttatttttaattatgtggcttggtttgtccaacatgaaattagaaattgactacaaaaaaaagtctacggttaagaaaaaagaaaataaagactgggtttttagtctatatatctaacaatttatctgttaacgtcgttctaacatgtattggttcatatttcaataattaatattgcgattagatgcgatggggtgggcattgaatatgttaaatgattaactaaaacaagaatatttttcagaaataaactaaaacaaagaatacgaaagcagccacgttaatgaattcattctcgttgacaacttaattgaattttcatcttaatttaacatggtgattgcattggtacaaaaaagaaagattattactatgagatgatatcatatagtatcataattagtatcatatggtactatctagtgatgttaatttgggtatgaaaactccatttaattaatatgtatgtgtaagagaaattgattcatttaaacgtatttaggaaaaaaagtaaaatagagttaaatgggttagcctaataaaccaatttattaaatgagatttcacacaaataaatgggtattcaattaagcccatttatttttcttattatattagttatttttattaaaaatgttaatacattaaaactaaattattttactaaacttcactttttggtttaaatatttctttttaactgtaaaactgcattttccgccaaaatcgtaaatcgacgttttctgctaaaatcacaaaaattgtttttcaccaatattaaaaatcgtgtttttctgctaaaatcgtaaaccgacgttttctcaccaaagctgtaaaaccatgttttcccgttaaaaatagtgtaggaaaatacaacttttatcttaaaaaaataacgaaggacaaaaagactgctaagatcgatgaaacgacgtataagaagaaaagaaagagtggattctaaagtccaactccgtagataaacaatttgtttcagccaaacataaataacagatctaaacatcaataatgttttcttctgtacacagtacatgataagccaaggattctacggtgggccgggcctggtagtatcccatacttgtgacgctgtaaaaaccaaattcaattcatcaaatttcctaatgttattaattatcgtcctactccaagtgctatctattatatggatcagatgttaaatcttagtatatttccaattcatacataaaataaagtatatggtacgaaggaaaaaaaggaaagtatgtatatggtaaggagacgatcgaaccaacgaaagagtctcgagatggcgccacctccaacgtgctatgaaaagtaacccaagcagacccttctgcttagcgtatctcactttggtcaatatgctcttctcacactgccgtacccgatccaagttgtcccggcgtagcaatagtctccgaccatcatctcatcatgcaccgtcgtcgctccgttctctactatccacgtctttaactgacggaaactgatctcaccgtcagacgatatcgctggtccagtggtgtctgcgtcatagactcatagccattaacgtcccggagggggggggggaatatgttcatctctactgtttcccaagaaaaaaaaactctatccaattatgttcatctcaactgttgtttcaaaccaaggcattgcgctatgaataaagtatacaattccctaattctaatattagattcattatggttttcaaaaaaaaatctggtttcatttctaattattcatgtcaacagttttcttattcatctatgttggtgttataatgcttaattacaatccgagtctaaataagcaaataatatattcccaataataatatgcaaacatgatttatttatttttgtacaacaatacagaagcaaattattatcaaacaacaaaaaaaataaaaaaaaattaagcaaacgtggtatcattattactttttcttgcaattaatataaggcagcaaacgtgtttgttgatctccttcacttgccattttcggaatcaggatggcaaccttagaagcttagaaccaaatttcggatcattccatctctgtaatatcccatgcttgtgacgctataaaaacaaaattcaatatatcaaatttcctactgttataaattatcgtccaattcgtgctatttattacatggatcggatgataaatcttactatatttccaactcatacataaaataagtatatggtaaggagtcgaacctgcactagagagttccgagttgtcgtcacctccaacgtgccacgagaagtaaccaagcagacccttctgcttagcgtatatcactttggtgacgatgctcttctcactgtcgtacccgatccaagttgtcccggcgtagcaatagtctccgaccatcatgtcatcatgcaccttcgtcgctccattatctactatccacgtctgtaactgacggtaactgatctcaccgtcatctgatattgctggtccagtggtgtttgcgtcatagccgttaacgtcggggtctgccagagtccaggcccagccatagtatgggaatcctaacacggcttttttcgcaggaagtccggcttcagtccagtccctcacacctgagtctccacttcgacctaaccataaaagtacgaacagaaaacataaggtgttgcatgaagagatagtgtgtaaaatagtgaagatatatataccgtcggttggaagatacagagaggcgggtggaccagtcactgtagaccaacccggtccgtaaaaatcataggccataagattaatccaatccaagctgttggaaatggccagaacagggtacggtaccccttggtaattcgaggagtagtaaaccgcagctgtcaagatcaaagccgttgtaccgctgctattggactcggcctcaacggccgatcgccattcttccagtagcttcccgaaatcgtacatctcttcctcgtttctcgggtactcccagtctaggtcgaggccatggaagccgtacgacctagcaacggtgattgtcgattgaatgaacgatgccctggagtcggggttacttgccatggatgcgaacgcgtctttgtcagcattaccgccacctattgacaagagtgttttaacgtgaggatttctctgttggacagtctctgtaaaagcgtggaatggtgcttggttccatgtggcgatagtgatttcgtatgactcagcttcgagatcggcaaatgtacagaagaggtgagtgaaaagggatgagtcgatgtccgtggccggaaagtcagtagccgggaaccagtatgaagctttgacgacgtcggactcagacattttttggtcgagagtcttttaaaagaatgctttgttgtgctttgtagtaataaactgaggatgggttcgttatctatttatagaggatttagggcaaagatatttttagtttctgaacataaacaaactcaacattgaatttataatttcgacaaacgaaaatgtctctggtgaagatgtgagtgggacaccacaaacaagctcgtttagattaaaattgaaacattctgttcacatattcaaagatacttccaaagtggatatttctattagataccttattcaacaagaaaataacaagtatacgaaatttaattgttaaggcctctagttcctgacaagttcaatgtcgaagatgagagttccagtgtagaactagatataagtatcgttcgtcttcaatggattgatcaatttaatccactttaccaatttaagaaatttacatgtaacagcaacattcttatgatatttttttgttattaacattcttgtgatcttgacctgaaaggctgaaatttatgaaaataccccatattaaaacattattataatattgattttcttatttaaagtttccatcttctatggcttgatattaaatccggagatttacatgtatcagcaacttcaaaagtgtgtggtctggataattctaaaaccaaattttgatgaatgagtctaacatttttttttttctgggtcaacttctatatatctaaaaatttagatagagtctgagagctattttattagcctgtttggggtatatatgtatatagttagctagtggtttcatttactagtgaaagtggataaccgatttataaagatatacatacttgatcattgtaatctttctgttaataaaaactataaagattagttcagaaaaccatgatagttagaaattttcaaatctcaattaaatttattattttggaaacgtacaggattggtctatttcaacattattgatcgaactaagaagagaaacgaacatatatgcgcatgaaccaacaaaatggttaaattttcgaattatatgtttgaaaaactgctaaatataagatgaagaaataatgtgtatagtatgttggtctagcaataactttgtcaaccatgtattgatctaagatttgagtggatatatgtatctaattagagatatttcgttaggttggatctatagttgtgtatgcatatagtgtttttggaaaatggttttctatatgaagcatgataaagaaagaaaaaaaatacatatctggaacctaatcttaacagcccaatacaaaaagaaaaaacatttagacgacagagtccataggtgcatgggggatacgaacgaatcgaaccatgcagaatccgtactcatcttcgacgacgagaatctatgataccctgatgaagcaccgggttagtggactcgtcaagcggtcttagcaaaccatatctgaagtaaagaacaggcgagttcagggttgttaatttgttataggtggcatgctagaggagaggcttttctttgatggtagagactatcaatttcagaagttgtactgctgatttgggtatatctcgatgaagcatgttgctcttctcagtccaatgttacagtagttcccgatataaggtatcctccggtgcgtttgagaaaattcattagactcccaaatggtgaccaatcgcctgaccaaaaccaggattctcttctattaatatgtaatttcctaaagtagaatgtggttataacatttacgtgaatgttgtaaaaatcatagacttattagttcgtagttagactactatatatggaaacatgtactgtaccaatagaaagggttccttggatttgatttgaattgtttgattcttctttttaacaaaacaaaatgatttgtaattctataaatgaaaagaagcattgcaattaataaacttatagttttattggacaatatatataataagcagataaagtttattttctgtataattacgaaaaaaacttcttcacttgctgttgtcgaaactgtggacagcttaaaccttctgtatagttctggtggttgccgtcgtagcatcccatgcctgtgaagctgtgaaatccccaaaatcgtcaaaaatcataacattttcaattaatattaatatttagaatttggtatcaaatcaaacctgcacgagatagaccagaattatcgtcagcaccgacatgccacgagaagtaaccaagcaaacctctctgcttggcatatctaactttcgtcacaatactctgattatcatcgtaaccaatccaattcgtgccggcataacaataatctccgaccactgtggagttataaaccgttgttgctccgttatctactataaacttccttatctgaccgtaacctatcgaaccatctggtgatatcgccgctccagtggtaggcgcgtagtagctatgactgttggcgtttgtgagacgccacgcgtacccgtagtatggaaatcccaagacagctttcttcgctgggagtccagcttgaatccatgaccttgttccagcgtctccgcttggacctattatcacaaaccggatttaatcattatacaaaaccgggtttaatcattatcgatcgttttatttaatgttgacccttataaaccgaaccaaaatttgcataccgaatattttaaaagctaaacttgtgctgtaacaagaccaaatttcgtgcaagtaaaccaagaaaaatcgaaagaaataaattaaatttgtcaaaatttcatattttagataaattacactaactgtaattatattgaatatatctttacttcttaagattcatgaaacaaaaaagttgtgaattattttagccaaacaaaaaaatggtcgcgacctaaagtttgggatttaattggtttagttcatataatgctgtaccaaaaaataaattgttgtacctgcgtttgaaggatcaaacagagcggctggtggaccggtcactctggaccaacccggtccgtaaaaatcataggccataagattaacccaatccaagctgctagcaacggctgaaaccgggtacagtaccgaatagtaattgttggagtagaaaaccgcagccgccaaaagcaaacgcggtttaccgctgctactagcttctgctacaaccgctgatcgccattctcgaagtagcgttccgaagttggtcatctccgtcgcactgctcggatactcccagtctagatcaagaccgtggaatccataggatctagccactcttatcgaagaatcaatgaatgattttcgagaagtggggttacttgccatagaagcatacgcggttttatctgctattccaccgccgatggacaagagggttttaacagaagggtttctgcgttggacagtttgtgtaaaggttgagaatttaggttggtttgcggaggagacagtgacttgattggtttgagagttgagatcagcgaaagcacaaaaaaggtgagtgaagagagatgagtcaatgtcggtaaccggaaattcactcgccgggaaccagtacgaagcttttacgacagtttgtgccattgagcattggagagtgaggaagaatgttatggagacaatgagcgatatgagttttgttgaagacattttcgagttgctgtgaaaaacagagatggtttgttgtctatttattgaaaaagtatatttactttcttacgtaattcaactttgaaaatgagaaatctatgaataatatcttacgaaagagaaaagtcttagtttttgttttttgctaaacgagaaaaagtcttagttggggcaaaattttgcattttattttgtcaacacacaagtgtgtaatatgaatgcgaaagcaaggaccaagagacacatattcaacttcatttatatcaaagttgaatattcagctcacgtatcctatagaatatccaattgcttacgaaagattttgtttatattcaattttaatcgtatattatatgatttcttgtctaacaagaaaccaatggctactaatagcggtaatgactcattagtgaaagtgtatggttgctgccaagttccatgcatgtgacgtgttgggttaataatggttgtggagagtctctgtctacagagtactgccatttttttaatatgttttttaccaattttgataatatatttttcttcaaacaattttgatactatttagtttttgaagaatcacatcttcaagtatgggttatatatataattcgttctatcaatctctctcgttaaacggaataaaaggagttttggtctcataggccactgcaagtcggcaatcaaattagcatgtcgtatcggattatatatgaaactaatggtaaacagagaatcaaaagaggagagaaaccaaagaacggagtatagatatcttaaggtgaattctattagcatgccaaactctctcatgcgtaaaccaatcccttaatcacttgatatcctctcctacttattgtaaaaacaaaagtcaatatatattctcctaattatttgctcccaatcattatacacatgctgatgtgtggccagtgtactccatgaaatcttgtcaactacatgttcaagtggataccacttttgagtatgaatgggggacaacaagtggctgcaatataatagtggcgttttgggggacagcacgagggactctcaagaaccaaatccctcccaactagtttttctttatgagtgttttcttcttaatgtttgagtttccacttctgttcttatcacattaataccgtcgccttgggctaattgtctcgtttgctcctttctagtccgtcattgtatgaggatcacgtggctgaccaataagccagtctacccccaaactttccaaaactagcttaagattagctaaggccaaagctaatcaatgacgtggactccaaaataatatttgacttttcgggttgagataacacactgagaagagaagggtgacaatgacatctttaaaaagaaacaaattaaatatggtttcttttctaaattaaaaacaaattggttcttgcttctattatattcatatcatattattccttgttgctttggcaataaataagcaaacaacgtttgttttcgcatagttttacaaaaacaaaacttcttcactggccgttttcaacattaatacttctgtaggattaccatcgttgctacctcttagcatcccatgcctgtgacgctgtaaaaatccaaaaaataccaaaataaatcattaaaacattaccttttcgtttctgataagaaaactaacgaatattttattttatttagaattggaataaaaccgaacctgcacgagatagacgagaattatcgtcagctccaatgtgccacgagaaataaccaagtagacctctttgcttagcgtatttcactttcataacaatactttgattatcatcgtaaccaatccaagtcttcttggcataacagtaattctgaaccaaattcgaattataaaccatcgttgctttgttatccactatgaaccttcttatctgatcgtatccgatagaaccgtctggtgatatcgccggtccgctgctattcgcgtagtagttatgattcttggcgtctgtgagacaccatgcgtagccgtataatggaaatcccaagactgctttcttcgccggaagtccagcttgagtccacgctctcactccggcgtcgccgcttggacctatatacatattcaacacgttatatatgtataggttttattactttatcttagcttagttcagttatttttttgtacctgtggttataggatcgtagagaggagctggtgagcaagttactctagacgaacccgattcataaaaatcgtaggcaacaagattaacccaatctaagctatcggcaacggcattaactgggtgtaagaccgaataataactgtaggagtagaataccgcagccgtcaaaagcaaacgcggtttaccgctgcttctagcctctgcttcaaccgccaatcgccattctcgaagtagcttcccgaaattgtccatctccgtcgtaatgctcggatacttccaatttagatcgagaccgtggaatccgcacgatctagcgagcttaatagaagaactaatgaacagttttctagaggtggggttacttgccatagacgcaaacgcgaaattatatgtgaaatcaccgccgatagacaaaagggttttcacggtagggtttctccgtcggacggtttgtgtaaatgttgagaatttgggtttgtttctggaggagacaatgacttgataggttagagtgttgatatcggcgaaagcgcaaaaaaggtgagtgaagagagatgagtcaatttgggccaacggagattcactctccgcaaaccagtaggtagctttcacgactgtttgggcggaggagaatcgtaggaggagagataagaagaaagtgatggaaatgagttttgtggaagacattgttgcgagttactgtgagaaaaacgagcatggtttcgttgattatgtatttatcaaccaattttttttttctacacacgtgttatacgaatgcgaaagcagggaccaagtgacacatgatcaacttcatttatatacactagagtatagaatattaaatgcttaagaaagatttttttaaattcaatttaatcgtatattattttgattccttgattaacaagaaaccaaggagtactatgacaatatgacttatcggtgaaggtgtctggtgctgacaagttcgatgtaaaaaacgagagttccaagaggagaaccttctccattggtaagacgtgttgggttaaagatggtcgtgaagagtctctgtctatatatcaaagaactgcaaaacacacttacatacatacaacaagaaagaaacagagaatttttaaaaaccaaacattgtgatcagatttatcaagacatgaaattgtaaacttctttatttcactcgggattgaagtacaaaactaagaagtaaagaggagagcaaccatatagaaccaagtatagagtcttagggtgtgaatgctatagcatgccaaattctctcatgcccaaaaccaaacacttcatcactttataccccctcctaattgatttgatccctaccaatatacacatgctgatttggctgctcgaggaactcttatcttctccatgtgtgaatctttctgtttatgtggataaaacttttttagagtataatttgtggtctaaaatgaatgaggggcaacaagtggatgcaataataatgtgagtgtggtcttttaggaacaagtagtatgtaatgagtggaggtgaatttgtgaaatttggtttgtgagtggtgttttagggacaataaaaaccaaataaattagttgttctctttagccagttgtctcatgagggttgaatgactcgaataccactttgataagatcttaaacaatactaggcctaaaccaaaaccagcttaagagtgtggacatgtggtgcactaaggaactacctaggtccaacgaccaacactaatctatgtgggactccaaaatagcatttgactatcaagattgagatattaataacacatcatctacaaataaaaacttatatttttggaatttcagattttgcagagtaggctacaagtagaaccaaattttgttttggtttgatttttttttttggttcagactcagttcaaatttggataaaaaattataacaataacaagaataaaatgaattttaaataaatacgatagattatagtaatatgtaaatgtattgttttacctactaaactgaaagtttcaattttcaattttcaataagttttggttaaattaatgaatacattagccttgggcttatgaaaaagacaaaaaaaaaaaaaaaaaaaaacagaactaagaaccaaattattttcgtgtagaagtcatccaagagaatattgtaagttatagtgtcagcaatttctccttgatggtgcactatagaaaaaagcttcataactttgttgatcttttcacctttcagatatcgtagaatgagtatgttgaaagtttgagttaggacgacatggcaatagtatagaatgtcttggctgctgtatccaagttgttacaattgtaacactaactttcaatgaggctaaacaactttccttctaatcatttcgcaaaacatatcttcattttagtcctcttttggcataaccattgaggataccaccgtaaatgataacatcaagagcaacacctattctcagcattttacgcatcatctcctcactctcacgtaatctggtgctctacataggcctctgataagcgaattgaacgtatatatatatctggttgtatctttttgctatgcatttcattgaacaatttaaatgccttaggtagcttaatttgtttgctcaaagtttcaatgaccatgttatacctttttgcatcaatcgtaatacctcttcttctatctgtttcgagatccaatgcaactgccgcatccatagagtcacaagcacctttcacaataggtccatatgttgccacatttgactgaaatcccagtttcatcatctttctcataacaattttttttaaactcttataaaaaaatatttgtataaatcactttaaaactcttgtaaagtctttaaaaacaattgtaaatcttttaaactcctgtaaaaatcattatagaatgttttaaaaggatatacaagagtttttacaaagatttctaaaacccttataaatcctttaattttttttaaaaaaatcctttaaaaccgttttattttctagccaatttttattttttttgcacaaaaatttcccgccaaaattttctgatccaaaatgttctcatccttgtaaatccattaaaaacctttttaaaccgtttaaataccttttaacacaaaaaattctctcaattagaagatcactttacaaagattctagcaattagaagatcactttttaaaaaattgtaaatacttttaaaacaattgtaaatccttttaaaacctttgtacatctcttaaaacttttttttaagcattttaaaacagttctaaattcttttataaactttttaagacaaatgtaaatcttttaaaccctattgaaaaccgttgtaaattctttaaaaccctttaaaaacacttttatatctttttaaaaaccttttaaaaccattgtaaaccctaattttcgggatcaagttttccgtccaaaactacgggatcattaatatttggcaggaaaatttgttgaaaatttttggtggaaaaattattatcggatttttttttgtgggaattcgatttttttattttgttaacttaattatttttaaataaggataaaatagtcgttaaaaataagaagatgacataaataaaaattgcttagaaaaggtatattttaaaaaaaaaataccaaagaaaaggcaattataacaatttcttttgaaagtttcaattttcaatgagttttggttaattcaatgaataatacactagcctttcattctttcatgatatggacatccttgaaagttgaaacattacaatagagacaacaaagatgaattttaaaaagcagcttaaaccgaagcctatatatgtgaagcaagagaaaaataaaatcctgaaaatatgcatttcttgaagcataacgagagttgatggcctgatagtgaatctgaaagcaaaggcacccaataatcacctctatataaaaccaaaccagcaggagagataactttggtgttgccaagaagaagaagcagaggaaagcccgacagtattaagttgaaaaggtcggtccaaaccagccaatttagccctccacagtaactgaacgtcctttattctaatttgagcgggcttcaacaccgcagtatgaagtcttgaatttctttccctccataggcaatagaccacagcttgaaagattaacatgcatactgcctttaaccttttaatggaagatgcgtttctacacaagcaccaatatcaataggcaagcaagctctcaagagtagaatcagatgtcttccccgaggtctaatccatgatccatccgcacaagcttgagagaccgtagccataatttgaattcctgtaactctgggtccattcagcctcgaaatatctatcaatgggccaagtgttgtccaatctgatcatcatgccaatcattatgatgaacgagatgagttttgtggaagacatttttttagttactgtgaaacaaaacaagcaacgtttcgttgtctattatttagcaaccttttatttatacacacaaatgtaatacgaatgcaaagcagggagagaagtgacaaataatcaacttcatttacatctaaagttgaaatttctattcacttatccaaaagtactaggacaatatgactcatcggtgaaggcgtctggtgctgacaagttcaatgtcaaaaacgagagttccaagagtagaaccttctccattggcgagacgtgttgggttaaatatagtcgtgaagagtctctgtctgtcaaagaactgcaaacacaacaagaaacaaacaaaggatttttaaaccaatctttggtactatatgtttctgcaaacaatctgaataatatgactggttctctaaaactttcatatcaaacagattgatactagttcaagtccctgtggctactgaacatgacgtaactaattatgttcttatcacctaaatagtttaggcctaaaccaaaactagcttaagagtgtggtgcactaaggcactaagccaggcccaaagctaatccatgtgggactctaaaataacatatgactttcatattaagatattatatgaaaatgttaaaggagaaagaggtgtgtgtgcacacatacgtttggtgggagaggctcctgtgatgtattctggtatccctgagatggaggtataaccacccgacgaatcccgcctactttcatagacctcacagctgtttcaatccccggaattacctgcacatcaaaatgtttcagtcatcacaaaacatcatcatagagacatagaagaagtattatcaacttcaaaaacccaaaccacttagtttgttacatcactattcaatgaagaaatgtatcaaaggtcacacctttaaatcaaattcagataatttttcaagacccatgtcacaaaaacttggactttatgcaacacatgattgagatagaagcatatagagataaaggtttatactttgctagaaccaaggacgaatgtgaaaggaacagcttcaccattactatctttatgatcatatgttgaatcaaatctccatccttgcttcgcagctaatctcccatagtaatgtatttcaatctaaaattcaaaactttgcaaaattgaatcaaatggttcgttcatttgctgaaatctatacaaaaatacaaaaacacaaaacctgatctccttcaatgggaacgtcaccatcgccgattcggaggtcgagagctttaacgccgccggaattagggatttcagagaagtcggctagtgccggagacgagaagcaaaaggaggagacgacggaagacgtgacggcgataattgacagagatattgatcttctagatgctgctgcaactgtcgatgatgatgatgatgatgatgatggtgcggaagaacgagatgcgaagattctgagagatggcggagatgtgaaatggacggtggtgattaagggagcacctactagtggtgtccacgcgaagcaccgaatcatttttctttcctttttattttataaggaaagtataaaaatgaaggtacacatattctagcttttgagaggtcagaactcagaagtggatggaatttgatttggattgggttgggattacgatagttgctgccaaaacctttctagtggaaacaagaataagctacatattgtattcccttatcaaactttagttttgtgaataaagtgttacgaaagtgtaataagatagatgaaaaaaacaaaagaggaaaaagtaggagataaaacatgatagaataaattcttgatcaaacccctttacctagggctatatatgtacacatttaatagcttttctctgtcaagttgaatgtactgatcaagataacaaatttatcaaaaataaatacatcatactggtttatgagcaagaaacattgctcagaattattaccaaataagatgtttagaaaccaagactcgaaatacttgatcccggtgcagaaagaagcgccaccggtgacaactttaccgatgaaagcttcaacggtgaaatctccacacaactgtgaggccattctcagagacgcagatcctccgatctctctctcctctgttaatctctctgaacagctacggtctggtgttttcttgaaacccaagaaacaggttcatattctttttaagaattagctcacttgtgtttctattttcagaaaataactacgcaaaacggagcctttaggtaaacaaaattgcaaacacagaacttctggttcaaaaaaattgaatctctcatttctaaaataaaaagtagcttaaaaaaatgatcagatcacaaaacaaacgtttccattctgcttggtttagaaagacatgattgctacttccacataggtttcaaatgcttcgaaagataaaataagatagaactaatggactaaagtaacactatcaaaatggtaactttttgttaagaaaatcaatcttaatatatttaagacggaccatgaattcatttggtttgatgatctgcgtataatatatattaaacagatcaaatattgggtggacgagagaaacagcaactgcttcatgctctttgcaaagaacctctctataacttggtctgatgacgtcaactattggacttggtttaccgaaaaagagtcaccaaagtaagatacgtttcatttaaatcccatactatgaatgttaccacaaaatgaatatctttgttacatatttgatttacaatagagttgagtatgaatcaaagtatccttgataaattcgaaacaggttacgacgttttaagtttgtgtgtgtatattatagcaatattaatacgaattttgacctataattattaatgcaaagtgacaaactttagtttgttttggatgatttttaaagcgagaatgtggaagctgtgggattgaaaaacgtttgttggctcgacatcacgggaaaattcgacacgaggaacctcactccggggattgtttacgaggtagtctttaaggtgaagctagaggatccggcctatggatgggacacgccggtgaacctaaagctagtcttgcctaacggtaaggagaaaccacaagagaaaaaggtgagtttgagggaacttccaaggtataaatgggtcgatgtcagagttggcgagttcgtacctgagaaatccgctgccggagagatcactttctcaatgtatgagcatgcggctggtgtttggaagaaagggctctccctcaaaggtgttgcaattcgtcccaaacagtaataattgttatggcatagaaaaacataaatctccatatgcaccaatggaccttctcaacatatatttcacatcatgtcatgtgtgtataataaggttgttctatcgtatttttagttttaataataactttaatgttggtgttgaataaactcaaaacgagtgttttgaaggttgttatattcgaatcaattcatttacaatgttctaacttttaacgagctgacatgaatttatttttggtaaaaaaataaaaagtagaaagattttctatgaaccttaaacctagttagatcctatcaaaacccatatttaatttggcataaacaatattttctaaacatgtgtaaaatatccacataatctctcaattaggcatttttgatagataatcttaaaggtatatgagcgaacagtctatatgcgtggatcatgttcactttttaaaagagtattcgaaaattccattttggtggagaaaatggaagaataaagctagctaacatatcaaatgaaaagtataaagaatcaaacatgtttaacaagacgtaaaagaaaatggaatatattccaatcaaaattttgtttgcgatgtgtacggtgtaccatttgtttaatttatgtattctaaagtttgatgatacttacaaaaatacactaatggagaagtctactatatatagccaagagcccaagaggttgggtacaagtctaggtagttcagctatttttggatattttgacataatttagataattttgtgttaaacattttgagaatttttggatttcgaccatcagataagaaattacttaatctaatgaataatttagttatacaaaacattcaggtcgggaaggtataatcatgaaattcctctataaataagacctgaatacaatagctagtaaaagaagaagaaaacatataacgaaaacacacaaaaataatcaaggaatgggaataatatggtctatcttctcaaagacaaagccacataataacaacgaagacatactaaaacatgcagactctcctcttactcatgatacgacgtcgtcatctcaggtcgacgatgacttttccttgaagcacaagacagaggtcgtaaatcttttttcttaggtttcattgtctaactttcctcaccttgttaaatatgatactaatagttatattttattgatgttggaatctcttattcagaagaacttgatagaggaagatgagggtaaagcgaagaaaaactgtttcatgttgtacgcgagagatctctcaattacatgggcagagtctcaaacaaataaatattggagttggttctctgatcttgaccaaacatcaaggttatgagttttattgtaagaaagttacttttgtgtttttttgtttttttaagatttcactaaattctgcatatttgtatacactatacagtgatgtaagaactgaggttgcaaagatggaacgagtagcttggttagaagttgtcggaaaattcgagacggagaaactaactcccaacagtttgtacgaggttgtgtttgtggtcaagctaatcgattctgctaaaggatgggattttcgggttaacttcaaattggttttgccaaccggagaaaccaaagagcggcgagagaatgtgaacctgttagaaaggaacaagtgggtggagattccggccggtgagttcatgatatcaccagaacatctctctggcaagattgagttttcgatgttggaggttaaaagtgaccagtggaagtctggtcttattgtgaaaggtgttgctattagacccaagaattagaaaatccaaacttgtaagcttaaacaataataagaacacgaaatttattatgatgatgatttatgtacacgaggcatgagatttatttgctatatacagacacaaagacacacttgacgacacattacaaagggaagatgcgtttttatgcatcaacagagacacttacagcattgagctctacatgttgtctaccatcgctttgtggttggacggttaaggttgcacgagcttcagcttgagggttttgatcatctccaggttgagagactgatatggagttcacggttgacccggttgtgccgatattgttgtcatctgatatgatgtcccacgattctttcacggaagcaacctcgagtccattctcatggaatttctcaaattcatatgtggtgggaaggatgacataatcgtttactgggttgtagaacgggtctggttcgcctacatttagccattttttgagcattcggaagacacggtgatcgttgaggattcctcggtgctcaccagggactccaactcttgctactgcttcaagcccatccgcctagaaaagaaacaaccgaaggaaccgttacaaagagaaatgatcaacctaactgatcgaattcaagatttcctttccttgtgatgagtttatataagaaacacgatcatgcaacataccatggcagattccatcgggactgtgccatcaccatccacgcatatatatgtcggctgagattacaagaatatatgatctaaggttagaagatgataaattgataagaagataacttattgccaattgcaatgatagttgatacctgaaaaaggataaaaattgtgttacctggaagtatcttagattcgttagatctttaacgggcatcttctcattcccatagctgcagcggagaatataaatcaaatttagaaaaagcgaaacaagttgtacgaagaaacactcagtaactgagacctcaaaactagaaatattaccaaacactatgaggggtttctagattggtcccatatatgttatagaatttaactttcggaggcagcttggcagaggctaatacttgcttggttttgtgagcccactccatgatcttccagttaaaaggaagatcgatcgactctccacaataatcagcctgaaaatttgtgtcgagtataggatcagtcaatgcaacgtttgtgtgtttacaactacgtgtctacgtcatttaatgaaagatggtggtcacatgtaacttactgtattattcgaaagagatttcgtaaaaacttcaaggctctccaggctacagtaagactcaagaacaacataagaggttccaactccatcattgctctctttctctctccacagctctaagacgggagggagctcccatttaaaatacggacaacacatcagctcatatatggatggacactcaataagctgaaacaagtagaagaaacgtgaggataattatatcagccaatctctagaagacatcaaacaagcaagatttataactaaattgcattattgttgattgatcgttaccagctgatgcatgctccacttagagacgaaaaagttctgttcccaaccattgacaaacgacattccattcaataaagtcgatgtgatatatccaggagcacctgaatcaataatgcgaaaccaatcagtgtggtagttgtctccagtactatcagaagtaccacaagtcagagaacttacctcgaaatggagcagcaatagcaatccaattctgtacatacttctcgaatatctgataaccaaaaacgtcagattcagatgacaagaaaaatcttagaaaagacttacgaataaagaaagagggatttgcatacatcactatgcagacccatgaaacatttcaccaatagtcctcccatagaatgactaataacattaatcttcttctctcctgaggctttataaacagtttccaactttttagcaaactggtccaacgtttcctgcagtctagactcaatgcaaacacaaaacagtcaatataccgatcaacgtttagaccgaagaagagattaagtatgcattacctgttgctttggcggaaatcataaccaaaaccaaaaagggttttcccttcttcaaatccccatccgatcatctcaacaatcatctcatggaaatagtacacagactcacggccaacaatctacatatagagttcaaagatcccaatgagaaaagagaaagctttgagaacaaatacatccatagctcaaaaaacaaaacagctagaaattaaaccataccatatcagggtctaagacatcaattgcatgtagcccagctctgtcttgaggaacaacaatactcgtttttggatcaagagatatcgttttacctgtttcagatataaaaatgctaagagcttaacatgcaaagctgatgactttctatatcactttcttaatttgcacaaattgaagtatttatgagaaaaaaaagtaaagactttttttaccagttgaaggatcaaatcgagaccacatctttgttcgaaactcatgatcagcaccaaagatcctaacccaaacacgttcttcgttcccgttctcatgatcaacggcgtttagaattgatccagcgattcctggaactagaagaaccgggtttagattcgggtcaacatagggttcctgattccgatttctgagcttcagcaaagcctctactgatctaatgatctcttccagtaatagagacataattgaattgaatcgattgcgaagtaaattgacgaaatcgtattaccaaatttggggaaattagggttggtgagagaaattgaaggattgaagaaaaagaggtgaacaataaaagaaatttttggaatataagccgtacaagtcaaggtggcagaaaaataattgtcatagtgatggatccatcttcaaatggataacgcaagagtgacaattgaattattgagacataaaaagcaataatataaaatattatttaactctaaagtttcgagatacttcaatacttggaattatttatagacatgggcacattattttagattaaaaccaagttgtaatttcttttaccaatttgttctctaccttttgtttttctcattacagaagcccatactccaaacagaactcagcatctcttttattgatgacgaattgacgatggttataactttctgaaggacataactcaactcaagtgtgaaagattttatcattggtgcgattctcatttagaggagagaattgtgtcgaccatgaggcgaagagaaatcaatgtttttgttcgtgaaggatgacccagaaagggttaatccaaaagatcatacctacggatttttagttttgcaagccatccctacttgttagtaaagaaagactcaattcatagcatgataactcaaacaacaaatcagattcattaataacaagggattagacaaacactaatatgccatagtagctagtttgacaaaatgtgcctcttaaccttaactaattaatctcatacactttgttgctctcctcttgcctctgattccttctcctctatccaactggtcaacaatccatcgttcatactatgttatactacagttagatcctacaaactgattttgaactgatcatacctgaatacaagtcaatcaaaccgagacaacgagacaatgcaagagctgacatgatatggggacagtatacaaaacatcaacactctcaacaattccccaaactccacctccatcacacttctctatcgcgatcaccgcacaccaaatcttcttcctattattggggttatgcttcatatatccttcccataaaagtaagagtttcccaccacatgcaactagtttagtcgtattaccacttgagccaccattcctcatgtacttatcatctagtgactctaacccttccaatcttttccaataatccttttgtatgtcattgtcataccacaacaagcgcatgttccagaagccatatgaaacattctcaatcatacattctgacctcaaagctgcacttttgtttacacaatactcccatttacatagcttcgtgtcgtaagcacacatctcgtttacatttccaaactcaatctttccttcaatcactccgcttctgtcaatggaacacttacgtacctcactacccggctcagggaggccttcccaagtctgagtctttgtattgaacacctcagcccatggttcgtcctttaatccttggcaacctcccattacgtaaattttcccatcgtggaaacatgcccaggcattcattcgggatacattcatgctcggtgcatcgcgccaagtgtgactgcaacaatcaagcacccgcacggcggagtcgactggaccgccaagtacataaatctcagaaccaactacaacggtggcttttgatactgatgtaaacttagacgaggtaagcggaactaacatttgtccagttgtcttcttcttcttccttctcttcttaatgatggagttggctagggttcggttagggttaactaagagtctaagccattggggaaattgataactgggatcccatagacagagatagacacactgttcagtgcttccgaggtgagatctggttgcgtagagctccgtggaagagagaattgagcggaagcttttcgaaacgagtgagagcgttgggtagtacaatcttgagatccgagctaagcagtgcacgacgatttcttctggaagtagagaaagcgacggagatgacgacgacggaggtgaatgtggtggagacgagttcttagtcttcttcttctccggtggttccacttgaaagttcatagccactgtgattacaatcagcggcagtgacgggatcttgactaaaatgggtcaaatgagaaaatatgaagaggaccaaaaaaaaaaaaaagaggacctctttggtatataacaaaataaccctagtgttttttgttttaccaatgtgttccctacttttgttttcgatcacagaagtcccttaatatgtagatacttctaaccaacattgtttttaaccgtggagattgcaaactgtaacatattaaacagaatttgtttcttttctcaaaacaaagaattcatgatgaagttacaatgttaaaacaaagtttgaaagatgttaaagacacaactcatgaggaggatatttctaacaaactgaagtcagaagtcacgaaactctacacaaagtttgaaagatggttagatcatctacatgagaagacactgtgttgatcatgaggcgaaaggtaatccatgttgcactcctttttgcctttgcttccttctcctctttccaactggtcaacaatccattcatatatatataatgttatacatactaacatcatatatgtacagggaaaaaaaaaagaagcatgaactttttataaaactaaatgaactcaaattaactaagacaagggatccaaagatggagttaaggactgacatacctggatacaacttgtatcatacaagttaatcaaaccgagacaacgagacaatgcaagagcttgcatgatgtggggacgatatgcacaacatcaacccactcaacaattccccaaaccttacctccatcacgcttttctaacgcgataaccgcgcaccaaatcttcttcctattattgggattatgcttcatgtacccttcccataaaagtaagagtttcccaccacaggcaactagtttagtcgtattatcacttgagccaccattcctcttgtgtatctctaatagtgactccaacccttttaccttttccccatatccatccgttgaccaccacttgcacccgtagtcgtcctcccaagtgtagttattagcaaaggtgtacaatacactctccatcacacattgggacctcggaaatgcaacctcgccttcacagcattcccattcaccttgctttgggtcataagcatacgttttttgtgtatacccaaagtgaatctttccttcgatctctgctattctgtaaatggtacagttacgtatctcagtacccggatcagaaaggcattcccaagtctgagtctttatatcgaatacctcagcccatggttcgctttctgataatttgttgtaccctccaattacgtaaattttcccatcgtagagacatatgaaaggcctctttcgggctacggtcatgctaggagcatcgcgccaagtgttactgcgacaatcgaggattcgcacggccgaagacagtgcaccatcgacttttccgccgatcacatatatttcagaaccaacagctatggcggattttgatacaggagaaagattagaagagggaattggaaccaacaactttccaattgtcttcttcttcttcctcttcttctcaaccatggagttggcttgattagggttaacccagagtgtaaaccatttgggaaattcaaaacttttatcagatagacagacatagacacactcttcggtgtttcggaggtgagatctggctacatagagctcggtggatgagataattgaacggaagcttttcgaaacgattgagagtgttggatagtacgacctcgagatccgagctaagcagttctcgacgatttcgtctgggagagaagacaacgaaggagatgaagacgacggagttggtgacgaagcatttgtcgtcctcttcgtcttcttctccggtggttttgcttggcgtttcatagccgcagtgatgactttattttgggtcaaatgagaaaaacaattctcatatgaacactttttggttttagttttgttaattgcaaaacagcccctaattaaaattttagttacataagagaccacaaaatgctgaggaaaagtagaatcgaactccaaggttcaaaggttacataaaagaccctaatccgccacatgaccttcgaagtttcaatgtgattgcagtaaaaacaaacagtgttttcaaccgtggagattgcaataaactgtaacatatcaaacagaaagctttttatttttctcataacataaaactcaacatcacttgcaatgttaaagacacgacttaagcttatttggtaaagatggtcctaactttctgaagacagaactcaactcatgtgtcaaagatttgatctttgatgagatgtttttcatttggagaatctgtgtcgatcatgaggcgaagtgtaatcgatgtttggtccatgagggatgatcccaaaagggttgatcgacgggtggcttccatagtaatgctgcttgatgtgattcatgttaaccgtgctactcataccggggatctggaaaatgtctttcgtgtagttgaacaaattcggatactcccttatgagtttcttgttgcatttgaagtggactgcataaacctggatcaacgtttcaacattagagattcgttcacatatggtgtacttctttttcttgctttgaaagtatgaacttacctcgtcaaatcttataagggtgacaaacaatctgatatctgtttcagtcaaagtgttaccacagatgtaccgatgttttccaagaatctcctcacatctatctaatgcttcatacacttgctccactgcctacatataagaaccataaactttacattctcatgggatcaattagcatatacagtaatagctttattcatggcttccacacttacctcctcataaggtccttgtttctttgcaaacccgcatctatagacaccattatttatcccattgtaaatccattcattagtttcatcgattttagcttggagatgggaagggtaaagatcaagatcaggatttcccgcaatatgattgaactcagtgttgaacatccggattatttctgcactctcgttgttaacaacagttttgagcttcttatcccacagaacctaacataaaaaccaaaactcatgactaactagtaactacttccgactgaaagagacttaaaagacattgagaagccaaaagacttacaggaacagtatacttcccggtgtagtttgggctagcaatctcatagagttctcttacactcttagcaccattaagatggtcaggatcagctcctggaacttcggtatctgaacctggaaagacccatcccatatgttcatcggtttctttggttcttccccaaatgggttttacagactgatggaaatcaaacaaagaacaattcgatcaataccatcaggaaatggtatgattctacataacaataagcagtgttaaagggttgagtctacgcaccgagaagctt

SEQ ID NO: 600 - DNA, 99725 bp, Arabidopsis thaliana
aacaacagttttgagcttcttatcccacagaacctaacataaaaaccaaaactcatgactaactagtaactacttccgactgaaagagacttaaaagacattgagaagccaaaagacttacaggaacagtatacttcccggtgtagtttgggctagcaatctcatagagttctcttacactcttagcaccattaagatggtcaggatcagctcctggaacttcggtatctgaacctggaaagacccatcccatatgttcatcggtttctttggttcttccccaaatgggttttacagactgatggaaatcaaacaaagaacaattcgatcaataccatcaggaaatggtatgattctacataacaataagcagtgttaaagggttgagtctacgcaccgagaagcttattgcatcgtcaagtcctttgatctttaagtatgaaaggcatctagaagcccatggacaagcatacgatatgtaaagatggtatctaccagattcagctggaaactgagaattggaatcttttgaaacgaagttacggaatgtcgatgcagttctttgaaaagctcctgaatctgatgtctcatcaaccgcagatcgagccattgatactgtacactgatgacaaatcaaaagcatagggaccaactttcaatttcatgaacaaaaacagaacatcatagtatggacctaaacggatcaaacgttaataacttttagctcaaaatcagtttcttttgggaattctcagaatttgatgcatcatggagaccatacccaaatcaaacacaaacccagaaaacctgtaagaatctaatgcaagtatgcacaaagagaaatggaatttggaaatcaaggaaaatcaatcgtgatgatgtgtacctgaagacgagatccacgagtagtgaactttgaagcgagagagaggaagctggtgttgctaatgatcgtggaataagacatcaaccaggagctatataagttgaagattcacctgatccattatctatatacatagtccacaaggcttcagagtcaatttcggcgacgtattaatatgtcactgcttctgtcatgcccaacctgtgataatttggttgctttcggaggaatattcaattcaaaaaaagtacaaacctttgcaataaaaaaaaaaaaaaagttcacatttttgctacttaattagtgtccctgtttaaaactggccacttagagaaaatcccacttctattttgtcaaaacttttgtacttttacatcagtaacaacttaatcaccacagagtgaagaacattggttttgttgttcatgtctagaatcttgatagatagattcatacccttcacttggtgataatagtctaaatcccactctccagtctttagaatctactgaacaggcgacaaaaaacgcagcaaaagcataccatgtcattgcctcaacgcggctacattccacggtttcttgatccaccacaatgtggatttgctattcaaacagagagtacaaagcaactgtgggagatgtaatcactactagcctactcctctggagattctctcagtcaaatcagtaacaaggttgtttttgccagactcagaacaagctgtagtgaaagcagctaaggtaacacgatcagcactactgtccttctccaacaatttctgaaagaacagagctgccactccaactttcttctcgctacataactttctaacaagtgtcctaaccgttctaatccacagcttcttatctaaaggttcaagcagaatcattgcattggctgaatcattcctcttacaatactcatatgctaatgtgactcgagttacctcaggaggagataaacctctgtcaatcatcgcttcgtaaagcttacaagcttcatctaccatggacttcttgcagagaccgcttattagtgaaccataagtgaagctatcaggaacacaaccatgcctcttcatgttgtgaaaatatttcaaagccagatcaatgtcgccttctttacaataacagcttatcatagacgtataagtctccttcgttggaatcaatccaagactcaccaccaactgaaaaagcctctcactttccttcattttcttttgcctacaaaatgcagctatcagtatgttgttcaggcgcatatcggcttcaaaaccagtcttattcatccgacagaaaaaagcaagagcttggttaatgtcattttgcttacactgttcttgaataagaatagtgtaagtaactccatcagcttctaatccacaagaaaatgctttattcagcaactcatatgcctcaggtgcccttgatttcttacagagactgtcaatagctgcattatacgtataaatattcggcataaaaccttcatcacccatcaaattcatcaactcgtacgctctaccgaagcttcctgctttacagtgaccattgatgagtgttgtatacgtgttcacgttcggaaacaaaccctgttctttcattctactaaacaacatctctgcacggttcaacttatcttccttgcaatacccaccaatcatcgaagtataagtatgcacattgggtttgtaagtatcactacgaacgagtttcaggaacagcctaaacgctttctcagtccatcctcttttacatagcccatcaattaaagccgtgtgtgtatacacatttggcttccacccatttctaaccatttcctctaacatttcaaaagcctgcttgatactacccttcttgcataacccatcaatcaaagacgtaaaatttatcaagtttggcttaaaccctagatcaatcatcttacggaaataccaaatcgctctattcactaaaccattctcacacaatgcagtgagaatcaaggtacatgtagcgttatcaggaataaatcctctttgaatcattccagttaaccatctatcagcttcctgaatcttaccatctctaaaacaaccaataaccataagcttataagaactagaatccggaactactcctctcacagacatttcgtcgaacacattctctgcatattcaatcaaacccaactcaacggcaatttcgagaacacaattcatagttatcgagctaggtgttaacccctgattctgcatatccataaccataccaacagcctcattcaatctcccaatctccgagaaatttctaagcatgcatcgcataacctcgtgagctttctgcaaattcccattagcaagcaaagaatcagcggttacgagatacaatctcatgaaatgtcggaacttttcgaaacccactgcccaatagaagaagcacagagcaaccatcgaaccagattcgctcgcgagtgaagccaccacagtgatcgcttgctcgtgggtaagagaattagcatcgaagtcgagattgactcggtgtggggatgatacgacatggttttgacgaagataggaagtacaaaccaatgaacagaccgatttaacgagacattgagaaggtgacgatgatggagaagaaggaagagacaaatcactggattcatgatcggaagagatcaatctgaagaagaaaagagaacagagagaattgggtatctcaaaagttctaagaaggaatcgattcgacttaggaagaagaagagataacattggagctttaatggctcgtcctcttgagtgtgagacagagttgcaaaaatgtaatctttatatataaatgattttatcaaaaaaatagttttataatacatcggagcatctgatacaactatgatcaaggaacttagccacaaggctctcaggttcagggatcagtgaggaagttacgctgttccagaaatggaacgttaaggactcattgagtatcttcttgaacgattcgtcttgctgcgatctctcatcttctattgcagggtatgcaaaatagctgcttcaccaaaatcaaaacaggatcaaagttaaaagctttgcaaaaagatgaagtctttgagcaaagtcataaagagagctttactttgtgatctgttgtgagttgattgggaagaaaacagaggacggtcgaatgttcagctcctgttgattcatacgccgattcttcccgtttaaaaaccgtttagctactcgggtcaagagatctgctccgttgcatcgcaaacacttatcatcgtaagtcaagtagtactcgttcaagcattcaagtaagaatgggctgcagagagaggttaaaagttgaaacatcagacagaaacattgtcggttactaagatgggaatcgatgttttgaatgtagcaaagcattggtttgtgtttatgaaccttttcttttcgaatgacataacagcaccgttcagtgattcaccggctacctgatcctccatgccaatagtatttctcaaagacgataatgaacccaaaactatcacatcagaatcgaggtaaaccccgccatatctgcatcaatacgcaatcatgcttcatttcacaagtaacaaaagtgatcaattagttgattagagagtgatcaagatttacttataaagggcggcaagccgaacgagttcactgtagtgagtaggatagaacttagtttttctccaatcaaaccatacagaagcaaatacatgagtaggagtatcctgcagcaactcatcaaggttgggcattgccacagcaactttataactgcaacatagagaaaagaatcaaccaaaccattactaaatggaggagttaagagacagcattatgtgttactcactaacctatctttcacaaagctgttcctgaagaaatcaagctcaacagtctctgagaaaaccacaacacaagcatctcgatgctgagacagtaagctctcaagccctctttgatgtctaacactaaacatccaaccaggtgaattccacaccataaacactctcatagaacatttctcctttctaaaaaacgaatccataaaatccgaaaacgacaaactcggttctataccaggataatatccccattttgttccatctgcatacatatgttctgtaacctcatcatgcttcctctcagattccacattcttctgttcctctctctcaattttctcatcattgtctaatgtcttacgttcacctctcttgatctcaccaacactactcagcaacctaaactcatttggttccttcttctctgaaacaacactcaatggcttctttgccataaaagggtttctcttaatctgattcaacctccatttctgcacaaccttatcacctctagtcaatccagtattcccaacactatcaggatcctgcaacattggattattcaacggattcaaagtctcaatattcgacttaaacattctatctctcctcaagaaatcacctttcttatcaaaccaatctccccaaccttgtctcaaaggcgagacctttttaccagattttaacaacaaggcatcttccacactcgtaacctcaacaatcttcctacgaatagattcatctaaaggaacatcatcagatccaaacgcagctctactactcttatctcctgaactatcagaatctatactaaaacctgtgtaatcgtaatcccattcatctatagatcgtttattgaaagctcttcttataactccattaacatgatcgaagtaaaacccagaagatgaagcagccttgttccgattaagatccacttcttgctcttgctctgcgtcttgattctcatcttcctcattcgaaacgccgtcgtcttcgatcgcatcgtcgtgctcgtcgattctgtcttcggttgaggtagtggatcctcttcctcctccgccggtggtttcaacgtcggaatctgagacgaggacagaatcagggaacaaaactgtgtcttcgctggagccagagcggaggtgattcggcgagtgagatgagaagagtgagagacgagtgtagagaagtgagacggaagcgagaagaagaacggcagacataacggcgcaagcttgtgcaccgtgacgggaacgtgaacgccgtgacctcaacatcgccaataactctctcctccgtcggaatctaacggcgatccgatctgatttatttgaattcgttgcaattgagagtgtatcttaaaatgccacctctcactggtctgtttaaccaattaaagacaagcaattagtaaaacaataatcgaggtttggtttcaatatttgtgaactcttgtaatcaatttctcttaccgaacatgcgaacaattttaacatggttccacagcctgcactgaactcttgaagcaagttcctcacgtctaagatcatgttaacgtcataggcatatgcatttgatggactctacgtaaaaggaaagatttagagtctcccaattttagtctcggggttgctcactttcatcagctagaaccttgaagttagtaccaaactcttgtttaagcaatctcacatcggatgtctctagcttgtaggagatgggaatggtcacgagttggcctttgtccaccagctctttgatcttcaccagctcatctaaagcaacatttggattcggagtaccttttggagaaaatcttggtttaaatcaaaatctgcatagtagaccaaaatttcgattatagtatagtcctcagaccgatccgagaaaatcccaacctaactagtcaagtctaggctcttaatttcttagtcaaaacgaaacatatacatcattgttaagcaaaagtgtacaaggcaagtctaggctcttgattgctaagtcaaacgaaacgtatacatcatatgttaaccaaaagtctacaccatcccactttaaccaatactggagcttgttcctgagaggctgcttcgccatatttgaaccatttcatattgagccaataacatgtttatagagatcttaagatcagtcagtatagaaagtagaaacactgaactcaagattcttatgcaaattaaaaggcaaattctttggtgatgctaataagaaagtgagctaaaaggtttcaaattgttttggatctttgattttggttcagtgtttgattttggttctaatgtcgaaacgtcccattttggtttttcttgtttggttcggttgaggttcaattaaccagaaatagttcttttagaaaaaaatagaacaaatccacattagactaattacataccgctattacgaaaaaataaactagattcacggcgatttgttatctgctttaaaagtaagataatttatacatctagggttgcctgaattttcagccctatactagttggaatctcaactttccatcctaaatttttagccacttgaaaaaccaccataaacaattttaatctcgataaaactacatgtactttcagatttgttcttaaaactacacctccaattgaaccgaccagttaaccaaaaattatacatccggtttgacttacccaaaatttaaccgaacttattcgatttcgactctattttaacccaatttagactcaaaaaatatattctctagaagaaaaatactttttatttatttttgataaaaacttaaaaataaataaattaattttaccaaaataataaaataaaaaaaaaataccacacaaaattatataataaaattttagtatatattttggtaataaacaaaatataccgcaaaataatataacaaaatagacaacaaattccttttataattacaatggtgttatatatatatatatataaatgtatatggtatatactctaaatttaataattcaaaggtcattttcttttttaaaacaccataatcatatataaatatatatatatatatatatacatatataactcatcttgaaatatataaaaagaaaactgaatctataaagaaaaataaatttataaataccataatatatactttgattatgatgtttacggatatatataaaaataaatttggcatatattttgaatttcattacatatataaagttcaaaggtcatatattatgatttcaagaaaaatgaatattttgtttaaaataaagacatagctttatatttataaaaaatataaatgattgccaaaaggaaaatatatatgtttgtatattatcaaaattttataacaaaatgtagctcaaaatataatttggggtatattttgtcataataatttttgctaaaattaagttataatttaatatttttaattgtttatcacaaatatcacaaataaaaattaataaaaataattttacttcttaataagacaatttatttacattttgtttgggtcaaaattaggctaaaataaagtcaaaatcgtattaatttcggttaaattatgggtaagtcaaaccgaatgtataattatcggttaactggtcggttcaattggaggcgtagttttaagaacaaatccgaaagtacatgtagttttatcgagattaaaattgtttatggtggtttttcgagtggttaaaaatttagggtggaaagttgaaattctaactagtatagggttgaaaattcaggcatcccatacatctattcaaagttatattctcgctcaaaagacatttgatatttctaagaagaaacaggtcaattacatgaaacccggtctatattgcagtcatatagaatatttaaaagtttttttattcatatatatttgaccatatcctccagttacatggaatagaataaggtacttaacattaaagattttttgctttagtttaacagcatacatgaggagtacgtctaagcttagcaattgtactcacaagtacaaagttgtgagtacttgtctccgcgacaagttgcaaatccggtattgtaaactcgaaaacactcgtttaggcatgattcaatatcacatgggtggccaagttttatgaccgaggtacatgtttttaactgctttgcacttgaaaataccaaaaagcctaaaacaaaaacaaattgtattaatacttaacaatttttgaagtatagcatatattgtcagatttataccaagtaaatgaaagaggcataagatatgtatatgtatatttgctttaatattttaaaaacattaaataaatcgtattgaatgttttgttgggggaaaacgtttttatggcattagacattaaacattaaaacaaattgcaataaaataggtcaataataaaatgatttcttctagggtcataaatttccccagccatgcttaaaagtaatagacgcatcgttttcgaaagctaagttttgaattttataacataactaattcaatgtaatacaagatatatacgaacttttacctgagagaacaaacatgcagatgaacagataagaacacagtagttttgccatgacttgggaatcaataagaagattacgttaatctaacaattgtttgtttcgaaaaattctttacattgaaagatgagatgggaaaagaaagtatttatagattataagtgatgtgagaaacatagaagaaatatactcttttggcaacatatttaaactaatgtgaaaagagtcaaaattattattttggcaaaaacatttctcataataattagtttgaacgttgaccaacaaaatggaaaaaaaaaaagagatttctgaaaagtaacaccatatatatataatattaaatatttggtaatggtcaacatataatttctatgcattcattttctatggaaaattgtatagtaatataattactcatccaattatggaaagaacaaaagggaccaaaaatatttacaaattaaaaccattacaaaaaaattattaaaaaaatcattaaacatatagattcgatgtataataagtgtacaataaaattagaaagaatttaaatataatttcagtttactatttaaaatttaattgtacaacttaatgttgataaaaattaaaaactccacattatatcgaaaatcagatccaaactaattaatttgcataatcgttattaatatgaaaaaaatcatacatgttctaattctatccattatggttttgaattgggaccaacatgttgaaattttcatcgtcattccttttctgtaggatataattatagaacacatgtgtttttctgaatgttgattaattgttgaagaatataaacaatattttgatatttcttccatttttagatcacaaaatcgcgttgttctcggtttgaacccggttcatgattcttgattcaataatcataagtaatatcgcaccaaaatcttcttatcaatggcaaatcaaagagactaggaaatgacagaagcagagaatgaaaaaaatgaaaagaaacctcacacacgtaacgtaacaaacaagaaacgttaatctcttgcctacgtacataacgtaactaactttttctgacaaacgggttattttttgtagtttccgctgtttccaatcagctcagaatcaatcgaaatgtcttccggatgacaaccaaactcagaacagcaacgagccactgaaggatactgaagacatccaatctgtgaaaacaaaagggataatgaaatagcagagcaaagcagcaatagcaacataaagcaactcttttccaaacccctcttgagcattcggttgttttggcatgaacatgtctaaagggctaggtagtttttcatcttgcacacgtctcggaagtttcttgccctgtagacgtctcttaatagcccttacaatctcctccacaagagaagtatcattgctgctatgcaaatcatgaaaaaaaaactaaaacagtcaaaaccaaaactctttccaatcttcttctatagtcacgtaaataaaataaaattattacctgtaatctgctgaggtgaaaccagtatctgtgcagataaaattcacatttctcatccaatgctcggcaaatggatgatccctgaagccctgaatcgtcaacgtttccaaaaaactctctccaaatctaccattgaacatattcacgtcgtcttctgaaaccctatagaagacagggatcaacacgagttttccttccctacgtcgatcatagatcctcaccgcttcgtgcaaacacaactctgacgctgtgtaccggtcagagaaaatcactaatgcgacatttgagttatcgatcgctctgaaaatgtgttccatgcctcttcctcttcgctcgtcactatctatgaaaacgttaaacccttcgtcatttaaggctctttccacatgcctaatgaatccgtcgctctgatcgctttcaccatgattgataaacactagaggacgtgcttgtatcgccattggattagggtcttattgttttcgaaacaatctatttgtcaaactactctctttttaagaaactacaccagttttcaaaatttccaactagatcaatctttcataattaagacaacgtttttccatgtacattttttcttctaaaactaacgtttcagttttccaaataaaaatcaaacaaagtctaaaaatcgatcataatttagttaaataaacgtttgctacaaattgccaaatgaaaaatcattaatagtttaatacacatatttaactaggcttgggcttaattgtgtcccttaaaatctgcttgggcttgtgtccctcaaaacttacgggctctgtctacctccactcccaagtatttgctaaaaaccttttatacttcttacggtacgctaaccttaatattcactctccttcgtaatattcgcacattcctatgaatggaacgttctcctcaagactgtcgtgcaagtgaaacattcaaaaggcagttttttgtgatcctaagcaaattgttgaaaacatccttaacagttacacatattccaactcacacaggcatgaaaagcgggtaatgcatatatatgggtaaattatgcacattttctttatatataaatattaacaaacacacaaaacacacacatgtacaagtacaaacacgagcctgatcatgtcaaagcacgcgatcactcacacggtcaggcgaacttcctgcggattagaaccaaaaacaaaacacctacaaaccattgaggagtcttgtagaaactcgtgtcattgaatattaaaggtgctatgaaattacagagaccagccaaaacaagagcgaagaaaatctctgtttcaatgggcaattccttctctttagtgggaacgtatggtagctgtctcttaacgtcccgaacaatcgcatccacaagatagctatctattctgccaaatcgataagaacagtattgatatagtatcaacctaaaaatttctaactaaaaaccataagttaaattttaatatgtactctcaactgatattacattataaaaaaaaaaccttaacttgagacagaacacaaaatacctgtggacttctgaggtgaagccggtcttggacgaaatagatttcacagagttcacccaacgttcggccataggttcctccttaggagactgtctctgcaccgtttctataaaacaacttccaaatttacctttgaaatttttcacgtcgtctgtattgaccctgtagaagacagggatcactgttagtttcccttccttcacgcaatcatcaatcttcacgagctcgtttaagcaccagtctgactccgagaaccggtcagagaagatcacgagtgccatctttgagttttcgattctcttgaagaggttttgaaggtctctccctttcatctcgttgctatcaatgaaaacgttgacccctgcaattctcaaggctttcactacatgactcacgaagccgtggcgcagctcctttcctcggaaactaacaaacacctggggtcgtggtcggggtggaagactttgcggtggctgaagagggcgagcataaggaagaggaggtcgtggtcgggttaggagcacgggaggagtaagaggtcgtggtcgggattcaggaatgggaggaggaggaggactaggagggtccattggtcgttgcctggttggtttatcagccaaaaccaacaaagaaaggatttgtgaagaacacttgggaacttcctagttcttattatatggaaaacgtaagactttcttttctttattaattcatattcctggagagcaagacggtaacttcgatgcagttccgatccagtactcttttttcggataaagtattaagcttattttttataccatgggttcgttcgtgatggcttaatacgatacaataactagctacctaatttcaactaatctcttttataatattgtgctagtcaataaaattaagctgattaatttcctttagccatgtaattaacacttcatctaaatggctttccctataagaattttgattccaataaatcgtgtagtatggtttggaatatgagtcggatcttgtcgcgttacaccgagtttttttttttttttttgggaaaagtttacccaaaaatcatgttatgccagcaaagaaaccatgtaataaaactcataaccaaatatagttttatgtcaaaatttaaatatcgttatcgatataattgttgttactaccaaaccataagaaaaccaatcctttggaacaacccactggagtctatagccgccaaagtctttctttagtatatctccatcagaaaaacgccattgtagtcagcatgtcacccactcaccctactatcatggatcagttcaataatgctttcgcaaagcaaatcaccatttaattttgggatcaatttttcttattatagttcatttaatctgtttatataaccatcacttaactctctatttctaaatattcggagcagaacagaatggatcaaatcatatgactattttgcttacacctagtttcagcactatacatatacatgctcatactagaagatggttaaaatttataatcaagcgtcaataacctatgctttaatactccctctgttcttttttaattgatcttctagaaaaaaatattgtttctaaagattaattttgatttttgagattttcaatacattatttattagttattattcatgaattttaaacttcaagacaaataattaaatattattggtttctaattatagaaaaatgtaaatcacaaacattaatacatttataatcagttttaatatgttttcttaatttgggtgttttttctaaaatatcaattaaaaaggaatagaaggagtatagttctaaaaaattactaatgagttcaatacggatagaaggtaaaggtgcaaatggttgcacttttggagagaaaaatggatgaataattgatttacctcaaattttaccatttagattgaaagtataatatctattaatcatttctttcaaccttaatgagatgaacaaagaaaaaaacatagatatatacatacaacataaaagcataaaaagccaagagctcatcgatcatttgcaaaatatggcgtacgttgagagtcacgtgtcatatgttccactgttattacccatcacctctgaatagatcggagactatgtcggacaacaaacaacaacataacagctagataccaacgtgggctaatgaagaaacccaaatccgggaacacagaaatagggataaagtaaaaacacaaagccgcaacaaccgaagcagaaagaagctctgccgaaacttcttctccaatcgtttgttttgccgatatataaggtatttttttcttaataccctgaatgatcgcctccacgagatcactatcgttgctgccaatgaaaattagagctagttaggaatattccacattggaagtgagatggtatcttgactgcattaattagttttgagttggaatacttttattttacctatagtatcctgacgtgaagctaggctttctagcaatagaccttagacatccaacgatgtgatgggtcaactgatgattctgtctcccttgtgtcctcaccatttcatcaaaacatttaccaaatcgtccctccaaattgttaacttcttcgatgttcactttgtagaagatggggatcaccatgagtttcccttcggccacgcgctcatggatcgtcgtcagctcattcaagcactgttgtgactctgcgtattggtcagagaagatcacgagagcgagtttcgagttgtggatcctcctgacgaaaaggtggtcatcatgatgatgagggcctctcctttcccattgatcatgatcgttatctacgaaaacgttgacccgtgcgtcttttaaggccttcacgacatggctgacaaagccttttcgcaggtcgttcccttgaaaactgatatatatctgagggcgtggtcgtcgtcggaaagctggcatcgtcatgggacgtagacgaagtttgatatataggcaaaaagagaacaaataaatttcataaaatgattggtgattatgttttgtgtttaattacctctgcgactgtatagccttatagagtcattggttttatttaaaaatatacagacgtccaatattattatttctcttgtaatataaatacgttaatactaatgacattttgatgaatcttcttcgtcttttcttatttatgctttcatattttgaataaggattccattttctcttactatccagaatacttacaaaagttaattaattttggaaatcattactaattaatttacaaaagttaatttgaaaagttcaatgttcaatctactctgctcattccaaccatttgttgttttccaaaagttaacctcattcatatgttttaatcgctagtccactacagtggttgggaaatttccaattagatcccattaagaaagtaatataaaactaaagaaaaggtaatataaaatcatgatcaacattgcggttggtaacaccaatagaatatgtatctattatttgtacatatccacaaagcgttaccggagtctacacccatacaaaagtctttattttgtagagataatcagtcagtcatagaccatcccaacaacacaaaactacaattatgatattcgcaaggaagaagtttccgcgatcaatcgacgaaattcattttcgctgccaagagaattccacctccattctaggagcttactgcttacatatggaattattagtgagttgatatttagttttagggaaaattcgtttttgggtcaacaaagtatatgaactctttctatttacttttattgatattttgttatctgcgttaaaaagttggtaaaatgactcgagaagacgacaagtcaactatcactatttggtttctttactttatactgatcctaaaatgtaatatttcttactgagatttcagttgaagaagaattgtaatagtaatttctggaaacccacatagaagacagggattgctacgagtctcccttcccttactcgctcagctatcttcaccgcctcgcgtaagcacctctctgattctgcaaacctttaagagaagatcacaagggcgtttgcgtacctctgttttcaaaagatacactatttacgagggtgaaaaaacaaaaaactaacggacattgtgaaaccgaaccgaaccaaacgaaatttgatcaatgtgattatgtgaagtaaacaagatttcataataaaaagaaaattaaacatcttataatcttgaaatacaaaaaaaattattacattaactaaatataaccaattaaatgaactttcgtactaattttatctaaaaccaattcaaaccaacgtcctaatgaaaaggaaagtcttaaaacctaaccgaaataaaatttggaatcaattcaaaccttttcctacaacacaaaatatctaaaaaaatctgtagcatttacaaagcaaaattgtaaacagaattttaatttttatgccctactacctttctgaaactgtaaatctgtatttattctctctgttttaaatacagataattgaacatcaaattttcaaacaagttgaaaatgatcgatcaatatagacatatagtcatagaaatagaaagtggctagaggaaaaagaaagggataaatttgttaacttgtttaggaaaatttactaaggggaaaaataaaaagagaaaatttggaaaaatgtctcttttctaagcttttgtttgaaaaataacctatccattttttctcttttaaaatatattttctaaaatataaaagaaatataaaattataaatatatccttattaaaatttactaataattttaaaacatttatatttaaaacaaaaatcatttttttattttattttttatcgacaccaaaaaaaattataatttaatttaaaaatatttgacgtaactaactaactaacaattttacataaaattttatcttaaatatattttttaagaaaaatattgttacaacacaaagaaaaaacaagaattattctttaaaagaaaaaagttagtcgtatatatatgtataaattacaccatacatatatatatgttacaccatgcagaatttcattatcatgtattcatgttcttataattgaattataattgaaattacaaatatttacaaacaaagctaaattagttcaaaacttggttaataatgtagagttaaagaattttagatttaaaaaaaagtgtagagttaaagaattatgtgtttggagttagattgatttctttatataatgtgggaaatatgaagtgataaacttaagaatattgttttgataatatcatgttagattttaatatttaaaatatataaattgtattcatcttaaaatggttaaaaaaataataattaaaattttaaattaagtttattctttattaaaaaaaatcgtatttaatttaattttatgaaaaatatttttcttttgttttaaatctggacagaattgtcatttaacatatttaaaattatatattttaattaaaaatagggtagagtatatttttcaaacaaaaactcaaaattagggcaattttcaaaatcacccaaataaaagtttaggaaaaattcttttattttcaatatgattaaggaatttttcatgttagggaggaatagtgtttttataacttttttttttttttttttactttttggataatagagcttgtgatagatagagagatgatataaaacgtagtataagtttgtgaggttttcgatcaacaagtatttgtgtgatattatggccttttcttttgacctagccgtcatcttccaacgggagagaagaatgaagaggaaatcaagagtaacaataagaagaagaagacgaagagacatgtgcaagagccacgaaccgatgccatatattcctttcgatctcgtgatcgagattctaacaagacttcctgccaagtcccttatgagattcaaatccgtctcaaagctctggtcatctttgatttgttcccgaacgttcaccaaccgtttgctaagggttccatcattcatacagcgtctatacgtgactttgaccttcttggacaacagcctgcagcgcaaaagcaaattactatcatcgtcgtcttctcctggctcggacattagtacaatgtcatcatttgtagttgaccgagatttgaccaccccatcgatgaaaggctactacctctctcacgttttacgcggcttgatgtgcttcgtaaaggagccaagtgtgaaaatatacaacactaccactcgacaacttgttgtcttacccgacatagaagaatccaacatcatagctgaagaccacaagaataagaagatcatgtatcgtattggacacgatcccgttggtgatcaatataaagtggtttgcatagttgcaagacctaatgacgaattcggagagctcagaaggtacttgtccgagcattgggtcttcatactaggaggagataaatcaagtggatggagaaaaattccttgcccatctccccatcttcctataacacaaatattaagtatcaacgggcgtatgcattacctcgcttgggtacagaagtttgatcctatgcttgtgactttcgactttagttctgaggaaatcagtattctccaagcacctgaagatatccgttggtttaaatctaaccctatagaatactatggaaaagtagctcttttaaatctttccgatcttaaaagagaatgtacgatgaacctatgggttatggaagatgtagagaagaatatgtggtcggagaagactttggtagtgcatccttctcaaatggatatagtcaagagcactagtttgagggtagcaggtacaactagaaacaatgaggttatcttggtacctcataatatacgttatactctaaccggagaggttatcgtggaacctcaaaatacaactcttttatacatttttctctatgatttacaaaagaatctgatgagaaaagttgaaattaaagaaccaccatatcatactaaattttgggatgttgttgggttagatgatgttgagaacttcatgtatctttaaattcatctagcttgagcggttttttgtttttatgttaaaaattattttattaacgaagctgacgactgatacataacacaagcacaatcatttttgttgtttaagcattttaagtttcaactgctttctctgttgtgagttatgaagccagtatttgaagcaatatgattcaaagagtgcaaccaaagattgttaaccctctctcatcaccgtttcaagaaaacgtttaccgaataatctttcaaacattttcatatcttcggtccaaaccaaaggagattacaacgagttttcctttcactagctcaatcattgatactcaccttctcggtgcaaacaccactctgactctgcgtctctctgttttcagtagatacacactatttcctagggcgtgggaacagtaaaccaaaccaaaagaaaataaacgaaccaaaccgaacaaaactttcataataattttatactgaagaaatcaaaccaaatccaaattttatgcaatgaacgaaagtaaaaacagatcttataataaattagatttttaatttacaatataaagatgcattaaatatactaataatacataatatagtattaactaaattttgcttaacaattgtttatagtttttaagtattatttccaaatcctaactaaagctgataattatttccaaataattttaaagataattaattcttatcttaaatatttttaaacaaaattttatccaaaaagtaaaaaataactttaataagtgatagacttttccaaaatattttaaatattattttataaaattgatatatatatatatatataataaataaagtctttatctcagaaatagttgaaaaaataattaagaattcaaatttaattcttatcttaaatatttttaaaacaaaatttcgtccaaaaaaaaagaagtaagttttattaagtaatagactttagaatatttttcgatattattttgttaaaatttaaaatatctaaaataaataattatttatctcaaaaaatagttgaaaacataattaagaattcaattttttttttttaaaaattttcttctaaatatcgaattttggttttaatttatttaaaaaacagcttttcttttgaatctggataaaactgtcatctaacatttttattaaaaatagagaaaaatgtatatttcaattaaaaatccaaaaacaggatagttttcaaaatctcccttaaagaaagaagcaaatttacttcttttttaaaaaagcaaaatactacaacttataaggttgtgacgctaccaaagtttactatcacataattaattattaccaaacactagatatggcttttagtttcgacctagccgtcatcctccagcgggagagaagaagaacgaagaggagacgaagagacttgtgcaagagccgccaaccgataccggagatacctttcgatctcgtgatagagattctcacgagactgcctgctaaatcccttatgaggttcaaatccgtctcaaagctctggtcatccttgatttgttcgcgaaactttaccaaccgcctgctaaagctgtcctccccaccgcgtttatttatgtgtttgagctcctccgacaacagccacctcaaaactgtactactatcattgtcttctcctcctgactcggacattacaatgtcttccagtgtaattgatcaagatttgaccatgccgggtatgaaaggctaccagatctctcacgtttttcgcggcttgatgtgcttggtaaaaaaatcaagtgcccaaatatacaataccacgactagacaacttgttgtcttacctgacatagaagaatccaccatcttagctgaagaacacaagagtaagaagatcatgtaccatatcggacacgatcccgtttatgatcaatataaagtggtttgcatagtttctagagctagtgacgaagttgaagagtacacgttcctgtcagagcattgggtcttgctactagaaggagagggatcacgtagatggagaaaaatatcatgcaaatatccaccacatgttcctttaggacaaggattgactctcagtggtcgtatgcattacctcgcttgggtgcgtgtgtcggataaccgtgtgcttgtgattttcgatactcattctgaagaatttagtatgctccaagtacctggagatatcttttggaaatataatggtcttctagaatacggtgggaaaatagctattttaaactataccaaagttgatatcgaaggtgtgatggaactatgggttgtggaagatgaagagaagaatctttggagcagtaagatattggtggtcaatcctttgcaactgcagatggtcaatagcattattagtttgacggtactaggaacaactcgaaacggcgaagttatcttggtacctggtcctgaagacaaaactgttttcaacattttactctatgatttacaaaagaatcatattagaaaaatcgaaatcaaaggaggaccagaccgctatcttaacaatatttgggaagtcgttggaatggatgatgttgagaacttaatgtatctttaagttcattggcttgtgtgttaattttttttcttttttaccaatttgtttttctattattttagttgttttgttatgctacctaatttaattgtgaagaattcgaaaaatattggacacgattagggttgtcaatcgggcctccccgcgcccaaatggaccatccgcatcctgcccgcttttcttctgatccgcgacggacctgcctgccaacgaccgcggtcttgaaaagcgagtcctaacccgccccgcagagcccatcggttagacgggctggcccgcggacattagtaaaactcctttttttaatcctccgtctgctgctttctagtgtcctgacttgtgcgaaatagggatgagcttgtcatcaattcataaaaccaatttaaccaatgtagttcttgattggtttaatcaaggttcaacattgaggggtccgaattcttgattaaaccaatttagattagctaaatagaatcgaagcataatctcaagccaaaaactaattcgattttggtagattctcaacaaaaaccgaatcactcaggaacatcataactatttcaataccaaaactcggaatcaaaagtgatcaagcacaaaaacagatcaacattagtaatatttcacaaacatcaatcgatcttgctagagtaacataatttttggcaagaatcaatcacagatctaagatcaatcagctatgtgatcgattgtaagtatattagagcatcgaaagcataatctcaacacaatttggtcgaatctagcaaaaaaacacccaaaatttcacacaaaaacctatcaattttggtagatttcaacaattagaactcaaagaagctaaatctactctttagaaccatgatcgatccctattacaccaaatttcgaaacaaaaacgcaaaatctgatggaattttggatcaaattcaactttggatctatctacatgaatcatcaagcttccacaatcgaattgaacaatatattatccaaaactgaagagaaatggttaccagaagaacttgggagagaatttctcttcatggcttccttgagagagagtgagaattagaaattttgaaatttgtttctgagagagagagtgcgcttaacggcaaatgaaagtttctcgtctcagatatttatttggcttaagcgggaaagcccacactttatttttccgtacaacagaaaaaacaaaaataaatactattgtttcagacggacacgtgtaatatcgcattagcccagtggctttgatacctcgtctgcccagccctgggttcgaatctggtttaatacccatattcgttatctttttccttcttccacgctcaaactatttcctcttttaaaaactcatacaatatcatattcgaaaaacaaaatgcgacctctttttttttttttttccctgtttctaccattttttaaaaacacatgaaagaaaagaagaaatgcaaagtctccttttaattcaaatatatctacaaatatccaaaaaatatgaataaaaacaaaccagattcaaagctacacatcaaacaaaaagcaagacaacgatccaataatcatttgatctctcatattggcaacgttgtcaatacttaggaaacgttggagagaagaagcaacatatttgatgagatggtttccctgtttatatagaggaggatattttccaaatttttttggaaaaagcagagcataaaggctaataaagctcgcaaacaaaaatcaaaagcaaaaaaaaaatagtttttctgcattttcaaaagtttgatttttatgtcacaacttgttaatgtttggagctgatgttgcgctgagttttgaatgttttgatttaaatgattcgcttccttatctgaagctgttttgcttgcaattttgaggtttttgtgctctgattttgctgactccaagtttgttgtacgcgatatggaagcaagaaaagagaggaaaggaaaggacatagatgctggttcagttaaagaccggatttaacatccctctcaagcaagaaaacggaaaccctttttgaaatactaaatttttaagtccactactacaaaaattaaaactcattccttttatatgtagtctcgattcatattttcaaaaaatttaaacaattgaaacaaatagtatctgtataaattaataaaatattatgatccaacagtaataatttatagaatttttacggtgtagtgttaaaaaaaagttttactgtatataccacttcttatatcaatctaggaatgaataaatattattatcctgagttatttattcttgccatcatatatatatatatataatatttttttctgatcaacttattaatcttgttctctaatttgtattaagtaataaactaattatttcctaatatagaattggtctctatcccaataaagaaaatgaagtcaccttcttcttcctcttttctcctgtgttgatgaaaaagcttcaagattcaatcaaatcatcaaaaaaaaaaactataacttctattgatcttgatatctaaatccgccatggatcttgccccagaggagcttcaatttctcaacaaaagaggaattctacgtgaatcaacatcaatcccacaatattctctaaaaaccttttacctcataaccctaaccctaattttccctctctccttcgcaatcctagcccattctctcttcacacaaccaatcttagctcagatcgatacatacccacaagccgatcaatctcaactccaacatgaatggaccgtcctcctcgttttccaattctgctacatcatcttcctcttcgccttctctcttctctccacagccgccgttgtcttcaccgtcgcttctctttacaccggaaagcctgtttctttctcctccacaatgtcagcgatacctctcgtcctcaaaagattgttcataacattcctctgggtctctcttttgatgcttgcgtacaacaccgtgttcttgatcttcttggtcacgttaatcgtagctgttgatttacagaacgtggttttagctgtgttttcgttggtagtgatctttgttctgtttcttgtagttcatgtttatatgacagctttgtggcatttagctagtgtagtctctgttcttgaaccgatttacggtttggctgcgatgaagaagagttatgagttgcttaaagggaagactcttatggcttgttcgatggttttcatctatcttgttcattgtggattcattgctggagtttttggagcagtggtggttcgtggtggtgatgattacggaattttcgctagaatcgtcgctggtggattcttggttggtgttcttgtgatagtgaatctaattggactgcttgtgcagagtgtgttttactatgtttgcaagagttttcatcatcaggagattgataaatccgctttgcacgatcatctcggtgggtatctcggtgaatatgtgcctcttaagagcaacattcaaatggagaactttgaagtttgactgcatcatcaaacagagtaaatcaggttttttgcagtttgaaaatgtctttgtatgtttgtaatatttgtaatcttttcactaagtgaatttttgttttttacttgcatatccaatgtaacgagggaagagacttgtttttacagagtttctgttacttgttagatacttcttgttcttgcattcaggttatacaatgatatgagagaatattttgacaaaagaaaatgggctatataatggttcaagagtctggttgtgttctgtttcattgagctaattagtttcaagatgaatactctgcttcattctacattatacttgggagatatatgactttgatcttgtaggtatgagttgtgaattacttccatgaatgctcattattaatgtattaccatgtacaagcaatgactcaaagagtggcaacaacaaattcctcaaaagaacttgacttggggactgtgagcaaaatatcacaccactcaactttcccatacgtaggaagccaacgagactgaggcggaaaactacgacttgtaccgacaccattagattccttgttgtgcgactcttactagactaaaacgggaagtgaaccatcttgaactagggctggggattcgagttggtccacggctcagagtaaaccaacgtggcttagagctaccatggaacattaaacagagataaggacaactctcggtgcttcctaatagtctccgggtacggggtatcgtgaagatccgtggaggcgaggagagagcagaatatcttggaagctaaggagagagttgggtagtacaacctcgaaaggcgggctaaacagttcatccgtatatgttaatttaccatagttttgtttttcgtagtttttctattgaatggactcaaattaatatcgtgtgaaacttttgaaaatactgaaaaggcccttttagtgcaataattcaaattgaatatgaccttgaattgttttaaaatcatttttcttctcttgattgaacctaattgaactacaaaactatggtcaaaatatatgaatggtattgagtctattgagttttgtcctactcatataatttggcagttcatgaaaagaaatggatcttaagtggaatatgcgtcacctgtcataattataggttgaatgatgaatgtttagttttatttgtcaactatttttttttcgaggataatgtttgttttttgtcttttccagtacgataatgcttaaactaacattctcaactatcaaaacattccaacgtataccgaaatgaaagttgacgtgataaatccgatcaagaacacagcttcttaacgtggctactgtcgtcgaccgacgtttattaaattaagttttcttatatacataaaattcgttcaatttaaattaatgtggtgaattcgcaagtttaaaatttcacagaaaaaatgttttttataactataaacgcttaatctcatgcacgttctcttttcaggagatatgtaactaactaatgtattccatgatgaatgtttgggaaaattaattatagtggatacttgttataaaacttgtatgagtcaatggccttaatatttgataagtatacttaaaactttatttggacattaaaccgccactaattttccatagcacatatagtcaacttaacaaattataggttagtgttgtttggtaataaattagtaatttagtaaaccaaacaatttataaccattttattcaatcagtgtaggcaaagaatcttgaaatagtgttttctattcttatgtatatatttgacaacgtggtgttttgtcaaccaataaaattttctaacaccataacataaatctaaacttgacatgttaaatttccttagcttagtgaaacttgattaaattatgcccttccaatttttctcaccatttttaccctccaaaatttcttaaacattccacacatcaactatttcacagctttacaatgacgagccatcactttcgtacaacaacaaaagtaataatagattttctggtacatgtatcgaaaagttgtgcggcctgcgtcagaaaaatctaagaaaaaaacaaagagtaaacaaaaatatccaaacagtgaatctaataataaattctgtttactttctgcaaaaaataggataaaatcgaatttaattctttttatcgaaagtcggaaatatatcctatgtcgcaatcaattaatgtacatatgcaagaaatttaaattaaaaaaaaaagaacgcaaaaaaagaaaaagaaaaagagagagagaaagaaagaaatcgagtttaactgctcgtgtctctctgtgccactcgtcttcagttttgtcagcgtcttcataacttataaagtcctatcgatctctcttcttctttctttggccactctctgtgtctttctttgttaataatatctcaaagaataagaaaaaaaaaaagaaaagaacaaaaaaaagcacaagtttcttgaaaccgtgttgttttcgtgtaatatacacagttgttacagattctctccttttgggtttctttttgtaatcatcatttgattgactgattctctgttctttttttcccaaaaagagagtccttttattacaaaaaaaatattaaggttctgttttgtttggtttagcttttttatccaattccatcagaaccagagttgtttgttgctgctctgtaatatactcgagtcaatctttatacttaaggaaaaaaaaagtttcaatctttggtttcatctcaggcgaaaattgctacaaatggtaatcgatttctagggctctgactggttttgattaaaggaatcaattcaggggaatttcgagttcttttgttacaaaaatggcggaaagagtcgaagcatcatctgtaccagaaggagaaaatacaatagaagaaagagaagtaggagctatgtgggaattagagcagaaacttgatcaacccatggatgaagaagctaataagctcaacaacatgtatagagaaaaggtacttactttctcatttaaattcatatgtagattttgagaaatggagaaaaagttgaggtttttaaagtttgctctgtttttttttttatcagggattatcaatgttgatgcttctaaggctctcttttcaaagtctagggatagtttatggagatttagggacgtctccattgtatgtgttttacaatacattccctgacggaattgatgatagtgaagatgtaatcggagctctttctttgatcatttactctcttttgcttattcctctcatcaagtatgtgttcattgtctgcaaagctaatgataatggtcaaggtaaggtttagaccgcggtgttttgaaccaaccggttttggtgtatgctcattcggattgatcaatgttgttttgcaggtgggactttagctatatattcgttgctttgtagacatgctaaagtgaaactaatcccgaatcagcaccgtagtgatgaggatctcacgacttatagtcgaactgtatccgctgaagggtcttttgctgctaaaaccaagaaatggttggagggtaaagaatggaggaagagagctcttcttgtcgttgttcttctcggtacttgtatgatgatcggtgatggtatcttaactccagctatctccggtaaagcttctttgctttttttcttcttaaggttaaccaaaaaagatgataatagtttgcaaaatcatcttcttacagttctttcagcaactggtgggatcaaagtaaacaatccaaaaatgagcggcggtaacattcacttcaccttattttcaacttcaggtttcgaatcggttcttgttttgctaacttgctacttttcccgtttgcagatatcgtcgtgcttgtggcaattgtcattttgataggattgttcagtatgcaacactatggtacagacaaagtcggatggctctttgcacctatcgtgcttatttggttcctcttcattggagccactgggatgtacaacatctgcaagtatgacacaagcgttttaaaagcgttttcgcctacatatatatacttgtacttcaaaagacgaggtcgagatggttggatatcgctcggtggcattcttctcagcataacaggtacttatacttacacctttaatctccatgatttatttcatagccatatctaaatgttacttcttgaatattgcaggcacggaggcactatacgcagacattgcctatttccccttactagcgatacagctcgcctttacgttttttgtgttcccttgtcttcttctagcatactgtggacaagctgcttatcttgtgattcataaggaacattatcaagacgcgttctatgcatctatcccgggtttgccttaaatctttttaaaacattactggtcttgaagtcatcatacatagtgctcttataaaacagtgaaactcttttttgctttgactccacagatagtgtctattggccaatgtttatagtcgcgacaggagctgctattgttgggagccaagctacgatctccgggacttattcgatcgtcaagcaggccgtggctcatggatgttttcctcgagtaaaaattgttcatacttccaagaagttcctcggtcagatctattgtcctgatattaactggatactcatgctcggctgcatcgcggttactgctagtttcaaaaagcagagccaaataggaaatgcatacggtaagatgacaacaacttcaaaatacaagaaaaattattttagtcaatgttaatcgttttaagttagttatcataagaatttttggataatctgtactaaaagaattttggtttatgataatgataatctttaaccgtgactgttttgttttcttggacaaattagggactgcggttgttctcgtgatgcttgtgaccacattactaatggtgctgataatgctactcgtgtggcattgccactggatccttgtccttatattcacctttctctccttctttgtggagttatcgtacttctcagccgtgatctttaaaatcgatgaaggaggatgggtgccgctcatcatagcagcgatatctcttttagtaatgtcagtctggcattacgcaacagtcaagaaatatgagtttgaaatgcacagtaaagtgtccatgagttggatactcggcctcggtcccagcctcgggcttgtccgtgtcccggggatcgggttagtctacacggaattagcaagtggtgttcctcacattttctctcatttcatcaccaacctccccgcgattcattcggttgtagtctttgtctgcgtcaagtaccttccggtttacaccgtccctgaagaagagaggtttcttgtgaagagaatcggaccaaaaacattccggatgttccgatgtgtagccaggtactgtactttattcttctctgttctttagtagggttgacaaaatcaataaggagttttaagacccttgaaatatctcaaacatttttaacagatatggttacaaagatctacacaagaaagacgatgatttcgagaacaaactgctgactaaactctcctcattcattcgaatcgaaactatgatggagccaacttcaaactcaagcacctacagcagcacgtattccgtcaaccatacacaagattccaccgtagacttgatccacaacaacaacaaccacaaccacaacaacaacatggatatgttctcatcgatggtggactacacggtatcaactttagacacgatagtttccgctgaatcactgcataacacggtgagtttcagtcaggacaacacggtagaggaggaggagacggatgagttggagtttctaaagacttgtaaagagtcaggtgttgttcatataatggggaacaccgtggtgaaagcaagaactggatcatggcttccaaaaaagattgcgattgattatgtttatgcatttcttgctaagatttgtagggccaatagtgttatcttacatgttcctcatgaaacccttttaaacgttggacaagtcttttatgtttagtttagtttttattattttgctttgtaaaacaattacagagaaagggtaataaaaggataccaaatttaagatcataccactgaaactgttactggcctaggtcacgtagaagttctctattgaaagtcctgacccaatccaatcacgcccaagaagcaatccgatcatgtaaaaaacttaagttttatttatcataacatttgcaacatttagtaatttacattatatgcgaactttatatctctagttacatttagatcaccatatttatatttaagactttcatcataaaggttttcacttttcacttgttttggaccaaaacttttggtaattcacaacagtcaagtcaacatgtccgattcaatctataaccacaagaatatgatgtcttatttaggagaggtcaacattataatcaatctttaacttttccctacgcaaattcaactagaggaccaatagaaacaggtatacacaattgccatttttcttagagcttttcctagttgaatattgtagcgaattattgacctttcaacgctatgtaactatatcgttacgatcccctaaaccgaacagtttaaactggcagtagttaaccgattaagcccctacagctgaaccgttgtacttgttgtagcatattataccaaattgggaacagaacctacggataccgagtttaagagaaatgtgatatagttacgtctacctagaatccgaatttgtacggttccctagatcttggtttggtaattatattattaattaagccactaatgactagtttcttagtctcgctaatcgaccaatatgaagtaatctcactcaaatacaattttcccaatcggttcgtcagaacgtgattgtcagaaatcaaaatcgtttacttttctcgccatagcactgatattttcgataaaaacaaatctgttcgcgtattatattgttttattatgctcatttcgacacacaacaaaaccgaaccggtaaaaaatatatgaaccggtttggtcatcatattacactgatatgtatattcaaaggaaacttcccatgcggaagaagaaaatatcttcattaagttacaatcacaatattcgttacaattttcttgacaagttaagttatataattaagggaaataggaaaacaaaattcaaaagaaaaatcaagactattaaatgaggctatataagtaacatgtacaaagaaggaaaaagggattcatagccaaaaccatgaagagcacgaacgacgaatctccttccttgggatacgacttcgccggagttagcatcaaggacggaaaatctaagccgccggcgccggtaatatgttacgatggcttgttcggagggagagacgtgattagaatcgtgctattggtcacgaccgtgacactttcttgtctattattctacaaatctgcaaacaatccactcaatatggtgttttctccatggaagaccgattgttatgcttccaaacttacaaacgagtcttcctcaaaaacggtgagtattaataaatatgtgtatgacgtataatacgaatttattggtattttaaaataaatttacgaaggtttttcatggagttgttaatatatcgtttggtttatatgaaaatgtcagattccatttcaaactaatctctggaatctacaatcttccgtacctaaagagagaatttgtctataaataaagctaatctctctagtcttgacattattacattaagacgataaaaattacacacggtcatgttgatatgttaatctctcttaaatgtatcgatgtttttaggaaccaaagaaggagccggtttcagaactagagagagtattgatgaatgcggctatggaagataacacggtgatcataacggcgttaaaccaagcatgggccgaaccaaactctacattcgatgtgtttcgagagagttttaaagtcggaatagaaacggagaggttattgaagcatgtgatcgcggtttgcttggatatcaaggcatatgatcagtgcctaaaggttcatcctcattgctatttgatcaacgccacagattcagaccaactctcaggtccgaatcggtttatgacgcctggttacttgaaacttatttggcggcgaatggatcttcttaggcaagttattggtttagggtacaacttcatattcacggtacatatactatctcaatcttcttctcttattttaatcataattaattagtgtatgttttctttataggtaccttttttccttcaacattttgcaattactgacttctatgcgttgaattagaaaatattacgcgccatcccccaagaaattcaattactttttaaactatataatatcaacaataacaaaattgttgataaaattgtaagacaaaaattatagaaaaatcttaatatttgatataggtataccaaaaaactaaaattacagcgttttgacttctttggcatgtataaaaatttaagttttaagaataatatataaggattcgattgtacataaaagtgaaatgttaagtttatgaaatatctatatgtcaactattgagaacaccgtttaactatgcatatgctttgttttaaatattgtccttttgttagatcttacttttacttgagcatttagatttgactatcgtgtttctttgtttttagcaaacctctgacttccaattttacgcttaattttccttgattcatttatattaatttgtggctggctatagatgtttaattgtcaactttataccgatagagaggttgcctaatttaacaaaacatgttctaattgacaccaattttattttcttggggaaattaaccgtgattgtcaaaacattacattgtttttctttatgaccacaaatgttttgacgtcagcaccacaacttaaaaaagtttcaaatttgcaatggtttttttttttgaaacttcaaatttacagtaattttctaccaaaatgttaaagtcttaattttgtaatacatacatatcttgttcaatttggtgacttaatttgtattactctgattgtgcactttattctttctataaattatatgtaacaacaagaatgataagtttgtcgtatataggatgcagatatattatggcttcgagacccatttcctcgtttttttccggatgctgattttcaaataacatgcgatgattacaatggaagaccatcggacaaaaagaatcacgtgaactccggatttacatacgtcaaggcaaacaacaaaacttcaaaattttacaaatattggattagatcgagtcggaaatttcctggaaaacacgatcaagatgtgttcaacttcataaaaaacgatcttcacgtcgagaaacttgggataaagatgaggtttttcgataccgtttactttggagggttttgtcagccgagccgagacatcaatgtggtcaacacaatgcatgctaattgttgtattggcttggacaacaaagtgaataatcttaaggcagctctcgaagattggaaacgatatgtgtcactaaacacgaccgtgtccgagactaaatggaatattccgcctaggtgtggttattaaaggtcgtaagagtatatatatgaatagtttcgtacgttaagatagtttcgttgattattggagtcggttattgtttcttaattatatttagtgttgagatagtacgtttttttttttgttatttgtaagtattaaagttttaaacttataagaaattcttaaaggtaaacctctaatttatattccagtgttgttgtttgataattttaatacttttattcttgaagtgtatttgatgtagttcacataggtttattatagatgtattcaaatagtaatatgaaataaatttaaaatggtgacaatagaacatatataatcagattgaaatcttagacaattaaaaaaatcacagctatcaaattttactctatatgtcattaattaatcataacactggaataaaaattgtcatttgcattatttcttatgtttttggcaataatttgtaacactgcacaatcgcttaacgacataagttgcaaatgaaaatttgcagaataaatatttgcatgataaaagttatataataaactattaaacaactatatactcatttatttgcataataaatttatttgtatttttaggtaaaaatataagcctatcgttttttgcgttttggtaaacattatataaattttcttaatgaatattttttttgcataatcacattagaaaacgtaattccattattatttgtgttactaaccagagctaaaacataagaaataatgtaaaaaacaattattatatactatttcttataattattaattgtgtcggcaaaaacctatagttttgacctcgtttgttcattgttatagtgttcccaaacgtatggcgagacgtccttattgtagaatctgtaagcacacccgattttgaaatatctgcaagtttgtagggatttaaaaatgagcttctactgttttattattcctcaaataattcatgtattaaaatgtagagttgttcacaaaaacacaagttcaaaaaattgtcacggttccccactataaaaaaaaaaaaagatttagttttactacgcttttgattacggtaaatcattacaaatattttaaatgatatagtactttctttcacatatctaaaaactacttctagatttatgacatggatcctctataatatttacataaagaaagtggtgaaatgttcaatcttaattattgttacaaaaccaagtcgttgaaatgtgtctaacaaggtatggtctttgatttgctggcgggaaatcatatactagaagacaactcaaaaccctggccattgtattaaattatcattaaatttgtatagtaatataatactaagagatatttcttttcctaatagcatatgttatagcctacagtgttgataaataattatggtgaaagctacggtgcaaccaaaaagaacgaagaagatataaaattcgagaaaggaaaaattaagattttgaaaggacaaactttcaaccaataaaatttgatctgtaagagttttataagaattcatttgaaccagttttcaaaacagaaaatactttcgtcactcacatttcaaccgtttgctataatacttaacaacacttatatattacaataaattcaaattacaaatttaacaaaaccataatattaataaaccttttgtaaaaaaaatactccataatacaattaaatttcaaaaatctaaaattttgtatttattatcaaaatttaacacccgagcgaagcacgggttatcaatctaataatacgttaatttggaagtataatccaagttccaaccatgaaataagaaaaaaaaaaaaaacttatccaaccaaaaatgattaactacacatcatctaagacatgactttgagttctgagttataaaatcacttgatgaattaagagtatcagtcaattatgtacaatttcataaatgaaaagctcataccgaactttctgacaaaaatgaaaaatcaaatcttacagagttttctttagacttggtcttttttttttggtaaacggtataccgtattcgagtaagactagtctttaactctttatcagtatttctttttgtttggtcgaaaactaatatataattcattcgagaagcatagagttcgacgcttcctagtgtagtcattaatcaacgaattaatttgagtcattcacttaataaaatcagtaaaggggagtaattaaaatataactgcggccacgagtagtcggagataacgtgagcgtgatcaaaactgaataaaaagccacgtgttgtcactggaagaattaaacaattactaattgtcattcaattatgtgaaataaaatattaggtgaattctgagaagaaagtttcaatttggggttatgaagagttgaagactattgtttcccaatctatagattattattatgcattcgaaagtcgcaactagtttcagtgatctgttccaaggttatgattatattttgacatatatatgtaattatgtattatggattcgccagatagatttttttctaattaagctagtacttagcgcaattattatacgtaatgttattaaataaaaagttactgtatggtttattttttatttaaaaaaagaagagaaataattaatgttatgtccgtctctcatcgaccaaatcatgtttctctcgggtcattcatgtatctctttgtctttttctgcacttttttcccattatctgatgattcacagtttaatattcgtacacgattctatatcacttgtatagttatatatatatttttaaacactcgaatatataatttggaatcggtctgttctcttgattctctacactctaataaaaacaggaattgatttcaaatggagaaaaagagttggtaaaagaattcattcataaaaatcattgctacaaataaataattagtgtgacaaaacaagaacaatgaccttacaaaactgccagtgatgacgtttgccttgaccttttgtacttaactataagaaccgacaaaataaacagagaagagaacagagaaaacgaaagaaacgctttaaaccccctcaagaacacatgaactcttctccttcttcttcttcttccccttcaagttttcttgattatggatctgcgatcggacaaaaagaagtaaagaaaatcctggttttggttctaggtttagctgcttgtcttcttctttacaaaacagcttatcctcttcatcaagagctcgatgttaacaatctcagctctcgtcctttgctcgatcacacctcttcgtcttctccactaacagtgagttattaattgcaactatacattgatctgtagactgtacatgtatatgtctcgattcatcttctgtctgacatgggtctgatctctttcttaagatctgttagtcagaaatttgttaatttctggtttctttcagagatcaaaatcgatcagttttagggaagttctggagaatgcatcaacagagaatcgaacagttattgtaacaacgttgaaccaagcatgggcagagccaaactctctgttcgatctatttcttgagagttttcgtatcggacaaggaacaaagaagttacttcaacatgtggttgtggtttgcttggattccaaggcatttgctcgctgctcacaacttcaccctaattgctactatttgaaaaccacagggactgatttctccggcgagaaactctttgctactcctgattacctcaaaatgatgtggcgaagaatcgagcttctcacacaagtgctagaaatgggatacaacttcatcttcacggtacgtatctttatctaaacaaaattattttttaccaaccttttgaatcaagaaattaatctagaagatatgcttagaagatgagtacatttgcactaacatagaatatacgttgatgcaaggccttgttacacaaaataacaaatcggttctcagaaaatatcctaactatcattgaattcaccaaaccaacccatatggtggtgaacaagagtttaaaattctccgtttagactttgattatggttggctattaaaaatgtatattttagagttatgtttagcattcatgggttatcatagaaaaactttaagtcttgcaaatttttgtctcttcagttttttaattaattcaaatggattcaaaccaaaaaaaattatatgtatatatttatttacacaaaaaatcaaataataaacaatgatgtcatttctaactatttccctttatatatttaggatgcggatataatgtggcttcgagatccatttcctcggctgtatcctgatggagattttcaaatggcatgtgatcgattcttcggtgatcctcatgactcagacaattgggtaaacggaggattcacttacgtgaaatcaaaccacagaagcatcgagttctacaaattttggtacaattctcgtcttgattatccgaagatgcatgaccaagatgtgttcaaccaaatcaaacacaaggctttagtctcagagattggaatccaaatgagattctttgatacggtttactttggtgggttttgtcaaacgagcagagacataaacttggtgtgtaccatgcatgctaattgttgtgtaggattagcgaagaagcttcatgatcttaatcttgttcttgatgactggagaaactatttgtctttgtctgaaccagttaaaaacacaacttggagtgttcctatgaagtgtacatgatcttaaagactcagatttggaataaaatcattgttatggggaagatttgttatttaatttgtgtagataataaactgtgaaatgatgtcaataaaaaaacaaactgtgaaaatggatcttgtgttgtaaataaacagtcttctactcttcattgaacacttggtctacatataatgtaaaaaacatgtacatttagccaccttcctaacatcgaaattcaaatttttgaccttcaagcttactcattttaaaaagtttatgagaactcgaaatcaggattattagagtgtatatacttggtttagttgtggttaagtttggttagtagttttggtttagtttacttgtatttaagcttaatcatgtataacttttacacttaatgaagatttcacgattattgaaaaggatttatatatacacaagttatcgacctgcatagtattctttcaaaaattaatcaatatgtaacacttaactcagactcggatcaatgaaaatggttgctagtgataaaaataagagaattgaaatctgcataaaatgtaaatttttatggtaccaagtaacaatttttattgaaagaaacctatagtggtctattattgccagatggttgtcttttggagatcctctttgaatgttcgacttaattttggactatcatcaatgttgttgaatgaaagattcaccaattcaatctgaacgttatcttacagacaattcaacctgtttttttctatcactaatttccgtaggaaaaaaacaaaagattcttgatctcgatctgcaaagaaaaatctcttaccttgatttttttttaaaagccaagtcagagtcagagctatcactttcacataaagtcatgtaaaggcctaaaacaggatccacatatgtaggttcggcccaaaacgtattttgtatctcctttaaaattttgatggttagcagaaatcagaatatcagtatgtgacttttcaaaaacaaatattccttaagagtaaactcttccactgggtgtattgaagccatcaaacaaataagcttttttggcaggtgttgtaacaaaggaaattggggaataagaagcacaacattatgggtaagtgtttccggtagttatttgatgtagaatttgtattaagataatgaatctagttattaaccagtcagcatagttcgtaccggcctataaaccgcatttacttgtggagtttatcataattaggggatttgtgtcgaatggaaaaacaatattaaaaatgttatagtgatacccatttgttttctttgaagtttctctcctagacctagtgtagagtggctcgcaattttatgcgatgtaacatgcgaatatcgttaccgtctaattaaaaacttatgtcaagtagtcaaataaagaaaccctagaagtagaagactacgaaaatagggttcggcgaatttgtctcgagtcgctaacaaacatgcatgatgcatcaccttccactatggcttacacgagtttccattttttttctttcttaaatcttttttttttttttttaaatctagttttcgatacaaactttaagtttggtttaattttctaattcactgttatatttggtaaagtttaactaaaaaaaggtcatgtttatcatctatatatttagggaaatatgtagactaacgtaagagcttttgttttgggttaattagtaaagttgtagaataatcaaacaaaaaaaaaagttgtagaagaatattcagtaaataaataaaaattaattaattgatttacccaaaaaaaaaacggaggaaagatctggtccatccaacggctggtcaaattaagaaaacattctacataaattcaggattcaagttgcagaaaattattatttcgtgatttatgaaattaaaatttctaaagcttcagatttaggggatgttattgatttctaatttacaaggaattttgatgatttcaattaaatccttaaaatgaaagaaatgaaagattttaaatgattgttagagagttttttataatcttgttgattagtttttcataatcttgtaaagtttctcaaataatctctctattttgataatactttccatgactttattttataaagaaaaatgaaggaagtcatgaaccaataacacaataatttaaatcattaacaatcatagattcttttgttttaattgaataacacaaaacttataatgactttataaaagtatgtatctaataacccaaaatttatgaagactttagattactttttataaatcttaaatgaataacacaaaactttaacatacttttaaaaaatcttgattgaataacaatagattttacatgacaatttatatcactaaaactcttctgaaatcataaacgaataacacccccttaaagtgttactatatcaaaatcatatgtgtattattattggatagaactatactatgtatttgaacattgaattgatattgttgtttttataatctacaaggccacaaaatcctccaatatgaaaaccacctctcacagactgggtaaaatgcaatgtgaatgggggcatatctaaggaaaggattctgatctgagtgaattgagaaaaagtcttccaaatctatgttccactatattaaaatacaagaaaaattttgaacatctttttcttttaaataacaattacccttcactaatttaattaaatctaagaactaaataaccaaatacagaaaataaagaaactagtcttttctttttgtagataacaaaaacaaaagagtaaaatgacaaattagattacatgaattcatgtgaagcgctagagaaggattcacgaggaagtggtggtctcttcctgatattgttagtagtcgtaacgtatcttgaagaaaaagcataaaaccgcaagtagtagtcctcatcatcaggaagtgtaccacacgcccctccgtcgaagttgagtgaatagctcattggatcgtaccggcattgcaaagagctcccttgtctccgagccgtcgacgtagccagcaacaacctcccttttttcttcagttttctgatgagtcttgcaaggcacgtgacgcagcagtttggcgtcggagttgggacattggacttctttgtcacggcggttgcggtggtagccttgccgccgtgtatatgccgggaaaatcccatttaagtgactttgtcggacagaggagagtgtgtgtgtgtgtgtgttgttgagtgttataatgatgaagagaatctaactgataacctgacaagcgtatgtatgtctatatttataagtataatatctttatacaatccaaattaatatgttattaatctactttaagataaagacaatactatactcattttggacccaaacaaaagaaaatctcattgctacttgttttagcaaaatattaaacgtttgattggaaagagtgtataaataaattacacaaggtattgtggtagaaatgttaaccataattaaaaattgtagaaccaaagttaagttcttgtatactaccgtttcaattctatggttagccacttcttctataatttcatagatattttttgagtatcacttcgagattcctcgatcataacgaaaataatgtacaaaactatatagtaaagtttctctatagatttgtttttcaattgtattttatatgtaggtcctagccaatagccacgattttataaagttttattttcttcgtttcacattctgcgtttttagatccattatcttaagattttaacggttaacttttcttacacttcgatagctcgaattatagttaataatttcatataattacaaccgtaacaacggcattcgacatatacctaatctatctttaaccaagaagatatatgtactacaatgttttctctatattgatcaaaaattagttgtcgacttccactgagtttgtgtgtttataattgtagtatattaaattgacgactaagaagtaagaacccactatcatagcctaattaaactttatcgaaattaaaaacctattacacatacggtaacatgtatttacaagggttgcattaattctttatgtacactatgtattgaatagtgaataaattatggtaggtaaacagtgcacatggctaggatcaaacacatgaagctgagtcaatacttcgtcttctttaccatcttttccactctcataagtcatatctcccctttgtctaatttatttatttatctcagtagcattggcacattgttttcgatggttggtttattttttaattcattttagtcgtcgtaacacatatttatatatcttgtgtttgtgcgggcacaaatggatataatttcaaggtttaacggaaaagaaaaaagtaagtaaccggcccatgtgatagccttacaaatatatgagtgtataagctaattgcatagaaatatacgcctgttagtgtcaaaaactaagaaatatatgcccataatatagattttgaatttaagaagatgatcgatcttaaccaagttcatacaactctttggaatctgaaaaagaaattaccaatatttactatatattataaatatataatagctaaccacatcaagaatgtactcataaagcatacaagcaaaataaagtaaatataaactatagtcttaaatcctcatcaagtcatcatcattgaccaaaagtatatacataattacatatagccttagtgtgtaaagcacgtgatcagcaatgtaattagcactgcccatcatttgaaccatcaaacttgttaataacaaattattatgtcaagactcgagagaattcactataagatattatagttgcttattcttctaatcgaagacaacttatattcttaagaaagttttgttggctctcattcatcactttgtttagaacaattctgcaaatttcctcaaaagataaataaacgggggaataagagagtgactagtgaataaaagtcaaacatgggactaagtagatttcccttacatggaaagagataagaaggaaaaaagagagtaaaccactagatatcaattccaaatgcaagaaagactctgaatctttggcctttctcgttggtcatcatttagagatcaatataacttgctttgacctgcagtttctgaagatccatcagcattctcgctttgcttttatgcctccaagctctttgtgaacatcattgttgtggaacccatcctgtcatctccaaacccacatgctttgaagaatggcctgacaaaaatgtttctttctcatcagtacaaatgcataaggattctgcattcactaaaatcaatcccacacatattgtagatatcattagtaagctactatcaccaaattcttggtcagaatagatcacactactatatccttcgatcctaaacctagtgtgaaaggacacaacaaagaactgacaagctactaaagatgggtattagttatctcagaggaaaaagcggtacctttcatcctcgaagcagagagctgctatgtcgtaaatgtctctgcttgtgagtagcctattgtaacagtttttgatgaatgaggatctaacctttaagagaagtttaagggttttaagtaaagcaaaatcatagtggaaaataccatcagacctgacaattctgtttactatcagtttaccaatccccatcctttgtagtgaaggtaaaacctggaaaacactgagaccaaatcacatatcttagcaccaaacagaagctattacagctcgactagaccaggtaatgaagcgaattccactatataacctgttaaacttgtgctataggtaaaagtaccattagatcatggatagaagcggtcaagccataatcagaataagcacgaccgaatccaacaagctgtccattggaaggagtgagaggcaccgcattctgaaacaagtctcccagaaaactatcatccttattttgtctcccaaattctgaagtatacaaagaagaagataaactttcttcttctgaatacaaaaccgcatcatcaacatccacgtgttgtggtttgcaaaacacagatacaataacatcactgcgagagatagctctacgcagctttttcatgtcaacaatcttttcaacgttgctgtctttctcagacaaacggttgcaagaatggttacaaagtgaatacaaattcctcaattcctctagatttatgtctttcttcaacgtagagatatatataggtatcgatcgaggcaatgccgatgcagcattatcagattttctcctccttgcccacctcaactccatagatacaagagaagacttaccaacacaacccaccaaacccatttccttaagcaatcttggtcacacaataatgcaccatctaatcaggaaacatgacatgataatcaaaactcacagtaccaattaccaaaccttacagaaatctatcaaagagttatttcttgaagagaaactatagactaaacaaaatacacattctactcaaagattcaatttttacgtttacaatgaacaaaagattgcaaatttctcagaaatcgagctcaatcaacattccaagactcaaaatttcatgagaatactaactaccataagcgtaaatctctatgaattatctgattaatgataaaaatatgaaacctggggaaagttctgtcaaatttctcgaagaaaatcaaccatttttgcttctaaactcacgatttttccatcagcagaggtgaagaagaagaacaccaaaaaaatgtgtggctcaagattttttctcgtgcaagaaaaattatccggttatcgacgaaatggatccggttatcgaaaataaaaacaggtttaagcaacgataaccggaggaagaggagagaagaagaaaccaacataaccgcgagtataaaaaagcgagtacgacggcgaggacgaagactctttgcccaaagatctgactctgtactcgcttccggtcgtttctcaacttcccaagtcttcttcatcatgtaataaacctttccttttttgccctcccaattatatcatctttgcactttagttaattagtttctgattttgtctatttcatactgtaattctgtaaatagtctctcgatcttcattttgagtttgcttaaatatcatttctgggtttttgctttggttcctaaatttgtttctattttaagtgatgaagattggagctgactttgttggttttgaatggttgacttatcatgttaaagatgattcatttatgtatttgaagttgtttttgcttacattttgaggttttagtattctgattttgctgattataagtttcatctggtccattgatactcaaatttatgtttttcataaaagtttgcaacttggaaactgatcatagtgtttcaacaggtataatttgatcaaacaagctttggtttagaggggtgaagacttttaactaatcaggtattgatttcgaaatgtcgtcaggagagtgtagcaatgtgcagttagatgatcataggaagaataacttagagattgatgaagggagagaatttgaatcaaaagaggaagcttttgagttctacaaagaatatgctaactctgttggttttactaccattattaaagctagtcgtcgttcaagaatgaccgggaaatttattgatgccaagtttgtttgtacgcgatatggaagcaagaaagaagacatagatactggtttaggtactgatggatttaacattcctcaagcaagaaaacgtggtagaattaaccggtcatcgtcgaaaaccgattgtaaagcttttttacatgttaagagaaggcaagatgggaggtgggttgttcgtagtttggtaaaagaacataaccatgaaatcttcactggtcaagctgattccttaagagaattgagtgggaggagaaaactcgagaaactaaacggtgctattgttaaagaggtgaaaagcaggaagcttgaggatggggatgttgaaagacttttaaacttctttactgatatgcaagttgagaatcctttcttcttttattccattgatctcagtgaggagcagagtttaagaaacatcttttgggttgatgcaaaaggtagatttgattatacttgtttctctgatgttgtatctattgacactacattcatcaagaatgagtataaactgcctcttgttgcttttactggcgtgaaccaccatggacagttcctgttgcttggttttggattattactaacggatgagtctaaatctggatttgtttggcttttccgggcatggttaaaagcgatgcacggatgcagacctagagttatacttactaagcatgaccaaatgctcaaggaagctgtcttggaggtgttcccatcttctagacattgcttttatatgtgggatactcttggccagatgccggaaaagcttggtcatgttatcagactagagaaaaaacttgtggatgagataaatgatgctatttacgggtcttgccagagcgaggactttgaaaagaattggtgggaggtagttgataggtttcatatgagagacaacgtgtggcttcagtcgttgtatgaagatagggaatattgggttcctgtatatatgaaagatgtatctctagcgggaatgtgtacagctcagagatcagacagtgtgaactctggtttagataaatacattcaaaggaaaactacatttaaagcatttcttgagcagtacaagaagatgatacaagagaggtacgaagaggaagagaaatcggagattgagacattgtataaacaaccgggacttaagtcaccttcaccatttgggaagcaaatggctgaggtatacactcgtgagatgttcaagaagtttcaggtggaggtgttgggaggagttgcttgtcatccgaagaaagaaagtgaagaagatggggttaacaagaggactttcagggttcaagattatgaacagaaccgttctttcgttgtggtctggaactctgaatcatctgaagttgtctgttcttgtcgattgtttgagttgaaaggttttctttgtaggcacgcgatgattgttctgcagatgtcaggggaacttagtattccttctcagtatgtgttgaagcgttggacaaaggatgcaaaaagcagagaagtcatggaatctgatcagactgatgtagaatcaactaaggctcaacggtacaaggatctttgtctccgttctttaaaactgagtgaggaagcatctttatccgaggagagctataacgccgtggtcaatgtgctgaatgaagctttaagaaagtgggagaacaagagtaacttgatccaaaatcttgaagagtcagaatcggttacagctcaagatcttccaatacatgaagaacagaacaatacatatgacatgaacaaagacgataatgtcgctgacacaggacaggtattgttttcttctcagctggtttcgtggaacaagactattaatctcctgatttttatccttaaggcctgtatttggtctaacctggctttctctttgtctaggaatattcattgcaagaagtctggaaagtaactgctttgcaagaacaaagaaaccgatactcgattctcgatgactacctcagtgcccaacatatgtctcatgaaatggtatacgaaaatagtcctttacacatttacagtattaaaaggttcaaatttcaaacttagtgcctctatgtgattcacagggacaaatcaactcgatggcctcaaatcgcaatggatattgttctgtccatcaaaacatacactcattgcaggggcaatccataactcacccaaggctttatgaaactgtaagttgttctctgaatgagtcatcatgaccctattttgatcccatatatgaattatagcaggtttgattgaagtctatgtttaaaaatttatggcaggaacaatcaagtttcagaccagaagctatgtatgaaagactacaagatatggtaaaagacttgaactagactttaaaagtcaactcaaaaatttcacgtgtttctctgtttacaaaggagtgaaaagagttagtgtttatattcatgaatgttagggacaatcaactgttagacatcatcctcagcaacattgcaatgcttcgaaacatcaacactccaacaggaatttctctcactgagtcactagctctgcctttttcgagcactaggatttaaattgtgaatttttcttaatctttgatttttacttttgatgataaaaatgaatatatgtacataaacaaatgtggcaaataataatatatgtataattttgatgttttcttaatttttcgaaatctttaaattacacttcaaaaatattgttttagatacaaaataacttcatgtatatcaaaagaagaaaaatcacaaacattggtgatcaagtgtgatgcttaaattcttactcaagaatgaaatttcttatcaacatttttgacagcaggtaataagaaattcatgatcaatcctgataaatcatcatcatatatattctccaaatgaaaagcttccatatatgcaactatcctgcgtacatttctgaaagttgcttgaaaataaaaaataaacatagatgatttaaaacagtatatataaagatgcattgaccagtaaacgatcgagagaaccgaagagacaggaaatcatcaaagtcaaagtcttcctataggatcatgcttgatgttatcaccatttgtcgcttcttataaaattgttaatattgttcataatatatagttcttcgaacatttctgagaactgagtattgtggtttctggtcaacacatttgaccaactcactattgactcttcaagacagtgctgtatttgtagtttttgtcattgacattttttttatatactttgatgatttgatgaagtacctattctaatccacacttctagtgctatcggccccaatacgtatatctgaactgtaacacttttgtatttttccgaatagcgaatttaatagatgaacctttttttaaaaaaaaatggggaattttacagaattaatgagtttgtgcacaactttcgtagaccttcaaagtttatatatcataattatcctcatatttctttcttttttgattaaagtaaattttataatacaaaattataggcgtatacgatgatagtgttttttggtgacttctacaaactacaagctttgtatttattttattttataccttttattgtacacatataacatatagtttatgaacgggaggaagcttcatcaaataaacaacccaccgcctaattgacgggcaagtgacagctctttaacggtaattaaatttattttagggttttgttaagaatgacaatacatacttacgcgtgatttttcttaaaataatcgacggacaagtgaatcacgttggaatgatatactatacgatgaaatcgattattgaataatttaggttttaattttattataatcttaaacttataacgacgtaagcagcttctcgtcattgctgatcatcacactttatatcaaatcttcagaaacaaaatttataaattgagagtttgcatcagtatttattttcttaattctgaagcaaatattaattcagtgtttgataaataaaaaaaccatgaaagggtgtaaacattaactacaaatgcatatactatcgttaagattcgaatcagtaagtaaaatttggataattcaaatcgattatcttaataaatacatatatagtgttagctttctttttcagcttgtatacttctgtaatgatgaaaaaaaaaatcaatatcaccatagacttggtaaattgctggtaaatgcatcatacaaatttaaaatcataatcatgagaaaattattcgtttataaaacaatatacaaaagatgcattgaccagtaaacgatcaagagaaccaaagagacaggaaatcatcaaagtcaagtcctcatataagatcatacttgacgttatctccatttttcgctttcaaaattattttcattatcactccatctctatccacctaaactactaatatttttgtacatatataaataaaaatattgaaattaaccttacatacaagttaacgctcttatgaaaagctagtttgaagcctgacatacatttcggttattactaatttagtatatgcgataaaacttctgaggaaaaaaagatgatacattacaatttagtttaaaccaacaacatggtttgattgtcatagatcattttggatatattttcctttttagcaataaaaataactaaatggaagcttaattttatttagtctaggaacttttggttacaaacaaactattatcttttttagaataacttattccgggagatatatttagttgattttagtacggttgatttggaggatgtatgtcatcaagttctcttccagtagaaaatgatttatgatttatttttcgtctattgaaaaagttacaataattgaattagtagtgaaagttatactagttcaattaaattcttacttacacttaggaaacccaccatcaaagtcaagactcaagagaacaaccttttatataaccaaaagtgtacaatttagcattaaataaaatgatcacaataaaatttggaatcctggtcttcatcaatttagtgaatcctcagctatttcttacaccataaattagttaaattaagaaaaagattatgctaatacttaaaattcaaatacttattcaacactcaaatgatttacacactgcccaatttattatattgaagttatttgtacataaacatattaaaatcctcaaaggtactagtcaacgtcaacgaccatcaagacttagctacatctccttcccgcatataaagtaaaaccttaatcctacctcctatgcaatgtatacaagctacaccaaagaaaaaaaaaattgacaaacaaatataaaatccctatgaacaactctagagaagaccagtggttacaacactatgagcaacaaaatattcaagagattactccgtgcttcaacgccattaacatcgcgtcatcgtcgggatcttcccttggagacggtggtgccgcggcacatgaagctgctggaaggagatctagggcttcgaggagagccataccaacaaccctcctaaacgcaaaccctagcaatttccgagccctagttcagaaatttaccggacgttctgccggaggtgaatccaaccgcagaaaaggtccggtgactttggatttcgggtctcccactacaatctccaaagaagctatctttccagtctcaagcgatcgaagtaataacaatcttgatcatgtggtcaaccaacacgtgagtaacgagcagcgtcacgtgacttggtcaggtacagaatcaatgatgtcgtatcagttaggcgaggaaactaactcggcggtttacagcagcgggtacgatgatcaagatcttccgagggaatactccgggaatagtagctatgatgaaagtttggatcacatggattattatcaagatttccaccgtgagacggcaacattggaagagtttatgatgagagatctcgatttataatatagcttgtttttagtcattagatattatgaagatgataataatcatgatcatcataatgttacttaggggaaaaacaagtttcttagaaatattactttacaattgattttctaataatatttgaagaaataaataaaatatgttccaaaaacttccaatatatgatgtgaattttgtacgaatcacttgaattcaattaaagggttacgttgaaaaattaaaatggatttggtatggtgaattacttaaaaatttaaaaagttttagatctaggaaggagtttagttagagcatctccaaaatagagtagtaacttaatcttagagttggttttttctccaatcttattttgttttggaggtgaaaataaaaatctccaaattttgatgtaaaatgaaaatacaaaactccaaatatgctgtaaaacaaaaaaaaaaagacaactccaaatataaataaaagtttggatatttctattttggagttagaaatgaagataggttgaagaatttttttattatctcaaaatagagtttaaagatgaatatgggggttgcagatggtcttaccatactacacaactcgtttatgtgttgtttgtacctagtgttactgataatccaactctgttttctaaaaattaattctagtttgcagtacgttaaaacgattttgattgatataacagatttgataagtatataaatcgtttaaatttcgtatattcataaaataatttaatttctatatttaacataataaatttaaaattaagtaaaacgatttttgaaaacaacttgtatttttcaccaatacaacctttgaatatctcaatgcactttttgaatcttccaataatcaatgtaaaagtacaaagattttgaatcttccaataatcaatgtataagtacaaaagttatgttttcgtatgtgcttacgttcccatatatgtaaaacaaaattcattcattttgaagacttttacaatattccttaggaatgattcttttgaactatatctaattaatatcgattgacaaaaaaaagatacatatttcaacagtcagttccattaaatatatcggataaactatcgtaatttcataaaatgaaatttactggtttatggtaatggtacgtactattctactattttgttagtattatttaggtttagttttagtaatatatatgcgtacgtgtgaactcaataaaaaaaaaaaaaagaatactttcataactaaacatggaacagtgactatcaaaattgagtgaagctgtaagatgatgtcggagacttagtcatatactactacgcgtaaaaaatttatttatcttatattggcgagagtttacaaaacataagagagttatttatgctgtactagtgaagccgacaaagagaatgaatcaaagaaacggccaaaagcatcgtcaattgaaccatttctgcagtcaaaagttttactcgattgcctttgttttcaattgatctaaaaatattcataaattgaatttcgtggtcaaagtttatgaccagtcctataggtatatatcataaagtcaacttcgcatcaattattgttaaattctgttcacatttcactcacatgcttagaatctgcgtttgacttttaaaaacttttaatttgaattttcaaaacgtatattgttcatttgttcatacgaatatatacaacttctttttactaaaaatttggaatcatctttattattaacattcacgtaacgaatttggtaatcatcaaacaagtaagaaattgtatatcatatcgtaaactccgtaaaaaaaaaaaaaaaaaaaaaaagagaatggtaatttgaaaagaaacctctaattttttattttgattaaaacataaaatttatttcgagaaaaacttttgacataagcgttgtctcaaacattttgttgaatacaaaaagccaataaaagaatagatgagagcttcttccttataggcgaaccacatcgccatacacgttcataacgtcgatcaccttgatcttgtatggaggtaaataccgattaattcttagtaactgcctgacctgatccacaagttgaccatgacgcatttttttttagcgtcctacggattatgtatagaactatatcgtgtatatagcaaaatctatatatagagacattatataatatacatttgtatgatgtaatgcaaaataaccaaaagcgtgtggtccaaaggtttgttcaaaagaagggtatggagtaaagtaaatgattaatcttatggatccgtgtcaattatcaaattccgttatccccgaaaattgttatagttttcttttaaaactatttgaaatgatctaattaacacaaatattaagttatatatatatatatatatatatatatatatttcgatatttagtttcaatatcagtatagatctactctagttatgacagcaaactgttgtgattgcacttgttaaaattaagaaaagataaaagcgactcttgagcatcaagtaaggacaattaacatcctcgacaagcaaaacaacgaccaagtcaatataatcatagctaaattctaattgtatcacctaacaaaacaaaaacgttttattgtatttttatgagttttgaaaattacggctatagcgtgaaaggtgagacgtttgtctttagtctttacatgtcaatttacgaaatgacgactgaaatcaaattattctacgtgttttgatgtgcatggcgtttagcttattgtttttttcgatatgcgataatagttttaagtctaccagttttatataataaaatggctattatatttatatctactgtatatgatatttacaccaattttagcaacatgcttcttgactccgactataagtaattgagatggacccaaaacaattataatagtgaggcccatacaaggcccaaagtgaactgaataactaagatacagttatctccgcgccaacacaaaacgacggtaaattactacttgcctgagaaaattttgcccccttttgcttcaatttgttgtttccttaaacccttcaaagcaaaattagggtttctcttggttttcgcaaattagggattttttctctcgttctcatgaaaagatgagtttgatttccaaatccttggcaagaattgaatgttcgccatttttttatccaagagcttcagaaatcactaccggaaaacggataacctctccgcaaatccgtttatacactgcggcggccgtcggcgggaaaactggaaatggagaaaggaaacaaagagccaaagcaccggcgaaaactccggaggcagtgacacctgtgaaaccgctggagattgcgtcagtcacggcgacgacggagaatgaattgcctcggcctaatgagatagcttacgagagtgaagtagcgaattgggttaatctgattggatttgttgatcaaccagttcaattcgaagcttcttctgatggcaaattctgggctggtactgttatttcccagaggtctgcttcagattcctctggtttctggtactctctctaatctatactcaaagatgagatttttatttgtaactttgtttgtgattcatatttgaaaaggttttggattttgttttgtcaggattccgataatatttgaaggcgatttagctaaaaccgcagctcgatatgtaagcaaagacgatcaaattcatgtgtctgggaagctgtttatagattctcctcctccaaatatgacttatgcacaagccaatgttcaggtgtgagctttaaatagtatttgatcagttttatgatacttgtgagaagagtactatgttgatttgattatccctcgagtatgtatgaaaagttccagagaacctttgtaactttaggtggttgctacttgctttacaacaggtattggtccagaatcttaactttatacagcctatgtccccgtctccgtcgccatttatggttatgtcatcatctgaaaaggaagaaagtggtatcaagaagcagcctggtatgtctcatgtaacatttccaatgaacaattttcaattggcgcttgtgttaggtctgagaaaggctcttagggagctactttttaatctcttgtgatgtatttaatgaaaaatgtgttttcttgtgaaatctttctggcatacatttgttttcaatgctctgattaatggtttgttaaatgagtctctagctagagctaagcaggatatagtcattgatgaagcttcagattcttggaatcacctcattgaaaatcctaaagaatggtgggatcaccgggaaaataaagtcaatggattggtaaatgccccatgtgcttaactattcatccttatctcactcgcaatcttttgatatggtgtctgctaaatctctctactagttttctgacttcttggtttttctcctacataggtaaaacctaggcatcctgatttcaaaagcaaggacagtagtttttcgctgtggctcaataaggctcctaattgggttttgccaaaactcgaaggactcgagttcgatgttctagtccctaaagccagagttgtaaaacaacttaaaggtaaagttcccagtcatttccatgttcctatgcaactatacaaagaaagttgtttacagttatgtggcacttgttcaagtatgtttgtataaactgaaatctgggctgatatgtgtaggagaagaatcatggaaggacttggttcagaacccagataaatggtgggacaatagaatcgacaaggtaggataccaatatcttttgctcggtttttcatcaatctttccaagaaactgacctattgtcccaatatcgtttttgttttgaagagaaatgcaaaagcccctgatttcaagcacaaggagacaggtgaagcactgtggctaaacgagtctcctacttgggtattaccgaaactgccaccagtcaagaagaaacaagaaagtattgtcttttagctttagaaacattatctccatgtaaagagctccaagtgtttacaaaattcatcatttctattcaaagtggtcttcaaagttccgtttgatttttggttagtagactgaatacagtagctacaagtgtggacgattccaaatgtctcaggtaaagcaagcatattaggtcttaaaagaacttctagaaagagtgtttcaatttcacaagcgcaaccaacaacgttaacaagctcaacttaagagaaaaaaggactaactattgtcttacaaagtagaaagatgactaaatactatttactgtaaaacttaataaaaggcctttgacacttctctccttattcagctcaattcactgcagcatgctctctgtctagtaccttcttccctgtggaaactgaaacacaggaccatctcagtaacaaatatggggaaaatggggtactttaatgcctgatgaggatatcaaaaaagaaagatgcaagattcattattgatcgagatcttacttggtcagacccgggctggcctgctggattattgttgttccagtctcgattcctctgatctgcctgtgggaatgtctgattctgctcttgtcctggtccagaatacccctgaccatagccaggatttccagctccaggtgcaggacctaagtttccagctccagatgcaggaccaaagtttccagctccctgtggattgtaattcctaggtcctccttggttgtaaccaccttgtggcccttgactatagttcccagatccaccttgaccgtaactgctttgtgttccttggtatggaggcactggagatccctggacttgattgtaacctgcctgatatggaggcactggagatccctggccttgattgtaacctgcctgatatggaggtggtggagatctcgggccttggttataacctccttgaaatggtggaggcgcttgagttccctgaccttgtcctggagtggcatagccctgttgaggaccatagctccctccaccaccttgcattggtggttgctgaccatactgtgtgtttctttggaagttttggggaccaccacttcctcctcctgaacggtcaaatctaggacgaggtcttgctctgccactctgaatcggtggtggcctgtgtgttatcactccattctcgtatttatctcctgaaaacaagaaacataattttgttgatagagtcccaacaacaaatatccaaaataagaccagtttgtaaaaaaaaccagctcacctccatactctttgttctggggatcaatgtaggaatctggcaagatgaaaaccactccgggtagatctgtttacatataccaataacagagtcaatatctggtgaaaaaagttgaattcaaaagaaaacaaacataaatgattcgaactatatacccttgaacttttctgattcttgttcagtcatgattgcttgaaatccttggtaagtagttgtgctacaagcatacatcctttgcttagcctcttccacgctgactcaaccataaacaccaaaaatgaatcaatataatcgtcttaaccaatatcaataccagaagaagatacacaaaaatcaaagcagagctatataacagtgaatggaaccctagcaatggtaaagttctcacatttaagtaacttactgaatgatttttggacaatttagccaaaagcaacgaatctaagcagtgacaaaaattcatctactaacctgatgccaagtccttgggcgcaagtttcttcataagcagcgaccatttcttctggagacttaggagtttcctctttggagaaatccatagtgataagccagtgattataatcacatccttcgaacaacacagtgtcttccgtgatctcatcaccttctttgtaaagcttgtactgcctcgttgaaaacagtctcgccggtgctcgagtagctacttccgtcgaacgccctataacggatctctttaacaccgccgccgacacagaagggaaatcagacgctggtgtgatcgaagagctaattgatcggttaacataggaagtcgcagtgagtaaagctcgtcggagacggtgagatatcatagccatcgttgccagagaaattatgaaggagtggagagtattctggaaagctttggagaaatgaaattagggtttttgtgtgggttttacaatatctaaataaatagtaaattactttttaagtccttattgtttcaaatgtttttagtttccgcctaaagtttcaaatttatcactgggccaaaaaacttaggccttagctttttactataccgctgtcgttttataactctctgtttgtttcttcttcttctccctctctatttccggcgactgtgaattatgtggtcggcgacgttatctttcccttcttttgtggcttcttcatcttctctacctaattacaggaaccttaggtttccaaagattaaagcttcgctctttaattaccctctagcgagcaaaatcatggtcagaagtaagattcagattatcttttggtttatatttgaattcgcttctagctgagattaggacatggttctgttattgttccaaaagtaatttatgattctggtttgattgaaattagttgatttgagtcaggattgtgacggtagtcatatgtgatagctctaagctcttgtagcaatcattagtgaagttgaagttggttgtaacttcaacttggtaattactctacggttctgatgtttcttcactttgaatttgtagatttaccgttttctacaagtgaagattttctaaagagagagttttcagcttttggagagatagctgaaggtatgtttgcggtttcaattttactctgttttgttgctttaaggttcagttttatggcattgatatgttcactcttatacttcaaaacagttaagcttatcaaagatgaggcaatgaagagatcaaaaggttatgcttttattcaattcacgtctcaagatgatgcttttcttgccatagagaccatggaccgtcgggtaaaagcttctttcaatcacaagtttacatttttatgtcttgaaatcaacctaaatgtttcccattcctctgttgcagatgtacaatggcagaatgatttatatagacattgcgaaaccaggtaaacgtgatttccaaggactgcctaggacttctggtccacctgagaagtcggatgagccagaagaagccgctaatgatgaggttgctgattgctggtattagttgttagtatcaagctcaccaaactgtaactgaacttgtataaatcagatgtcaaatcatgctttcttattaggaatatgatcaatgtgaagaatgttgttttactgataagcaattattgacacggttccagttacagctctatcggtttctacaaccaccatattgttggagacattggtcactgcatttgcagggatctgtccggattgagcgaaaaacgaatgctggtaatggtttatccggttagggaataccaaaacaggggaaaaatcagcgatccatcgtgttccatttgcggaaaccatggcctttccggttgttgatttcagcatcatcccttctgcattgttttgatcaatcacaacttgattaatatcatgaaactctccttctagcttgacaatcgggaagttgtttttggcggtaccgctaaacatgttgttgacgatgtttacaccggaaatcttcccgtgtaccgatctcaagacgatgtttgcatctcctaagaacaaagcattggtgacatgaacatggacagggtcttctatgactatacctgtgtaatcaaggtaacaattatctatcctcgttaaatgtgatttcactagaatgccaatgccaccaaaccatgtagctttattgtagcaatgcacacccgtaaccatatttgcaccaccattcaaagagataccgataccagccgagaaaatcactacatccgtaatggcattgtcgttactcgagatatcgattcctgtcccagtaaatcctctttcttctctgtctcctcctaccgttgaatgttgccccaagaaggagtttgaaatgtatgtctcatgacctccttggactttaatcccttgcgttgtgaaatggaggaaataacaattggttatacggatacgagctgagtcaatcaccaaaataccacctcctcggaatcttgagtcgaagagaacatcttggaaggtcacatcctcatagaagatcccagagctctggtctttctgatcggagaaagactcctctggcgacattttcattggtttcttagcgtttgatgctacaagctcaactaaatgcctatcaccaggaaacagttctgatgcccggaaagtcccacctttcacctgaattacaccgaacaatgtcttaaaagactcaaaccttttcataagtttcttaagtcaaattttaaaatgagggactaaccacaagatttccgccaccggaggaagggaacctgagaggttttccgatcatgtaactgccaccttggagatcaataactagaccacctaaatcagcgacacgtggcagcatctcaagtccagtttgtaactgaaaagcatcagttaaagcttcaagtattgcgtcactactgtcttgtccacctgtagggtcagctccgtaaccaatcgggtatatcaccttcccaacctgcacaaaccaaactcacacacgctcacaaatcacacacacgtgcctgtaatacattagaaactgaacaagaggactttaccattttgggagagtgagaagaaggagaagacactggtgagagagtgggagtgactgcgagtctttcttgaatcttctcttggagctttaaaagcttggtcatgtctcttcttaaggatgatgtctctttaaactccattgaaatcgtgatgagaaacagtaacaacaagctaatgaagctatagagactcatctgatttttcttgactcttgtcttgttcttgagtgtgtgagagagagaatttcttaggaatgattatgaagaagatgcaggtagatatgtgcgtgtgtgtatatgtattaaaaggcaaataatctctgttattaaattttggtttattttttcaatgtacaccgactcgagttccaatctattaaatagaaacactttagaagtttttgctttattcataagaaaatgcaaaaagatcaaagcatgttcgtacgaaccgctcaagttcaacaaagaaagatcaaagtatttgaaaatttattcctaactggcctaatatcaaaagtattatgtgaagtatgaaaaatcatcaataaaaataaaatgattacttgacgagaaaataaaatcattcgttttagactttgtttacaacacatcttcaggctttattcgtcataaagtttgcttttctttttcataagtattcatcattcaataagaaaatgatacttttattttcacactttttgatgccaaaaaaaaaacttacagaataaagtatgtcgaagacttgaagtaatactgaaaatggggattgagtgtggaagtataaataaattttactttatggccaacatctaaaatttgaaaatacagagcatcaaaatctccttagattatctttcataagccaccaactctgtagaaatttaattacattaggtaaagctttatttgattctagtgtaatttcagattagtcattgcattgaatttcttcttcagacaacaagtaaatgtctgccaccaaactcttccactgtagtcacaattttcgagtttttatcatttattagctgtataaaaaataaatttcccccttacaggaaaaattacaaataaaaaccaacaagtataaatcattttataaaattataaaaccattaaacggcaaaaacacgacattaaactccttgattcactgttacataaactgtcccagtaacaggagcgtttgtctcaacgaccacccggttatcagaaacgttccttagcgcgtgcagaggaaacacgccagcttcactcgccacaagtgtgtactgcacgtggttgattaaatccgggaacaacaaaaccgggttaaaatcaacggtccaagacgtcccgtttccatctaccgaacctctagccaccgtcgatttctctaccattccgttcacactgttacggtcaacgaccacctggccaacgtcatcaaacgcagtgttcctctgatccaattgaacaatctggaccccatgacccgacccggaaaacatattgtcaacaatactaaccccacgaatatatccggctatcgatttcaacaaaataaacgcatctcccaaaaaaaacgtccctgaaatctgtaactgaaccggatcttccgcgacgataccggtataatccaaatacgaattcacaatccggttctgagttaaaccgggtaatctcaaataaatcccggttcctccaaaaccggttgctttgttatagcaatgcacgccggacaataagttagcttgtcccgataccattactccgatcctggcggagaatataacggtgtcagtaacggcgttatcgtttcccatcaaattgatggcggtgccggaaaagcttctttctcctctgtctccaccggcggttatgtgttgaccaagaaacgagtttcggatataagtctcgtgtccacttttgacaagaatcccgttcgtgtctccgaaccgtgtgatgtaacagttgtctatgcttgtccggagagagttgatgacggcgattgctccgccgcggtagttgcaatcgatgagaagatctctgagagttatgtattcgaagatgtattgtaactttgacgattcgtctttgagttcgattaagtacctatcgaccgggaaatcatttgatgctcttaatgtacctccgcttatctgacgtgtcacacaagtcaacaaacaaacaaaaccatcaatatatttcgacatagaaaatgtatgtgtaatggaataaacaaattattaacgtagaaaacatgtaacgaaatgtggaatgagagaatttttcaatttttgtaacaaaggagtttttgaaaaaaaggaagtaaatctcataaataattaattttaaatcgaacgaaacttcttttgttggaaagttataaaaaggtcataatgtttgaaattatgaaagaaacatgcatagaaagaaaggaatcagtctattctcgtgaatgagaaaaaagatttaattacttttccattagttcaccaaacctaatagcatctttaatcaagtttacgtttaaattaaggttgtgctattttatgttttagatactttatttaacatatggatgaaatgtcatatcacgtcacaaagacgggccaagaagacatatttttatagaaacatgacttttgtcgatatattaaatcacacgtaggaaaaaaatctaactctatttgtaaacttgcaatgaataaaactcttgcaatgaataaatttaatatagtttgacaaaaaaaaaatgagataggaaaataagagagatacttacaagaagatttccggcgccggctgagggaaaccgtagaggacggctgattaagtagcttccaccttgaagatcaattcttgctcctccgagatcatttataccttgcatcaaaactccatgatttggaccatcaaatgcttcttccatagcttttaatattgcatccgtgctatccaatttccctgtgggatcggcaccatatgatatcacttggtacacgcgcggaccgggtacggcctacatcattttatcttctatgttatcacttgatgaaaaccttctgaacaaactcaatcatagataaactacatgatcattatgactagagaaggttatataatatacctgaggaggggtaggaggaggagataccaaagccggtagatttcgccgaaccaatgaagctttaagggcttgcatttctgctaatgcccgatcatgaggggacattgaacctgaatctttctcggcgaagaccacttgactcaccattagactcattattgccaagaaaacaggcatggccacttgagatttccttagctccatggtttcctcctataataatcgaatgagccaaataagagaatggctgaaggtaatgtttgtgagacatttatatatatacgtatgttgttgttagcacatggaaagagaaaggcctaactaaggttaccaatgaaacattatacaaacttgtgtcttttctaatgggagtcacacatttcgcactcttgtacatttttgatcctctttttcctctctatttctctaccggtttacgctataacttattatttgtactataatgaatctttgttatgaatactaaactctatcatataacttaccttgaaacctacctctcttcaaaacattaatatatatttttgacatttttacgttgatttaatttgttaatttaaatatatagggaggacttagagatagatatgctagttagtatgcggaagttggaaaaagatccgcaaaagtgcataaaggtatagattcatgcattatgagattagatattgtatgtaaaagggtaaaccaggtcatggggttttggttggggaggtttgagtggtggataggtttttggtagagttttttcttctttatttgaatatttcttccaactaaaggtattttcgtccactctttctttttctgatttccaaagttaagatttattgaaatgcttaagaatggagtaacttattatgttgataactactaatgcttttaagaacaatggaggatgaaacaaaacttttttttttgtgtttggttacctgcatttgcacatttttcataaataaaaaaatgaaaattttcatatataaaactgatttttaatatgacattgacataagaaacattactttctctcgtctagttaaatatcagaaaacggattataatatatatttttaaagcaagaaaaaaagtaaaacgttacctctgaattgatcttgattgtgagattctctattgtttagggattcgaatggggttatacttgaggcctgtgaatgtaaaacagagccaaacgaaaagttaattacctatttgatattactgcataagcaataaaaaaaactctatatataaggatggatattgcaaatcgaataaatcagatgtagaaaagaagcacttttaatttggaaaaattgattaaaagtaagaaattcaaaagaacatgtatatatagagaatgtatgtgtataatgtatctacaaagaaagaaatcatgctgttatatgatatacaaataaaaggtttctctgttggacaatgaaagaggcttcttcatcttaaaagaattaaaaaaaaacagagaaaattttaatcaaagaatgataggtaatttcttagcaaaaaaaaagaatgataggtaatgaaatggggaaatgttgggattacttaccagatatatgaaattggccttttattttcatagcaaaattgaaaagttagtctagagtcatgttaggtggtaaaacaattaggttcccaaatctacctatttatatgtaccttatagttaattagcaaccaaaacaaagaaaaacatatgaaaatggatgcaaagtaagtaggttacacgaagttaattaaatgcaaaccaaaatcaacggtaatgatcatacggtaacgtttttccccatattaactcgtgttaattagtaatgacaaaaaaataaaaaattaattgaggcaagataaagtttatacctatgaaaattattacacaaaacgaaaagttaatgtgcgttgatagtttcccaactaataattttcacctcaataaaaagaacagtcgcatagcaaacgatataagttgcaaagaatttcagttatgatcaattttcacaaattagtttagaaacgaaaagaaaacttaaaatcaaacaaaacaatgaaaagtacttacacgaaacttaattttggcttcttcttcttcttccttcagtcatatatttcacacatttgcttttattttcaaagcaaaacaaatttggttgttgttgttgtcaacaagttcatttctatttaatctgattttatgtgtttttctgcccttggttttggaagtcctgtgaataatcttcctattccaagtaaatttgatttgtttcccattcaaagatattcaattcaatgcattattcattttgactaactcaattcattcccctaaaatgattttcattgactgaaaacaattattcatttggttgagtattattactattacattatcattttaatggaaaaatgaggtactgatttgggaaagaaaattaaatttttaatatcagttttttatctctgttatttctgaaccgttcttgtatttgtataataatctgaacaatagtaaatatatatttgagtaatatttggtcaccaacaaaaattttactttcattaaaagctttaattattacttattagctaattatcacatatcagtgttagatggaattgactttagcttttcaagctttaattttcatggattttagtctacaatctagttaacataacataacaacataccaataaaaattagttcacctaaatagtgttgaagcaaacatctctcttatgtgtagctgcatatttcgagattagtcttaaagccaatctctgtctcatttcttgcttgctcccgaactagatcctccttagatctttttactcttccgccatgtcaaaaccaacacttattctagtcatgacgctttcttaaccgtaaacacaggtttgccattgagaggtagaagattccagtaagaaccatgttgatcaacgcaacagcttagccattttatttgatatgaaccaaccgggaaacgcgaaacgtctaacaagcagcttgaaaacccttgtcctctctcgtttggttcgaactgcacaaccgtagaaacaccactcttggcccaatcaaatcgacctgagacgtccggcttcttaccagactttatagcatgatgaaacagcttgttactcatttcaatcagatcttcatctctccaaggggaataagacatttggtttctgttgttttcaccgtgttgagttggagaatgataagctagtttagtatagagaaggcaatacagtttgttaagtcgaacagggacttgccgttgttttatgtttttcaactgaagacaaagatctagtgacagttgaaacccttgttccactgaaactgtgtcaggaatacgtttgctactctctgaactaagagcaaatagctcggcaccaacacaaggccttatgttgaagaaatactttggaataccaaaaggaatctgcatccatttcataattgcttgtgacagtagatgcctgcaacttttcgtaatctcagacataatctcctctttgtgcattgacattgactgattctgcaatccataagtgcatgaaagagcatctctgcaaatagagagcagcatctttactttgccacagactctcaaaacctgattcctagattgcaaatggaaacagtttaacgactcgtttgtgttaacgagtatgttgagcttttcgcagacattggggtctactttccacagccgtcgaactaaatcttctacaagcctcgagcacagaccgctttgtgaagtgaaaggaaccaatgcttcttgaaaagaaaaacctggaaggaaaagaacaattccagcagcaaaagccagaactgaacagctcagtgaaattgttgtgataatgctagaactgctatcgtctatgtctatgaaacacgtcgccaacatatcaaattcctttgccaacttttgtagctgaatagaaatccgaggaagctgttgcagggaatcgcaaccagtcaagagtatttcttccacctgattcttgttgcgtaaatcttggttaagcagcccaaggcattcgacgagttcaagcacggtttccaatacccgagtctttagaaccaagaaccacgtttggaaacagaatactccacttgacgctataatatttcccaacattcccagagacgattgtaaattcatataagcttcacgaagagctagacagtgtgcaaactctccagaggcatctttggagagttctggtaaataaccattatttttcagccaattgactaacttgacactatcacttggagtgagaagcagttggaattttccctcggcatgggataaataggttaatgactttaaccagcaacaattaatatcagactggacgttggttttgagctggtcaaaaatcatagcagatgtgacccaagcacccaaacgtgctgcgtaaaccccagctctgtaagcaggccagtagtttctctccattaaaatctgatttgaacagtcaagagaaacgattccatagttaactatatcagcaacaagtgatacgcctgaatttcctgtatcatcattcacagagaatccccaaagaatcggggaatgtagtagcagtgtgaatatcatttgtgtgtggaaatcaatgaagctgcatgaacttacaaactcagtgatatgcttcaccttttcataaatttcagacaaaagattatcatctccctcgagattttccaagaacactatcaggaacttgtgtattgatgctagaaactctgacctcatgaccacccctcttttgtctttataattgataacaccaaatagcaattcatgagctccatctgcttttcttaagccatcatttaggctcacaatatacgttaagaataatctgactttttcaagaactagcagtctcagttcagaatgttttcctactaataggtggagaaccttcaagaggtcttgaacctcactaactacagcatagccagctcgaaaaagatcagaacataatcgccccagcaaggcgaccctgtccatgattaatacaacgagctgcatcggaagagatgttgaagatatctcaattgatcttttttccgctgtccgaactatttctgtccatatactcaccaagacactgatggctaaacaactgcttgaaaagatctgagaatgagatgcattctcagtaatagctatgagctgaagtaattcagatgcatcagtcatgcatagtttgtagacaactatctgcattcacatcaacggtaagtaagcatcgtcaatttgcaaaagaaataaaaatatttggcgtatgaagtaccttctgaaaaatttgaagagctttaacttgcatatctgatgagagctcttcttgctttaataagcttgaaacacttgcaatatctctttcatgggcaagagagaagcacatccctctttctatgagaaagtggagacatctcaatactgcagctcgagcatgagaagttttatcttcacccagaaagggtatgataacctctgcctgcacccacattgaatactattatacttttctctattagtttgtttgtaatcaatagagggatagtttcctttcagagaaccaatgaaaagtgatgccttatttgcaatttatatcaaccaaccagtgaagactcaaactcagcaaaacagtggctttctattgtagaaattctattttcacaagggccaatattgacttcaaaacatttaatctgtgtaaaccaggaattagaaaaaagtataaggcgaaaaagaacataccagttcagaagcaagatgagttgatcttgaagcaagcttagtcaaggaaaccaggaatggaaccaaattgtcctcttttggggagtccagcattagcttcatacaaatctacaataacataatggttgactgaagttcaatacagatggctttatttaatgcattgctatgatattccgtacattgacagagtttcatcacacaagtaactcttaatctagtaatctactatattttgaaatcgcaagatggtaacaacagcaaaattcaattccagtttcagcaaatctttctttaccaaaaacttcttgacggcttactatacatgagaatctttgagcattagaagcagatagaaaaagaattagataaagaaccttgaatgctctattagcaattgtatgcgagcatcccatttttgcaaaaactcgcacagcagctaacctggtctttggcgttatgtctgggaacttcaccatgtcgtttaacatccccagaacaaccaatgcaaagtcatctgctacttcacaaaagcaagctgcagcaaacagagctgatcttccctgcaagcataaaacggattagaacagttcaaattctacaacaagaatattccaacaaccaagttcaaatcacagattcacagttgaggtttttctttaaacttggactaaacaaagctactcactcttcaaattaacttttaaaaaaaccctgacatacacattgaatgaccctcacggtaatatacactagccacagaacacagtgccaaatgcgtgagaaattatgaactccagtttgatgtatcacaaccactacttctattaagtatcaaatttttagccttcataacagaaactccgaagcaaacacatcaacaaaagaactaaaatgaactatgcttacctccagatcatgaggagaaaccatactgctgaaaaccaaataccgtacaggagcaaattcgctagcaaaatctctccaacaaccaaacagaatcaaagccaaagctttagactcagtatcacccttatcatacacattcttcactcgtgtaagcaattccaagtggttatgcaccctaccctttgacaaaaaccaacttgctgattcatttacgttcttccctcggcttagcttaaacatagacataaaaacccgaacaacagcaagcttaataagcttatccccaacacaaaacgcgtcaacaagcctcaacaggatagtatttgaaaagagcttatcttcttcaggaaccaaaccaaataaattgtaaacagcaatagcagattctggttctttactccactgttcaagcttcccaccagtctctaagatagcttcaacggctttaactgaaataatatcacccaaaactcaaaactttatactttcatagttccagagaagacaacaagaacatatattcgccaaataagtaaagcaaagcaatttagaggtttgcttaatgtgaaacaacaagaggagctgaaattcgaaatttctaagaactatgaagttgaaaagcggaagaaaggacctgagtttttagaacgaagagatttctcgagcttgatgctccattccatggcgcaagctgctgaaaccttctccatggttagcactttttggcttcttagggcttacaaagaagaagaaaccggagattgatgataaatagaagagttctgtcaaacgaaagattacgaattttcacgccatacgcagatgaagaagcctcttctcacgaatttacagaacataaaaattcaatcgaggaccaaacccgacttcaaattattagctgccgattccggttcggttcaggtaagtgatccggtttaagagaatacgcgatcgtgatgggctcaccactattgggccttgtatctttaggtttttatactttcgtaggtccttttggtttgcacaataacacaacttctttttttttagactacaatcgtacaataatgatttcgtttattatattgtgactaaaactgtattttaattttctttgtaacttgtaggcttgttaatatgattgtaagttgtctcgtttaattatataggattacattttaattgcttccgcactaagtgatgagtaagctaacactcatcctaggtctggcaatgcaatcttgataaattaagcattcgtttttggtaataatatatgtggattatcctgaaaatggatttgtcgtatcaacaacaaacatgttcatgtacaattatatggccttttagtttattatatttaacgaatgttaatgtgcatgactaggtaagcaataactaaagtcgggcaattatatatgttttcttcaacagttggacaatttacaaacatatagactcggattattcaaattaacaaaatggtttacgtgtcggcgtaagttgataataatatttaagagaacaacccaaaattaagttacttgttaaattgaaaatatatatccgaaatttatggatttggaactaattttagatctttaatatttgtttgttagactccaaaagttgctcgtggtggcattatgatatttgatcacttgaaattgaactgaaaccaaatactcccatcgtggtgaaattatgtgatttttttttcttcttggtattagaatcaaatagaaatttatatttttcaaagctaagataaacatgccttgaggtattcttgatgcttaaagagcatggatcagattcatcggataaaaaaaagttgtagtggtctttctgaaatggaatttaagtttagactatttgatctctcattgaaactgataacaaatccttctatttgttttttgtttgttaacaaaatacatataataaacacttctaaaccaatagtagtattgttttatcaatttctactgaaaatagacgaataagaatgttaatttatcccacacagacagagacaaaggtagggtgtcacgtgcgtcgatcacgtgtgatagtggttggatggtagaatcttcttcgttatatggtatggtatggtggtgatcccgttttttgctttataagtgaaaggcaaaatgcatcacgattcactagacattttaatatgaaaactactattttaaagacagatcacaaaaatattgtataaaaaagaaatgaatcaatagtcgaaaaaatataaaatactatttttttgttagagaaaaaacatataaatacaaaaacgatttgatgtttaagtttgtgttgctaatctattaaatttaataattataaaatttcacgtttacaaattataatttttatttatactttagtttaaatttaaattatatcattttgagatttgaatgccattattaaatcatgttactatattatactcacagtttaaatcgtttcaaaatagtatataaaacttttatgcgttagacgataattgacgaaatgcttaacacctatcactttatattttttttacacattagattcaagattagtgtgcattttcacagtaagtgaataaacaaaaacaataaaacattgttattgtcgacttcgcatgcacatgattcctcaccccaaatgtgaccgtctccacaagattccactgagaatcaccacgtcatcaatttatatgggccccatctgacgtccaagttggactactgggtcccaacagctgcctcctctctcttctcttctcagccatggaagccataaagaatagctctttctccttcttgtctctcattcccaagagccagtggttgtgttgttgtagttccgttccgtggctgtctttgtttatcatcgtttaatctcaacctcttaaatcggcagccatggcggttcctcatccttcttcttcctcctctagatctcatcctttcctctcccatgtctatcacactagcttccatcatcatcatcatcataatcatccatcgcttgtgctcttctggtgcctcgtgttttctctattatctcctctcgctctctcatcatcatcttcgtcttcttcttcttcctcagactcgtcgtcatcatcgtcctcccatatctctttaggtaaatttgtattctttctctatctattttatcaatcgaatcttaatatacccacttcttaaaaaagtgattttgattccggaacattctctcattcgttagattctgtgtagctacatctctttactctgttttttaccaatttgattacatttgtaacaattgtcgaaataggaatcggtgaaacagaagggacgaagcatgatctgcatcaggcgatcctaagggacgaagctgtagcaagattacacgagcttggacaggtattcatcaacccaacaaaaaataaattcaaattgcttagctttcacttatactctgtttttaagattgtactcttcaatctgtaatttaatgtcaaatctatacacttttataccttcttatgacatatgccttggaatgtttgttttctcgtttgaccaacatgattaataacctcgtttgatggtgtcgttatctctcagggttgctcttaatttaatcaatactttaaaaattcttttctagctgtttcaatctaatgtttcttccagctactgttatcttaaaagtgaatacttctttattgaacatctcttagactctcatatctgagtttgttttggtttgatttctttacaggtgagtgatgcagctacccacttagagaggacttttatgagtccagcatccataagagcaatacctcttatccgtggatggatggaagatgccggtttatcaacgttagtttttttttaacatgtactctctttttgttttatggactcatatacaaaactctcttgagtagatgaagaattggatattctttttttgcagatgggttgattacatgggaaatgtacatggtcgagtggaacctaagaatggaagttcacaggctcttctaattggttcccatatggttggtaattcacaattctgtttttattacctgttgttgtgtgtgatcttgaatgagatgataattttgacaattgtatcttgatttgtttaaacaggacactgtgattgatgctggtaaatatgatggctcattaggcatcatttctgcaatctctgcattgaaggttctgaaaatagatgggagattgggagaactaaagcggcctgttgaggtttgtccccttttataccgcctcatcgaataaatttagtcgttatagccaatggagatattaaacaagaaacttgtgttatattcattcaggtgattgcgtttagtgatgaggaaggagtgaggtttcagtctactttcctaggcagtgctgctttggctggaatcatgccagtttctcggttggaggttactgataaaaggttttgctcaaggaccttagcttcttctacttacgtagattgagtatacgtactcacgttttccatattcattcgttcagtggtatttctgtgcaagatgctcttaaagagaactctatagacataacagatgaaaacttgatgcagttgaagtatgatcctgcatctgtttggggatatgtagaggtaaagcctacttgatctccttttgtttgtatgttcgatagctagtgaagcacatgttgtttttcctcaagagttgtaatatgattgtttgagtgttgactatgaatattctcatgtaggttcacattgagcaagggccggtgcttgaatgggttggttatcctttaggtgtagtaaaaggaattgcaggacagacaagactcaaggtaacgtattcaaagctaattaacttcatgtttaatcttggagaaggctatttgaaacccaaatggacagaattctacaggttactgtaaaaggatctcaaggacatgctggtacagttccaatgtcaatgcgtcaggaccctatgactggtgctgcggagctgattgtactattggaaagtgtttgcaaaaaccctaaagattacttatcttgcaacgttcaatgcaacgaggatacagtagaatcccttgctaattcacttgtttgtactgttggagagatctcaacatggccaagtgctagcaatgtcatcccaggccaggtaagacaaagaaactattctcttctttgcacttatgttttttctctattggtattgtgaatgaactctaaatgatttcatggagatgaattcaggtaactttcactgtggatttacgtacgatagatgatgtaggacgcaaggctattctccatgacttatcaactaggatgtaccagatatgtgacaaaagatcgcttttgtgctccattgaacgaaaggtaaagagtgttgtacaagtcctaaaaccttatactccctattgtttccttcttaccaacttcgtcccggtttttatcatcattgcagcacgatgcagacgcagtaatgtcagacccgcaattgagtttacagctgaaatcagcagctcagagtgcacttaagaagatgacaggagaggttcaagacgaggtccccgtgctaatgagtggagcaggacatgatgcaatggctatggcacacttaaccaaggtaattgactttcaaaagtcatccacatgtttgtttcaggccttataagctataagccatgtgggttttgtctcttggttcagacactaacttaatgggagatttcttttggtttcggaaggtgggaatgttgtttgtccggtgtcgtggaggaataagtcattctccggcagaacatgtattggatgacgatgttggtgcagccggtttggccatcttggagtttctagagtctcaaatgtaaaacatgacaaatatatgagaaacagagtggagtcttgtctcatagagactccatgaaaaatgtatagtatcatttgttgttatttgtcttctctctgtgtactctttggaactgcatttgtatagaattagtccgatttttaaaaatgtatgatatattattagcttatctttcatggtattgtccattgcatgcaataatttgatgaacatggcttatttttgatggtaatatctcttgtttctactttctaataagccattttagaatctcatatttatagatagcatttacaataaatcatagtgtatgttacacatttatggcggataaatattagttttgaatattgaagttaatatgcatgagaggttcctaattttttgaaagaggttcctgatttctctctaatcagaaacggcttataaaccaattaatctgatttttatgtccggattctcttaacgaatatcacatgcaattaacgttgattaaccataaatgtgaaaaaaatacattaaaatctcataatttcgaaatcatttcaaaaaatataagcgtatcatttccacttgtattgttgcttaaacctagcaaactacgtttgactaaacaaacaaacaaaaaaccctgcaattccaaaagttcttgaagaagaagaacaaagtctactactctgttcaggtttggatctttcttcacaacatttttgagattcattttagcgttttttttctaactgttttcttcaaaatacaacaggaaatggcggtgaacggtaccggtaacggaaccggtgacggcgatttctcattgaaagagacatctcccaatatcggcaatggtggtgttaacggcggcgagaagctgacgtcatcgttcgatcttgtggaggcgatgcatttcctctacgctagaattgtccgtgctcgagccttaccggtcaacgactctttcgtcgcagtcaaaatcggaagctacaaaggaagaacaaaacagatcttaaactcaaaccctaaccctgagtttcacgaaaccttcgcattcacgaaaactcgtcttcaaggggatatcttagaagtggtcgtgcgaaacagagataacccaaacgaagacgatattgtcgggaaatgtaagttcgatgttgcggagattccgacacgtgttcctcctgatagtccattggctcctcaatggtatagattggaagatagaaacggtgtcaagatcggtggagagattatggtatctgtttggattgggacacaagctgatgaagttttctcggaggcttggcattcggattcggcgagtgttaccggagaaaacgtggtgaacacgcgatctaaagtttatctttcaccgaggctttggtacttgcgagttaatgtaatcgaagctcaggatttggttctgttgcacccgaaccggatcaatccagagattctgattaaagggtttcttggaaacgttgttgtgaggagtcggatttcgcagacgaagagtgtgagtcctgtgtggaacgaggatatgatgtttgtagcggttgagccgtttgatgacagtttgatacttagcgtggaagataaggtagggccgagagaagagtgtttaggaaggtgtgagataaagttatctcaggttgagagaagggtgcttcctggtccggtgccgtcattgtggtacaacgttgaacacattggtgagaccggagaagggaggagatttgctgggaggattcatttgcgggtttctttagacggaggttatcacgttcttgatgagtcgattcagtatagcagcgattacagagcttcagctaagcttctatggactccacctattggtgtgttggagctaggagttttaaatgctacgggtttaatgccgatgaagtcaagaggtggccgaggaactaccgatgcgtattgtgtggcgaaatacggaacaaaatgggtgagaacgaggaccattgtggacactttcgatccaaagtggaatgagcagtatacttgggaagtctatgatccttacacggtgataacaatcggtgtcttcgataatctgaaattgtttggtgcgggtaacgaaaaccgtttgatcaacgattcaaggattgggaagatcaggatacgtttatcgacccttgtaacctcgaagatctacacacattcttatcctttaatggttttaaaaccagacggggttaaaaaaatgggtgagattcagctcgcggttaggttcaccgcgacatctatgatggatatgcttcagaagtacacagagccgttgcttccagaaatgcattacatatctccattgtctatataccaattagacagtcttaggcaccaagcgacccacattctctgcatcaacttagggcgcaacgagccagcacttggaagagatgttgtagagtatatgctcgatgtgggatcaaacatttggagtctacgaagaggaagagcgaatttcgaacgtcttgtctcgtttttcgatggctggatcgatgcttggaaatggtttgatgagatttgcaaatggaaaagtcccgtgacgtcggttttagtccatattgtctgcttgttcgttgtttttctccctaagtactgtgttttctcgatgctactgtactgcttcgtgtttgggttatacaggttcggtttgagaccgagacatcctccacatatggatataaagctgtctaaagctgattcagctttgcccgatgagctagacgaggagtttgatgtgtttccaagctcgaaatccggtgatgtactgaaaagaaggtatgataggttgcgtgggatcgcagggaggatgatgattgtgttgggagatttggctacacaaggagaaagagtgaaaagtttgttgagttggagagatccaagagcaacgtctctgttcttgacgttctgttttgttagctgtggagtgatttgtttcgtctccatgaagttactgctcacatttcttgcgttctacgtcatgagacatcctagggttagagttttcgatataccttctattcctcagaatttcttcaggagattaccatcaagagctgatagcatcttgtgagtgtggaattgtctaatctatctatcattggtttttagtctgaatccaaatcaaagggttattatttgtatgactttaaaatgaatcccaaaagctatattgtcaatccaagggttatttctttgctcaggttggttgcgttcagctaatagcatttgtgagtatgcaagatatacacttatctgaatccgaatttgaatcaaagaaatttgtttctgatcagttacatatctttatatatagtattacattaaaccacaaaaaaaaagagtctgtatagtagtttcaaggtaagtaagtgaaccacgacacaaatctttaagcttcgcttatggagcattgctgatcaatttcagacttctctttctttgcctaggagctcgaggttttcagccataaagagacccaatcagacttcgaagatctttcattttggttcaagctgcgagaataaataataatcaaacaatgaaagaaacagaacaaagatctcaaatagtcaaatcaaacatgtctgaaacagaacatatcttaacaatggaggattcaatagcaacaaaatgggattttcatatccttataaaccttagctaatgtggtcttactcgcgcataaatcaagtaacatgtttaaaaagttagaatttcaaaaatagtttatctgactacctgtttttcgcgcgcatttctggtattccaaaactccagaagcgcaaaaagttcccacgcatggagactcttaaggtggaaacgggatctgagcaaaaatgctctgtagtgttcaagtacacaggttcctccagcatttatcaatggcggcattgatcttctttggtttacagatctctcgaacaatcatcgcccaagtggaggtcttcggtgccagatacttacccagcattacttccacaatcgtacacgcgcctgatactctctgacgctttaagagccttacaacaagctcttctagaaaactcctccctttgtcacaagaatttgacttctcgctcaaagtattcaaaaaggtgttacacgtaataacatcgggatcacaacctctatctaacatagagttcaagagatctactgctctagagatatctttttgcatacataagccatcaagaagtatattataagtaacaacatcaggttgtgacttgggttcttcttggcataacatctcatggtaaagttttaaggccgcatccatcgagccaataccacaaagaccttttataattgagctataagctactgtatcaggtttgatcccgatagtgagcatctttgaccacaccatcatagcctccttaactctcccaaccccacaaagaccatcgattagaacactataacaaaacttatttcgagaacatccggttttatccatctctttccacacttgaaccgcttcttcacaaagaccagttttgaagaatcctttcatcaatgagctatacgtatacgcattgggcaagcagccactagcaatcattctattaaggatctctttagcttcatttggtttcccttcgcggcataaaccatctacaagaacactgtacacaacaatattgggcttgcatcctttctctgccattttcctccacaaggacatagcctcctcggcctttccctctttgaacaacccacttataaggaccgaataaatatgctgattcaaatgataccctctttcttccatagagctcaacaacctaaccgcatccgttgctcgtctttgcttaaccaacccattaatcagcgttccatatgtgacatcatttgggatacatttgctagacaccatccgctccaagagactaacagctttatctaacttacccttaagacatagaccatgaataagcgtattataagtaacctcattaggaacacatcccttaagaaacatattatccacaagctttgtcacccgtgtcaaatcccctttcttgcacaatccatcaatcaacacattatatataaccggactcggtgaacacccctcgctctgcatctcatccaacagtaaaaccgcctcatcaatcctttcctccttacacaacccatccatcaatgtacaatacgtataaccatcaggcaaacactttctctcaggcattcctctgaagacctcaatagctctatccacaaatcttaacttacaaagagccttaatgaccaaattaaaactcaacccattaggagaaatgttcatgttcatgttggaattcacaacataatcataaaactccaatcctcgatgataaagaccctcgtttataatcacattcaacacagagttaaacgacttaacactacgtttacatcgaaactcatcaaccattctatgaaacaagtctacagctttatcaggcaaatgtgctttcccataagctctaaagacaacaatgaaactacgctctataatcactctgttctctaatctaattcgactcaaaagcttctctaccgaatcaaaatcacccgaattggcgtaactctcaatcattgaagataaagtagaatcacccaacttgaaagaacccattttgggagctgatttaaacatcttctccgagattggagcttccaatggattctccaccacttccattgacgggttaggagaaaccgaaacagaagaagagaagcgaagatggatagagaagttaactgggttactcgaaaggattcgactttctttgagaaagtagctgaagaagctgatacggattgggattgggcatttgggcatgaactcgtagggtttatgcttaaacccttatttggggatttcaaaagtttggtgttttcgcaagagagagagagaaagagatagagatgatgcaactcttacagctctctcatttgcagatttgaaagagagatgaagattgaagaagatattcgatcaatttagaggtttgttgataaacgatgacatttgatttctgcttcttctcttcttcgccactaagagttatcaataaatttcaatttttttgtttcctctcaattaattgattaattacttcttaattactattaaaaagtgaaattttctaattcatttaccaataatttttttaatttataaaatttatgtaatcaaatccaaatggtaaataatctcatatacataataattttggggatcttattatataaaatatatggttttcaaaattgctaactcataggattgtgccacgtgtcaaatcaaacgatcagatgtttacatgtgtcattcaaaatttaacttttttattctctaaaaaaatagaaaatcttaaaaagtaaacaaatttatatatactaatttatatgtctatatatttataaacaattaacatttattcaacaaaaacaaaattaacaaatttgtctttaactcatgtaatcataagtgaaaatagaacactttgagaaaaatagcttagcttataggatttaacttttcaatttttttcatttattaattttaactcatttaatattaatttgcatgatgtaaaattaacttacgagattacgtgggtgattggttcgtctgtaactgtagatttactgctgtagaatttttgttgtaggtgtgatgactgtagttgtaagttttattgctgtaaaaattagactgtaggttttattaatataattattacttaaagaaattgggtagaaataagattttggttgtatgtatttttaaacaaaaaaaaattatcgggtcgggttcgggttcgagttatttatatattgaaatatcaaattttgtgtgcaaatctattaaattacttgaaattttcaaaaattctcaaaacaacatgagtagttttgcttgaatatatctaaaaatacacaaaaataactaaaatatccaaaaaaatcctaatattttctatatataagtataaatataactaatatatacttatatttgagatatgtttggatacttattcgggtttgggtttgagtttttcgagttttaaagtttagatccgttcgagtatttgaaaatttcgggtacacccgcctaaataggcgggccttatctagttatatataatatgttatttattgtataactttggggactactactctcacaagaaacatttgacttcaagagaaaaatggtctcgctttccatcagtcgttctccttattatacaattgcagtctcgaccacaacgggttctgaagctagtgtagaagattgcattctccgccttcaccttcttcttcgactccacgtttgctttggttctcacaactatcttcttcatctcaaatggctttgcagactccagcgcatgcgcatgctgcgtttacacaagacaacaccaaaaaccaagtttctttaaacagatcatatatagcctaataaacaaaatcccctctttctttcggtgatcaagtcttttttccttaccagtttggagaacaatgcgagttccgcgtatagatgaagccattccttctcttcttctaactctgaatctttcatctgtaccatatcaacaacatcaaatccttaatattttaatctttaacacatgaaaaatctcacctcatagtattgcagcttgtcccttcccgttagtgcatcttccggcatccactcgggcataccacctttgaagaaatcatccacgagatctttgttccatccaaaatatgtgtcttcctcctctaagagacacaagttgacataactaatatagccgtatgaactaactaggtatgacggaaaacaaaggtgcatttacatttacctggaattttgggctttattctgcctcccgttgtaattgtgctcaagcagtgtttattctcaacggcatacctaacgtgcgtttcgaactcacagatcgaattgtctactggatccattgcctccaaacttatgaaatgagaaagaatcgaggttatccatgagtcaaaattgtgtacagtcagaaattgtaagtttgtgccctacaagatcaaaagaagcaaagacaaaaataaggatctggtgagagtactccgacagaaacaaagttcacttgaatcgtactagaacgaacgtgtaggaatatattacattttgcagattgtagcaatgaagtccaactctaccgaagaggattatatttggatgaggtcctccatattttgcaatgtcagccctttgtttaatgtagtatttgttataatcaaacttttcttctctctaaacaaaacacagaatctataagctttaaaatgcaaatatctctatgagtgatgagacctaaagttcatacatccacaatcaaatccaattacccgattagcccaaacatgtcgtgggatggaggatgaagattcttgtggtctctgatcttccagcttctcattactctgcgatggttcctcgaccaagtctctggcttcttgcttccacattccgttacccatttcttggcaaatatataaaccctatattaataaacttttaagagacttggaacttaagattcaaaccctaatttggaatacaaatctatgcgcgttaagccaaaccacatcattaattaagaacactgtcaatacacaacatgtgagcagcgaagaccacaacagagggaagtgattgagaacagcagatctaagctcatattcaacatgcatagaagaagaaaaccaattttgcatcaagagatactgaaaaatctttcattcataagagttccaagattccataaaaacaacaactatttggaagaagatgaaatggagacatctcaagttctgttccaatgtaaaatacagaccaactaagttcggtttcagaactcaccttcttcacctatgaaatttgacgagatcgcaagaagaatatacaatggattcagtgtttcgtaatcggtgagaaaaagacaaataaataagcttgatgatagcttgttagaccttagagaatagaagattgggtttaaaggctattctctcctttttctttttcatcgactcaactttatggactaatatatgcaatctcatctctttgttctaatttggacaaatacttttagctttttagacatttgttatatgtcacaatgcaattgataaagatataaatttgttgacaatgaatgcataggttcagaaccataaacaccttcaaattattaaaactcaaaaatagaaagtagaaacccaaaaggtagtttcatcagcacacaaaactcaatcctgttaatttaaaagtaacgaaataaagcaattgcaaaattatagtagtcattacaactccacctatatcatgattgatgaagcctccctaagttacatgaatctttctggtggtgagatcaaaactctacttgttcgaggccttgttagacagcttcttcaccggtttcatgcttcttcttgacggaatctgcctcgactttgcgacagtgaaagtagaaaaactgaagcagaataagaaaatcaagaacagcacatcctcctgaatcaactagccatggtagattcggttcgattttcgaccattcgacgctgttcactagtatgcttgcaacataagtcacattgccaatgaatgcaaagaagaacattaatggattcaatccctcaacatttcctctccttacattcatacatatttgaggaagccttccacccatgtaaatcgccgccattgcccaacccaaccacattccaatattgttgttttctcctaagttaccgctagagacctccaaaagctttcttgctcctgctcctccaactacaaacactctatctttccctctcaaatccatacttcttgaaccactcaatacgttgaatgatccaagaaacaagaacaccgagaccacacatagcaacgatttggtagaaggacgcttagcttcttcacgaagcaaaggctcttctacatcaaccatctgatgattccttcggtttttcatcaaccgcgggtaaatatgcccgtagtatatagattgaacatagagaacaagtgtagccagagtatacaacactgccgtgtagaattgaactggaagactagctggttccatcaagcagccaacaacattaaagatatcaccaagcatccatgttgttaagaaggttatagagactccttcaatggacttttgattgtagttagtcataatctgcggtatctcggcaacactccaactgataacactgatgataccaagagatagtgacaaatcatctcgaatcatcgttcttcacgtatgatacagccgaataaacctgttaaaaccctaaatacgaaattacaagtagctgaataatattgagcaatgaacaactcctcttataaaggtaagaagagagttagaagatgaataggaaaagggttttgaaactacaatgaccagattctaagaggaataggaaaggttttcagaattcagattggagaaaacgaatcctatgaatgaattaggttaaaatttttagtttctttctctatataattaaaatttgatatttatcaaaaacaaattaaataattaaaaggatatatccaaataattagaaaaaataagaatctaagtatatatcttgtttatacacgcaatgtttatctcttcaaagtctaggcttttgatcgagtctcctactatactaataccaccaaccaatttaaaaaaaaaacaagtagaaatttaacaaaagtctaacatcttccaaattttttccattttctaaaattatgttttgagtttgacgtttctttgttatttatataaactatagtatgctatcatcttcaatcagaaacagttccacagaagttttctgttttaacttttcctctgtttttgatttttctctctgaatctctccttcatttccccgggaaatagtaccagaaaggttatcatcgatcaaactcttcttggtggattcttcagagatgggtttagtcaacgggagagcttcgttgacctttctcctcgcggcgttgaccatcatcgctatggtcgtcgaggctaggtttgtggtggagaaagaaagcataagcgtgctgaatccagaggagatgaggtcgaagcacgacggctcgatagccaatttcggtttacccgattacggtgggtttttaatcgggtcagtggtttatccggatagtaaaaccgatggatgctctgcttttggtaaaaccttcaagcccaagtttcctcgtcccactattctgcttcttgatcgtggaggtaaaaaagttaaaaacatctttaaaagttaaaacctctgttttgtccatttactgttgttttgtttgagttcaaagatttaaactttagtctgctatgttattagccaataggactttatgggttatgctgcaaaaatacattttgagcagaaagatatattttttttacaaagaaagattaaaagtttaatctctcaagtaatctttgctccattattggatgtttttaggttgctactttgccttaaaagcgtggcacgcgcagcaagcaggcgcggctgcagttcttgtggcggataatgtagacgagccattgttgacaatggattcaccagaggagagcaaagatgcggatggtttcatagagaagctaacaatcccatcggtgttaatcgataaatcatttggagatgacttaagacaagggtttcagaaagggaaaaacatagttataaaactagattggagagagtctgtgcctcatcctgataagagagtagaatatgagctgtggactaatagcaatgatgagtgtggtgcacggtgtgatgaacagatggactttgtcaagaactttaaaggtcatgctcagatactcgaaaaaggcggttataccgcgtttacgccgcattatattacttggttttgcccttttcagtttataaacagtccacattgtaagtctcagtgtataaaccatgggaggtattgtgctcctgaccctgaggataatttcagagaagggtatgaagggaaagatgttgtgcttgagaatctgagacagctttgtgtgcatagagttgcgaatgagagtagcaggccttgggtttggtgggattatgttaccgattttcattctcgatgttcgatgaaggagaagaaatacagcatagattgtgctgagagtgtcatcaaatctctgagtaagaatcttttttcttttcctttttagattttaaagaaagagagtcttctttgtttaggttatgaatctttaagacttttttcagatttacctattgagaagatcaagaaatgcattggtgatcctgaggctgatacagagaaccaagttctgagaactgagcaagtatctcaggttagtttcttaatctatctttatttagagttttgaagaaacatttcagaggtttggttactaactgtaactatttcaagattggccgaggaaaccggggagatgttacgatattgccaacattagtcatcaataacgctcaatatcgaggtttggtacttgatattttttcagtttcactctctctttatgaagatgctgaagtttctgttgttattggttgcaattgtgaagggagattggagagaaccgcggttttaaaggcgatatgcgctggttttaatgaaacatcggagcctgccatttgcttaaacacaggtctagagacaaatgagtgccttgaaaacaatggtggttgctggcaggatacaaaagcaaacatcactgcttgtcaagtatgtcgtaaaaccgagcttaccacatcacatctcaccactatattgaatatcagtatcaatttgtttggaattgttttgaaaactagagaaaatgtgaaaatctagagagatattttctagtcctataatacttgaatcttttttgtttgatcaggacacattcagaggaagactctgcgagtgtccggttgtaaaaggtgttcaatataaaggagacgggtacacttcatgtacacgtaagttgttcacacatttcacacaacatagctctcaaatgttgagaccggtttcttgaatagtctctggtttgtgattgagctttgcagcttatgggcctgcgaggtgtactatgaacaatggaggttgctggtctgacacaaggaacggcttaactttctctgcttgctcagtttagtgattctcttgtcataagccaaaccctcccttacaaagttcttgttttcagttcaatcatctctttgttatttatgaaaaattaggactctgtatctactggctgcaaatgtcctgaaggtttccaaggcgacggtttgacgtgtgaaggtacataactcttaacttatcgattaaaatctcgaaagaaaccacataatcatattaccaacaatgtaattatgttttctgatttggctctattgcagatattaacgaatgtaaagagcgttcggtatgtcaatgtagcggttgcagatgcaagaactcatggggtggatacaaatgcagctgttctggtgaccggctttacataaacgatcaagatacttgtataggtaaaattttatcaatcaagatttaagagtactcaaattccataacagtatctaattaatatacattgatgattgtttgttacagagagatatggatccaaaacggcatggtggctcacattcttgatactggctatcgttgcagtagccggtttagctggttatatattctacaaataccggttcagggtactactactctttctgattccacaaaagcatttttgtacttaataacggttttaggattaccaaactaacttttctttggtgttcctattaacagtcttacatggactcagagattatgacgatcatgtcacagtatatgccacttgagagccaaagagctcgtgaagttccatcagaagccgagccttttacactctaatagtatatgaccaaagtaaccaaaactgtcatacacaaagaaatgtttgagatcaattaatgtacatatgaattatactgtaaaaataaaagagtgagatagagttgtgtatattttcatggcaaaaaaataaataatttggatgtaaagagacttttgaagaaaataaaacaaatattgctttcattgagagttgaactcaagacctcccgcttactaaacgggtgctctaaccaactgagctatgaaagcttcttgcaacatattattccaaataaattatatcgtaaactaagagttaaaatcttgaaaacaaaggataacgatcttcgtctccctctgctaaacccattttcttctgttgaggaatggcttcttcagtctctcttcagttcctgaccaacacctttatctccaaacctcaggttcttaatcttatctctctgtatcacctaatgtttctatgtcatgtgtgtgtgtgtgtgtctgtctttgtctgaattttctgagtactcctcatgttttttccggtcggacaaagggtttctgcaacggaattgtgtcagcaccaagacccagaagcaatttattaagagacagacaaaatggtgtacgacccatcaaagttgcgtctattgagacacaacctttccctctgtttcaatctcctgcttccgaagaatcttcctcgtccgaggttaggattttcagttttgagtgttttagggtttatagagttctaaaaggcagtacctttgacaattctttgcattgcccctatctgggagattgatttagagtacaaatgagttctaaaggtagtacctttagacaattctgttcattgcccccatatgtgatattgatttagggtacatatgagttcttaaggcagtaactttagacaattctgtgcattgcctccatctgtgagattgatataggggacttcttaaggcagaaactttagacaatcttgtgcattgccctcatctgtgagattgatgtagggtacaaatgagttctaacggcagtaactttagacaattctgtgcatttccctcatatgtgagattgatttagggtttttgtcttttgtttcttcactagctggagacagcagatccggatttctacaaaattggctatgttcgaagtgtgagagcttatggagttgagtttaaagaaggtccagatggttttggtgtctatgcttctaaggatatcgaacctcgccgtcgagctagagtcagtcttcttagttaaaaagttgacaactttttgttttgttcttctctttagattattttgttttcttttctctctgcaggtgattatggagattcctcttgaactgatgataaccattagacagaagcacccttggatgtttttccctgatattgtaccaattggtcatcctattttcgatatcattaactcgactgatcctgaggtagtaacacatttgtgctatttcgatatcatcaactcgaaagttcttatctttctcaaagtcctttcacatttgtgcttacagattgattgggatatcagattagcgtgtcttctgttattctcttttgatcgagatgatcacttctggcggctctatggcgatttcctgccggctgctgatgagtgcagcagcttgcttttagctacagaggtggattgaattgatatgattgccatttgaaactggtcacatttacttgtgtctttaaactaatgcttgatgatatctaattctgtgtgtttttctataggaagaccttgcggagcttcaagatcctgatcttgtttcaactatcagacaacaacagaaacgaatcctagatttttgggaaaagaattgggtaatgaggccttatatatgtgtttccagtatatcttgacatttggttattgctttgtttttcattggcaaattgtattccgtctcagcattcaggtgttcctctcaaaatcaaaaggcttgccgaggatccagaaagattcatatgggcggttagtatggcacagacacgatgcatcagtatgcaaactagggtcggtgctttggttcaggaattaaatatgatgattccttatgctggtaaggaagagcatgttgtgtagttattgataaattaagatttagtatcaatgaactttttgttgaggaactaaataagaatctcacgattgatcattctctgcagacatgctaaaccactcatttgaaccaaactgtttcctacattggcgtcctaaagatcgcatgctggaggttatgtcaaatgctggtcaagacattaagaaaggcgaagaggtaagagactcaaatgttcctaagtgtcagcctcacttcactgctttatctatcttcttataatgcttttcacagatgacgattaattacatgccaggccagaaaaacaacatgcttatggaaagatacggcttctcaactcctgtggtaatgctttttacgacaatcacattcatcttacacaaactatgtttcctttgcaagttttctcgtttattcagtttttctggtctgctgcagaatccgtgggatgctataaagttctctggagattctcgcatccatttaaattcctttttatcggtcttcaatatttatggtcttcctgaagaatattaccatgacagtaagttccttttcttctgtttcctctctattccttgacaaaagatggagaaatgagcaccaatgttacctaaatctgtggcaggcgagttatcgaggggcgatacttttgttgatggagcagttatcgctgcagcaagaacattacctacttggtcagacatagatcttcctccaataccgagtgcggaaagaaaagcagttaaagaattgcaagatgaatgtcgaaagatgcttgcggaatatcccacaacagcagagcaagaccagaagttgctaggtattacactaaagatatatacaccaatgtgttattatctattatcgctcatatactaaaacttaagctttccctcttgttgttgtgacagattcaatgtcagaagcaaggacaacatttgcaacagcggttaagtatagaatgcacagaaagatgttcatcggaaaaattatcaaggcacttgacatctatcaagaacggttactctattgattcaagcaaaaaataattatgagctgagtgagattcatacttggtgctcactcccttgagctacttagaaactgcaccatgtaattgaaaggttcctgtttttttttttgtttagtgtaaggttatgtatttgtatggaacagttagactaagtgtgttagtttgttttaatcgcaatcacaaacaaatcataacctcttcttttcttggctgctttaatgagtttgattagccaacaaacgctttggaatcatctgtgttttttttttctcttttgattaattcatgttcatgtttttagtccctaagcatgattagtgtctcaaatgttttagggtaattgtgtctcttacgccgaactataatgttgattagtctcaataattgattattacttatactatttattaaccttgtggttacactaatcaatcaaatcatattgcgtttcttctactctttgtctaacattactattttcaaaaaaagttacggtccaaaccaaacaaacctactctgagttatacagaaccataagcaatctatttcttacctttggctacttatttgatactttacattgactaacttgattcttaataattatcttcaatatgttgaatattttatttttgaagtaagaccactatgcgtttcataattcttgccatgcataatgaaattattcctttgaatttaagattaattaaagtataaatcaaccaaacaatagacaaaaaaaaataaaaaaaaataagcatcttgatctttttggtggatcgaagataattcctttgtctcattcttttggatttagaatctcgttcagtagaatattaacatttttaattatagattatcaattatcgaacaagttgttgtacgtaaacttgattcgatctagcgttattacagtcaaccaaaatttatataataataacaatttatgaaaatgacaatattattcgatgtattattccttttttcctataattagataggtgtgattaaattcaagctagattccgaatcgacaacaacatattatatctattattaacctcaatttttgaaggcaaaaaacacacgaaattattcaaaactcacgagttgattctttacttcgatgaacatataaattgggaaagtatcaccgaacttatttgggtaataaagaaaaagatggatgaaaaaattatgtttgcaaattttaataagaattatgtttgacttggtaataaaatatagggcataatcatatgatgccatgttaatgtacgatcataccacaactgctctccttgtcgtgaaaaggttgaagtgatgagaagctaacacactttgtgacataaccaaagccaaaaatatatacttcaaccaagtcattttctcaaccactcttttctccttgtccaaggtcaaagccatgcatcaccattttattttctattattcattattgttacttttcctttatataactaataaaaggtctattactaataaacaactaaacttttcttttctttttgataaaattaaacaactaaacttgtcgaaaagaaataggagaacaaagaactctaacttctcacgaaattgataaatcaaatgattgcgtatcacaaagacactaaaaagaaaaattaaggaatcgtgtagagttgacactctatacattcagagtagtaatcatgtgtttgatagataataaatagataatggaagtatgaaatgagaaaacttgttgggatcatttatcatttgtggaatcctctaaatcttttctaacttaactccaagtcgttagagtccaagagatatgaatcgatcggaacttcaatacagaatttaattagaatatagtggaacaacatccacgaatctaaatgtcataagttgttaattgatcaaacgaaatagaatgtacttattataagcttataattttacaagtttgatgtgaatgtaaagtgtactactccactatttatttatatattctgtggtttctaaagaagaccaaatgtttttttttttttctttcctaagaagaccaaatgttatgtcaaagtttaggcactgttttaattatataacatgtctccacggacgaataaatgtacacacgaacatcatagtacgaccgttgacctttgcccctccattgattgataaaaggctaaaagccgaaacattttcattctacgagccttcccattccatttccccacatctctcctctgacctctctttgacccctctctcctctctctctagatctctcaataaaacagtgaaatagcaaaaaagaaacacaaaaaagagagagagaaagaaactttgttctctctgcatttactcttctccaactcagagatagagtccctatgcaccgtttctaatgaccaatcatctttctccctcttcatcattctctacaacaagaatcacacaaatgccataaaacctccattcttcttcctcagtaaaccaaaccataagacgacgaagaagaaaacatgcaaccactagttcttctcctcctcttcatcctctgtttttccggtttaggtcaaccgggtatcatcaacaacgatcttcagactcttctcgaggtgaagaaatctttggtcacgaatccacaagaagacgatcctctccgacaatggaactctgataacatcaactactgttcttggaccggagtcacatgcgacaataccggtttatttcgtgtaattgctctaaaccttaccggtttaggattaaccggttcaatttcaccttggtttggccggtttgacaacctaatccaccttgatctatcttccaacaatctagttggtcccatcccaactgctctctccaaccttacttccttggagtctctgtttctcttttctaaccaactcaccggcgagattccgagccagctcggctccctcgttaatatccggtcgctaaggatcggagacaatgagcttgttggagatatcccggagacgttagggaacttggtgaatctccagatgcttgctctggcttcttgtagactcaccggtcctataccgagtcagctcggtcgtctcgtccgagttcagtcgttgatattgcaagataactatctcgaaggaccgattccggctgagttaggaaactgctctgatctcactgtgttcactgcggcggagaacatgctcaacgggacgataccggcggagcttggacgccttgaaaacctcgaaatactcaacctggcgaacaacagtctcaccggagagataccgagtcaattaggtgaaatgagccaactccagtatcttagcttgatggcaaatcaacttcaaggtcttatccccaagagtttggctgatctgggaaatcttcaaactcttgatttatcggcgaataatcttaccggagagatacctgaa

SEQ ID NO: 601 - DNA, 111945 bp, Arabidopsis thaliana
gaattcacaacataatcataaaactccaatcctcgatgataaagaccctcgtttataatcacattcaacacagagttaaacgacttaacactacgtttacatcgaaactcatcaaccattctatgaaacaagtctacagctttatcaggcaaatgtgctttcccataagctctaaagacaacaatgaaactacgctctataatcactctgttctctaatctaattcgactcaaaagcttctctaccgaatcaaaatcacccgaattggcgtaactctcaatcattgaagataaagtagaatcacccaacttgaaagaacccattttgggagctgatttaaacatcttctccgagattggagcttccaatggattctccaccacttccattgacgggttaggagaaaccgaaacagaagaagagaagcgaagatggatagagaagttaactgggttactcgaaaggattcgactttctttgagaaagtagctgaagaagctgatacggattgggattgggcatttgggcatgaactcgtagggtttatgcttaaacccttatttggggatttcaaaagtttggtgttttcgcaagagagagagagaaagagatagagatgatgcaactcttacagctctctcatttgcagatttgaaagagagatgaagattgaagaagatattcgatcaatttagaggtttgttgataaacgatgacatttgatttctgcttcttctcttcttcgccactaagagttatcaataaatttcaatttttttgtttcctctcaattaattgattaattacttcttaattactattaaaaagtgaaattttctaattcatttaccaataatttttttaatttataaaatttatgtaatcaaatccaaatggtaaataatctcatatacataataattttggggatcttattatataaaatatatggttttcaaaattgctaactcataggattgtgccacgtgtcaaatcaaacgatcagatgtttacatgtgtcattcaaaatttaacttttttattctctaaaaaaatagaaaatcttaaaaagtaaacaaatttatatatactaatttatatgtctatatatttataaacaattaacatttattcaacaaaaacaaaattaacaaatttgtctttaactcatgtaatcataagtgaaaatagaacactttgagaaaaatagcttagcttataggatttaacttttcaatttttttcatttattaattttaactcatttaatattaatttgcatgatgtaaaattaacttacgagattacgtgggtgattggttcgtctgtaactgtagatttactgctgtagaatttttgttgtaggtgtgatgactgtagttgtaagttttattgctgtaaaaattagactgtaggttttattaatataattattacttaaagaaattgggtagaaataagattttggttgtatgtatttttaaacaaaaaaaaattatcgggtcgggttcgggttcgagttatttatatattgaaatatcaaattttgtgtgcaaatctattaaattacttgaaattttcaaaaattctcaaaacaacatgagtagttttgcttgaatatatctaaaaatacacaaaaataactaaaatatccaaaaaaatcctaatattttctatatataagtataaatataactaatatatacttatatttgagatatgtttggatacttattcgggtttgggtttgagtttttcgagttttaaagtttagatccgttcgagtatttgaaaatttcgggtacacccgcctaaataggcgggccttatctagttatatataatatgttatttattgtataactttggggactactactctcacaagaaacatttgacttcaagagaaaaatggtctcgctttccatcagtcgttctccttattatacaattgcagtctcgaccacaacgggttctgaagctagtgtagaagattgcattctccgccttcaccttcttcttcgactccacgtttgctttggttctcacaactatcttcttcatctcaaatggctttgcagactccagcgcatgcgcatgctgcgtttacacaagacaacaccaaaaaccaagtttctttaaacagatcatatatagcctaataaacaaaatcccctctttctttcggtgatcaagtcttttttccttaccagtttggagaacaatgcgagttccgcgtatagatgaagccattccttctcttcttctaactctgaatctttcatctgtaccatatcaacaacatcaaatccttaatattttaatctttaacacatgaaaaatctcacctcatagtattgcagcttgtcccttcccgttagtgcatcttccggcatccactcgggcataccacctttgaagaaatcatccacgagatctttgttccatccaaaatatgtgtcttcctcctctaagagacacaagttgacataactaatatagccgtatgaactaactaggtatgacggaaaacaaaggtgcatttacatttacctggaattttgggctttattctgcctcccgttgtaattgtgctcaagcagtgtttattctcaacggcatacctaacgtgcgtttcgaactcacagatcgaattgtctactggatccattgcctccaaacttatgaaatgagaaagaatcgaggttatccatgagtcaaaattgtgtacagtcagaaattgtaagtttgtgccctacaagatcaaaagaagcaaagacaaaaataaggatctggtgagagtactccgacagaaacaaagttcacttgaatcgtactagaacgaacgtgtaggaatatattacattttgcagattgtagcaatgaagtccaactctaccgaagaggattatatttggatgaggtcctccatattttgcaatgtcagccctttgtttaatgtagtatttgttataatcaaacttttcttctctctaaacaaaacacagaatctataagctttaaaatgcaaatatctctatgagtgatgagacctaaagttcatacatccacaatcaaatccaattacccgattagcccaaacatgtcgtgggatggaggatgaagattcttgtggtctctgatcttccagcttctcattactctgcgatggttcctcgaccaagtctctggcttcttgcttccacattccgttacccatttcttggcaaatatataaaccctatattaataaacttttaagagacttggaacttaagattcaaaccctaatttggaatacaaatctatgcgcgttaagccaaaccacatcattaattaagaacactgtcaatacacaacatgtgagcagcgaagaccacaacagagggaagtgattgagaacagcagatctaagctcatattcaacatgcatagaagaagaaaaccaattttgcatcaagagatactgaaaaatctttcattcataagagttccaagattccataaaaacaacaactatttggaagaagatgaaatggagacatctcaagttctgttccaatgtaaaatacagaccaactaagttcggtttcagaactcaccttcttcacctatgaaatttgacgagatcgcaagaagaatatacaatggattcagtgtttcgtaatcggtgagaaaaagacaaataaataagcttgatgatagcttgttagaccttagagaatagaagattgggtttaaaggctattctctcctttttctttttcatcgactcaactttatggactaatatatgcaatctcatctctttgttctaatttggacaaatacttttagctttttagacatttgttatatgtcacaatgcaattgataaagatataaatttgttgacaatgaatgcataggttcagaaccataaacaccttcaaattattaaaactcaaaaatagaaagtagaaacccaaaaggtagtttcatcagcacacaaaactcaatcctgttaatttaaaagtaacgaaataaagcaattgcaaaattatagtagtcattacaactccacctatatcatgattgatgaagcctccctaagttacatgaatctttctggtggtgagatcaaaactctacttgttcgaggccttgttagacagcttcttcaccggtttcatgcttcttcttgacggaatctgcctcgactttgcgacagtgaaagtagaaaaactgaagcagaataagaaaatcaagaacagcacatcctcctgaatcaactagccatggtagattcggttcgattttcgaccattcgacgctgttcactagtatgcttgcaacataagtcacattgccaatgaatgcaaagaagaacattaatggattcaatccctcaacatttcctctccttacattcatacatatttgaggaagccttccacccatgtaaatcgccgccattgcccaacccaaccacattccaatattgttgttttctcctaagttaccgctagagacctccaaaagctttcttgctcctgctcctccaactacaaacactctatctttccctctcaaatccatacttcttgaaccactcaatacgttgaatgatccaagaaacaagaacaccgagaccacacatagcaacgatttggtagaaggacgcttagcttcttcacgaagcaaaggctcttctacatcaaccatctgatgattccttcggtttttcatcaaccgcgggtaaatatgcccgtagtatatagattgaacatagagaacaagtgtagccagagtatacaacactgccgtgtagaattgaactggaagactagctggttccatcaagcagccaacaacattaaagatatcaccaagcatccatgttgttaagaaggttatagagactccttcaatggacttttgattgtagttagtcataatctgcggtatctcggcaacactccaactgataacactgatgataccaagagatagtgacaaatcatctcgaatcatcgttcttcacgtatgatacagccgaataaacctgttaaaaccctaaatacgaaattacaagtagctgaataatattgagcaatgaacaactcctcttataaaggtaagaagagagttagaagatgaataggaaaagggttttgaaactacaatgaccagattctaagaggaataggaaaggttttcagaattcagattggagaaaacgaatcctatgaatgaattaggttaaaatttttagtttctttctctatataattaaaatttgatatttatcaaaaacaaattaaataattaaaaggatatatccaaataattagaaaaaataagaatctaagtatatatcttgtttatacacgcaatgtttatctcttcaaagtctaggcttttgatcgagtctcctactatactaataccaccaaccaatttaaaaaaaaaacaagtagaaatttaacaaaagtctaacatcttccaaattttttccattttctaaaattatgttttgagtttgacgtttctttgttatttatataaactatagtatgctatcatcttcaatcagaaacagttccacagaagttttctgttttaacttttcctctgtttttgatttttctctctgaatctctccttcatttccccgggaaatagtaccagaaaggttatcatcgatcaaactcttcttggtggattcttcagagatgggtttagtcaacgggagagcttcgttgacctttctcctcgcggcgttgaccatcatcgctatggtcgtcgaggctaggtttgtggtggagaaagaaagcataagcgtgctgaatccagaggagatgaggtcgaagcacgacggctcgatagccaatttcggtttacccgattacggtgggtttttaatcgggtcagtggtttatccggatagtaaaaccgatggatgctctgcttttggtaaaaccttcaagcccaagtttcctcgtcccactattctgcttcttgatcgtggaggtaaaaaagttaaaaacatctttaaaagttaaaacctctgttttgtccatttactgttgttttgtttgagttcaaagatttaaactttagtctgctatgttattagccaataggactttatgggttatgctgcaaaaatacattttgagcagaaagatatattttttttacaaagaaagattaaaagtttaatctctcaagtaatctttgctccattattggatgtttttaggttgctactttgccttaaaagcgtggcacgcgcagcaagcaggcgcggctgcagttcttgtggcggataatgtagacgagccattgttgacaatggattcaccagaggagagcaaagatgcggatggtttcatagagaagctaacaatcccatcggtgttaatcgataaatcatttggagatgacttaagacaagggtttcagaaagggaaaaacatagttataaaactagattggagagagtctgtgcctcatcctgataagagagtagaatatgagctgtggactaatagcaatgatgagtgtggtgcacggtgtgatgaacagatggactttgtcaagaactttaaaggtcatgctcagatactcgaaaaaggcggttataccgcgtttacgccgcattatattacttggttttgcccttttcagtttataaacagtccacattgtaagtctcagtgtataaaccatgggaggtattgtgctcctgaccctgaggataatttcagagaagggtatgaagggaaagatgttgtgcttgagaatctgagacagctttgtgtgcatagagttgcgaatgagagtagcaggccttgggtttggtgggattatgttaccgattttcattctcgatgttcgatgaaggagaagaaatacagcatagattgtgctgagagtgtcatcaaatctctgagtaagaatcttttttcttttcctttttagattttaaagaaagagagtcttctttgtttaggttatgaatctttaagacttttttcagatttacctattgagaagatcaagaaatgcattggtgatcctgaggctgatacagagaaccaagttctgagaactgagcaagtatctcaggttagtttcttaatctatctttatttagagttttgaagaaacatttcagaggtttggttactaactgtaactatttcaagattggccgaggaaaccggggagatgttacgatattgccaacattagtcatcaataacgctcaatatcgaggtttggtacttgatattttttcagtttcactctctctttatgaagatgctgaagtttctgttgttattggttgcaattgtgaagggagattggagagaaccgcggttttaaaggcgatatgcgctggttttaatgaaacatcggagcctgccatttgcttaaacacaggtctagagacaaatgagtgccttgaaaacaatggtggttgctggcaggatacaaaagcaaacatcactgcttgtcaagtatgtcgtaaaaccgagcttaccacatcacatctcaccactatattgaatatcagtatcaatttgtttggaattgttttgaaaactagagaaaatgtgaaaatctagagagatattttctagtcctataatacttgaatcttttttgtttgatcaggacacattcagaggaagactctgcgagtgtccggttgtaaaaggtgttcaatataaaggagacgggtacacttcatgtacacgtaagttgttcacacatttcacacaacatagctctcaaatgttgagaccggtttcttgaatagtctctggtttgtgattgagctttgcagcttatgggcctgcgaggtgtactatgaacaatggaggttgctggtctgacacaaggaacggcttaactttctctgcttgctcagtttagtgattctcttgtcataagccaaaccctcccttacaaagttcttgttttcagttcaatcatctctttgttatttatgaaaaattaggactctgtatctactggctgcaaatgtcctgaaggtttccaaggcgacggtttgacgtgtgaaggtacataactcttaacttatcgattaaaatctcgaaagaaaccacataatcatattaccaacaatgtaattatgttttctgatttggctctattgcagatattaacgaatgtaaagagcgttcggtatgtcaatgtagcggttgcagatgcaagaactcatggggtggatacaaatgcagctgttctggtgaccggctttacataaacgatcaagatacttgtataggtaaaattttatcaatcaagatttaagagtactcaaattccataacagtatctaattaatatacattgatgattgtttgttacagagagatatggatccaaaacggcatggtggctcacattcttgatactggctatcgttgcagtagccggtttagctggttatatattctacaaataccggttcagggtactactactctttctgattccacaaaagcatttttgtacttaataacggttttaggattaccaaactaacttttctttggtgttcctattaacagtcttacatggactcagagattatgacgatcatgtcacagtatatgccacttgagagccaaagagctcgtgaagttccatcagaagccgagccttttacactctaatagtatatgaccaaagtaaccaaaactgtcatacacaaagaaatgtttgagatcaattaatgtacatatgaattatactgtaaaaataaaagagtgagatagagttgtgtatattttcatggcaaaaaaataaataatttggatgtaaagagacttttgaagaaaataaaacaaatattgctttcattgagagttgaactcaagacctcccgcttactaaacgggtgctctaaccaactgagctatgaaagcttcttgcaacatattattccaaataaattatatcgtaaactaagagttaaaatcttgaaaacaaaggataacgatcttcgtctccctctgctaaacccattttcttctgttgaggaatggcttcttcagtctctcttcagttcctgaccaacacctttatctccaaacctcaggttcttaatcttatctctctgtatcacctaatgtttctatgtcatgtgtgtgtgtgtgtgtctgtctttgtctgaattttctgagtactcctcatgttttttccggtcggacaaagggtttctgcaacggaattgtgtcagcaccaagacccagaagcaatttattaagagacagacaaaatggtgtacgacccatcaaagttgcgtctattgagacacaacctttccctctgtttcaatctcctgcttccgaagaatcttcctcgtccgaggttaggattttcagttttgagtgttttagggtttatagagttctaaaaggcagtacctttgacaattctttgcattgcccctatctgggagattgatttagagtacaaatgagttctaaaggtagtacctttagacaattctgttcattgcccccatatgtgatattgatttagggtacatatgagttcttaaggcagtaactttagacaattctgtgcattgcctccatctgtgagattgatataggggacttcttaaggcagaaactttagacaatcttgtgcattgccctcatctgtgagattgatgtagggtacaaatgagttctaacggcagtaactttagacaattctgtgcatttccctcatatgtgagattgatttagggtttttgtcttttgtttcttcactagctggagacagcagatccggatttctacaaaattggctatgttcgaagtgtgagagcttatggagttgagtttaaagaaggtccagatggttttggtgtctatgcttctaaggatatcgaacctcgccgtcgagctagagtcagtcttcttagttaaaaagttgacaactttttgttttgttcttctctttagattattttgttttcttttctctctgcaggtgattatggagattcctcttgaactgatgataaccattagacagaagcacccttggatgtttttccctgatattgtaccaattggtcatcctattttcgatatcattaactcgactgatcctgaggtagtaacacatttgtgctatttcgatatcatcaactcgaaagttcttatctttctcaaagtcctttcacatttgtgcttacagattgattgggatatcagattagcgtgtcttctgttattctcttttgatcgagatgatcacttctggcggctctatggcgatttcctgccggctgctgatgagtgcagcagcttgcttttagctacagaggtggattgaattgatatgattgccatttgaaactggtcacatttacttgtgtctttaaactaatgcttgatgatatctaattctgtgtgtttttctataggaagaccttgcggagcttcaagatcctgatcttgtttcaactatcagacaacaacagaaacgaatcctagatttttgggaaaagaattgggtaatgaggccttatatatgtgtttccagtatatcttgacatttggttattgctttgtttttcattggcaaattgtattccgtctcagcattcaggtgttcctctcaaaatcaaaaggcttgccgaggatccagaaagattcatatgggcggttagtatggcacagacacgatgcatcagtatgcaaactagggtcggtgctttggttcaggaattaaatatgatgattccttatgctggtaaggaagagcatgttgtgtagttattgataaattaagatttagtatcaatgaactttttgttgaggaactaaataagaatctcacgattgatcattctctgcagacatgctaaaccactcatttgaaccaaactgtttcctacattggcgtcctaaagatcgcatgctggaggttatgtcaaatgctggtcaagacattaagaaaggcgaagaggtaagagactcaaatgttcctaagtgtcagcctcacttcactgctttatctatcttcttataatgcttttcacagatgacgattaattacatgccaggccagaaaaacaacatgcttatggaaagatacggcttctcaactcctgtggtaatgctttttacgacaatcacattcatcttacacaaactatgtttcctttgcaagttttctcgtttattcagtttttctggtctgctgcagaatccgtgggatgctataaagttctctggagattctcgcatccatttaaattcctttttatcggtcttcaatatttatggtcttcctgaagaatattaccatgacagtaagttccttttcttctgtttcctctctattccttgacaaaagatggagaaatgagcaccaatgttacctaaatctgtggcaggcgagttatcgaggggcgatacttttgttgatggagcagttatcgctgcagcaagaacattacctacttggtcagacatagatcttcctccaataccgagtgcggaaagaaaagcagttaaagaattgcaagatgaatgtcgaaagatgcttgcggaatatcccacaacagcagagcaagaccagaagttgctaggtattacactaaagatatatacaccaatgtgttattatctattatcgctcatatactaaaacttaagctttccctcttgttgttgtgacagattcaatgtcagaagcaaggacaacatttgcaacagcggttaagtatagaatgcacagaaagatgttcatcggaaaaattatcaaggcacttgacatctatcaagaacggttactctattgattcaagcaaaaaataattatgagctgagtgagattcatacttggtgctcactcccttgagctacttagaaactgcaccatgtaattgaaaggttcctgtttttttttttgtttagtgtaaggttatgtatttgtatggaacagttagactaagtgtgttagtttgttttaatcgcaatcacaaacaaatcataacctcttcttttcttggctgctttaatgagtttgattagccaacaaacgctttggaatcatctgtgttttttttttctcttttgattaattcatgttcatgtttttagtccctaagcatgattagtgtctcaaatgttttagggtaattgtgtctcttacgccgaactataatgttgattagtctcaataattgattattacttatactatttattaaccttgtggttacactaatcaatcaaatcatattgcgtttcttctactctttgtctaacattactattttcaaaaaaagttacggtccaaaccaaacaaacctactctgagttatacagaaccataagcaatctatttcttacctttggctacttatttgatactttacattgactaacttgattcttaataattatcttcaatatgttgaatattttatttttgaagtaagaccactatgcgtttcataattcttgccatgcataatgaaattattcctttgaatttaagattaattaaagtataaatcaaccaaacaatagacaaaaaaaaataaaaaaaaataagcatcttgatctttttggtggatcgaagataattcctttgtctcattcttttggatttagaatctcgttcagtagaatattaacatttttaattatagattatcaattatcgaacaagttgttgtacgtaaacttgattcgatctagcgttattacagtcaaccaaaatttatataataataacaatttatgaaaatgacaatattattcgatgtattattccttttttcctataattagataggtgtgattaaattcaagctagattccgaatcgacaacaacatattatatctattattaacctcaatttttgaaggcaaaaaacacacgaaattattcaaaactcacgagttgattctttacttcgatgaacatataaattgggaaagtatcaccgaacttatttgggtaataaagaaaaagatggatgaaaaaattatgtttgcaaattttaataagaattatgtttgacttggtaataaaatatagggcataatcatatgatgccatgttaatgtacgatcataccacaactgctctccttgtcgtgaaaaggttgaagtgatgagaagctaacacactttgtgacataaccaaagccaaaaatatatacttcaaccaagtcattttctcaaccactcttttctccttgtccaaggtcaaagccatgcatcaccattttattttctattattcattattgttacttttcctttatataactaataaaaggtctattactaataaacaactaaacttttcttttctttttgataaaattaaacaactaaacttgtcgaaaagaaataggagaacaaagaactctaacttctcacgaaattgataaatcaaatgattgcgtatcacaaagacactaaaaagaaaaattaaggaatcgtgtagagttgacactctatacattcagagtagtaatcatgtgtttgatagataataaatagataatggaagtatgaaatgagaaaacttgttgggatcatttatcatttgtggaatcctctaaatcttttctaacttaactccaagtcgttagagtccaagagatatgaatcgatcggaacttcaatacagaatttaattagaatatagtggaacaacatccacgaatctaaatgtcataagttgttaattgatcaaacgaaatagaatgtacttattataagcttataattttacaagtttgatgtgaatgtaaagtgtactactccactatttatttatatattctgtggtttctaaagaagaccaaatgtttttttttttttctttcctaagaagaccaaatgttatgtcaaagtttaggcactgttttaattatataacatgtctccacggacgaataaatgtacacacgaacatcatagtacgaccgttgacctttgcccctccattgattgataaaaggctaaaagccgaaacattttcattctacgagccttcccattccatttccccacatctctcctctgacctctctttgacccctctctcctctctctctagatctctcaataaaacagtgaaatagcaaaaaagaaacacaaaaaagagagagagaaagaaactttgttctctctgcatttactcttctccaactcagagatagagtccctatgcaccgtttctaatgaccaatcatctttctccctcttcatcattctctacaacaagaatcacacaaatgccataaaacctccattcttcttcctcagtaaaccaaaccataagacgacgaagaagaaaacatgcaaccactagttcttctcctcctcttcatcctctgtttttccggtttaggtcaaccgggtatcatcaacaacgatcttcagactcttctcgaggtgaagaaatctttggtcacgaatccacaagaagacgatcctctccgacaatggaactctgataacatcaactactgttcttggaccggagtcacatgcgacaataccggtttatttcgtgtaattgctctaaaccttaccggtttaggattaaccggttcaatttcaccttggtttggccggtttgacaacctaatccaccttgatctatcttccaacaatctagttggtcccatcccaactgctctctccaaccttacttccttggagtctctgtttctcttttctaaccaactcaccggcgagattccgagccagctcggctccctcgttaatatccggtcgctaaggatcggagacaatgagcttgttggagatatcccggagacgttagggaacttggtgaatctccagatgcttgctctggcttcttgtagactcaccggtcctataccgagtcagctcggtcgtctcgtccgagttcagtcgttgatattgcaagataactatctcgaaggaccgattccggctgagttaggaaactgctctgatctcactgtgttcactgcggcggagaacatgctcaacgggacgataccggcggagcttggacgccttgaaaacctcgaaatactcaacctggcgaacaacagtctcaccggagagataccgagtcaattaggtgaaatgagccaactccagtatcttagcttgatggcaaatcaacttcaaggtcttatccccaagagtttggctgatctgggaaatcttcaaactcttgatttatcggcgaataatcttaccggagagatacctgaagaattctggaacatgagtcagcttcttgatttggttctagcaaacaatcatctctctggttcattaccaaagagcatttgttctaacaacacaaacttggagcaactggttttgtctggaactcagctttctggtgaaatccctgtggaattaagcaaatgtcaatcgcttaagcagcttgatttgtcgaacaattctctcgctggctcgatccctgaagcattgtttgagctagtcgaactcacagatctttatctccacaataataccttggagggtacgttatctccttcgatatcaaacctcactaatctacagtggcttgtgttgtatcacaataacttggaaggcaagttaccgaaggagatcagcgcactcagaaaattagaggttctgtttctgtatgagaatcgtttctcaggggaaatcccacaggagattggaaactgcacaagcttgaagatgattgatatgttcgggaatcatttcgaaggagagatacctccttcaataggaagattaaaagagcttaacttgcttcacttgagacagaacgagcttgtgggtggacttcccgccagtttaggtaactgtcatcaactgaacatcttggatttggcggataatcagctctcgggatcaattccttcatccttcgggttcttaaagggcttggaacagttgatgctttacaacaattctcttcaaggaaatcttcctgattcacttatcagtctgaggaacctcaccagaatcaatctctctcacaacaggctcaatggtacgattcatccattatgtggttcgagctcatatctctcattcgatgtcaccaacaacgggtttgaagatgaaatccccctggagctaggaaactctcaaaatcttgatcgtctcaggttaggcaagaatcaattgacaggaaaaatcccttggacgttggggaaaatccgcgagctgtccttgttagatatgtcaagcaacgctctcacaggaaccattccgctacagctcgtcttgtgcaagaaactgacacacatcgatctcaataacaattttctatcaggtcctatacctccatggcttggaaaactttcacagttaggagagctcaagctttcttcgaatcagtttgttgagtctttacctactgaactgttcaactgtacaaagctgcttgtgttgtctcttgatggaaattcgcttaatgggtcgattccacaagagattggtaacttgggagctctcaatgtccttaaccttgataagaaccagttttcaggttcacttcctcaagctatgggaaagctcagcaagctgtatgagcttcggttatcaagaaacagcttaacaggagaaatcccagttgagattggacagcttcaggatcttcaaagtgctttagacctcagctacaataacttcactggagatataccttcgacaattgggacattatcaaagctggaaacacttgatctttctcacaatcagcttacaggggaagttcctggctcggttggggatatgaagagtttgggatatctcaatgtttctttcaataacctcggagggaagctcaagaaacagttctcaagatggccagctgattcctttttaggcaacacaggtctttgtggaagcccactaagtcgctgcaacagagttagaagtaataacaagcaacaaggtcttagtgccagatcagttgtgataatatcagcaatctcagcattgacggcgattggcttgatgatacttgtaatcgctctcttcttcaaacaaaggcatgatttcttcaagaaagtgggtcatggaagcactgcgtacacatcgtcaagctcttcttcacaagctacacacaagcctctctttcgaaacggagcttcaaagtccgatatcaggtgggaggacatcatggaagctacacataatctaagcgaggagttcatgattggatcaggaggctctgggaaggtttacaaggcggagcttgaaaatggtgagactgttgcagtgaaaaagattctctggaaggatgatctcatgtcaaacaagagcttcagcagagaagttaagacgcttggaagaatcaggcataggcatctggttaagctaatgggttactgcagcagcaagtcagaaggattgaatctgttgatatatgagtacatgaagaacggaagcatctgggattggcttcatgaggacaaacccgtgctcgaaaaaaagaagaagcttttagactgggaagcaagattgagaatagcagtaggattggctcaaggagtagagtaccttcatcatgactgtgttcctcctatcgttcaccgtgatatcaaatccagtaatgtgctcctcgattcaaacatggaagcgcatttaggagatttcggtcttgccaaggtcttaactgagaactgtgataccaacacagattcaaatacctggtttgcatgctcttatggctacattgctccaggtactcatcttctctttcttagctttcttgcatattcactgttttaatatctaaagatttgaaattgtgtgtctagagtatgcttactcgttgaaggcgactgagaagagcgacgtttacagtatggggatcgtgttgatggagattgtgactgggaaaatgccaaccgactcagtgtttggtgcagagatggacatggtgagatgggttgaaacacatcttgaagtagcgggttctgcgagagataaactcatagatccaaagcttaagccacttctgccatttgaggaagacgcagcttgtcaggtgcttgagattgcacttcagtgcacaaaaacttctccccaagagagaccatcttctaggcaagcttgtgatagtcttctccatgtctacaacaacagaacggccggttataagaagctgtaaaaaaactgacacctgcaaatgtctttggagacatgaaaactgccaactttaaattttttcttctgaaattctgtttctgctttgtatagatgacatggtttctttcagtacaaagattgtttcgaacttgatccatctgctacaaaaacacttattgtcttttgcatgtacttgtaatacaacttaaaccaaattttaaacagaatgattctgattctgattctgaaactctattctcataacagaaggtagattgcaaggtttatcatttcgccattattaaccagatacaaacagattcagattgtgaaaacacaaatctttaggttcatattcgaaaacagtgaatgaaaagaactccagagctgaagtcaaagagaaggagaagaaacgcttatacaggaaagatcagacaaaacaagcacttgagatgagttcaggggaagatatttcttttctgaagacttcaaagatcacgcaaaattaatcccgatcttcatctgcattacaaaaacagaaggaaaagtttgaatattccaagttattcaatccaacaaaacaagaaatgtaatacaccaaattctgccagtccctcgcaaatatgcaatagccaatggtgataaacaaacagagattcttgaacttatcataagtcacaagatttatcaaagaagagtttgcgaaagcttagcaacttactacctaaaacgagacacgtttacatatgtggttcccttcaaattcgcatctagtttatatgtactggcaccttgcaacctatctaactctagaaccaaagaactagtcgaaagtatctatctttccagactcattgagatcatgttcaaaggaataattgtattgctcaaactgtcttaacttttataagagtgcctgactaaacagatttgcaacaagctaagcctgcatagagattcgctcaattgaaaaacttccaaatgattaaaccttgagcgaagtttcattgcggagaattcaattaccattgcaaccatttcatacaccaaaaacgtcaccaatttttctaaaaaaaagcaaaatttgagaagctgataaaccaaaaacaagaagaggataatatataccaaagtaacggcgctcattagcagctctagccttagcgagcatcacatcaagatcttccttaagcttcacatcccatttcacgagctggttcgcaaacacagcaccaagtcccatacccaccacatgctcccacggatctaacatatattaatatccaatcagaacacaatgaatcggaatcgcattttctcaacaatcgaaatcagaaaacaaaaattagggttgttgtagcatttttcgattggtggacgacttacgacgcatataagggagcttgcggagggcgttggagtacatctgggtaccgagacccagcaaagctccgaccattgtcgcacttataggcatcgtttcgtcttcggatcttctgaaatttgttgttgttgcaacgatgagtctccgatctccggttaagtgactactcggacttagcttcacaatgttttccccacatacattgccatttcagtgtatcgccctcatatgggcttgggcttgggcctagaccttgggttacataaatgatatggaacgctatctgctatgtttagttgttttggaaaatgttagtaagtttagacagtaaaaaaagaagcactacttttttttttttttttttaacattaacagaaagttaaaaactaccaaatgctaaaatttaggtgaattatcttctatacttaagcaagatacacatatcttttggatagaattaaattagttaagttcgttttaaattggaacaaagtttgactccggtgtaatttacgccaaaactctctatctgtttttttttaacctttcccgtcagattagtcaaagaatctaaatttattttgattctgataggctataaaaatagctaccatattatattttaactaattacatgagtcaaagactgtaaatttattactttaagttaccatatatagtacaatgaatcaatggaacttcatttggtatttttatagtaatttttctagaaatagcattatatgcatggttaatcttatgtagatttcatttcataatcatgggatatgcacagattctgttacatataattaatgaatttgttgtaaaaagttagataactcaaaatctttgacataacactaaaatcccaaaggattgaatacaaaccaatgaagcatatccaatggttttaattaattttaaaaaaatccattcgagtcaaagaaaagaacaatgtaaaagtgcttctaatgttatcacttatcagtaaatgtgaaaaaaaaatagagagtgtattcatgtatcaatttaataagtcaactttaatttagagaatgccataattatgctctccctctttgtttgacactgtctctcttctcccctatgaaccttttttcaagtttttaaagtgttacatgaatcatcgactaatctatatttggattatttctttctccaaaaggtaatattatttacctaaattaatattggtggatgatattaataacatcaaatctaaaaaaaaattgaatagagaaaaacagcaagacttttattttttcttcaaacttttttctccattgctctgtctcttcgttttcctttgttctgtctcttcgaattcctcttatctattatccaaagtttcattgtattgtttgtgtttgaaaaaactctgtcatcaaatggggtttaatctgtttcgatgctcatgttcttcttccccagaaggggtcaaaaaataagaaaacagagcattaaaatatcaaaaaaaaaaaagacataaaagaaagatccgattaaatagggtttgtgtttttcttttatttgatttggttgttgatggaaatggcgtcctctgaggtagaaatgtcttcatgccaaacttttaattgcgtcttgagtcgtcctcacgagagatgcacccaaagagacaacaacaccaacaacaacaagaagaagaacaacaataacaacaatgtccgaaacatacacgtcgccgccttcgagaagaatctcaatgtttttgtaagagatcatctcgaaaactgtagcgtctccgttgatgatgttgttgatgattccatcaaagctgttccggaatgttcttccaacaaatcctctgtttcagatcatcggctctcgaaaacagaggaatctcggcaagacgtcccatcatcgtcttcttctttaggatccgactcggatccgaattcaggtcaacccgagaacccgtcaagaaacgcagcttcttctctcgttcagatatgggaggcgaggacaacgcagcaaccaccaagctcgaaccaatccctaatcgatagcagaacaagttctatgggatcaaacgctctagagaattcggagtctctcgaatccgtgaaagaatctcaaatgattcaaccgattgaagaatgtaacaatgaggaggaagaagaagagattgaatgtgcacctccacctttagaatctggagagaaagatagagaaggtgtgagagttatggatattattcggaaactaagcaacgactcggagacaattactaataatgacaatggaagcagcggcaatgacaatagtaaagaagttcaaacaacagaagcaagaagttttcctcaggttgcttgttccccaagaatcagaggtcgtcaagctttggctgatttgttggtgcagatgacgcgtgatcgagaaaaagacttggcttgtttacgagaacgtcattgtgtttcaaagttcacgaatcgtggaaggattcaggtatgtaattggtgatctctcatcaagactgatgttaaaattgtagggttttagttagggctaatgatttgtgttttgtggtatttagtctacgcttagaattcgatgttacgaaaggtgccttgcgattcaaggtagacatcggtctaaatcaacatcagcaggatctgattcaaaccgatcgtcacgaggttctggtgtgatgcatcttctcaggtaatgtttgttgatttgttctggtttagtatataatgaggtttgaatcaatgaaatgaaatgcagggagaaatataaggcaaattctgagaacattgagactggagcttcaactagtcatgcgtctactcggggtcggattatggataaagaccctcacaaagctacagagaagaaggttttgcaggagacaatagagaagagtggagtaaaggagattaaggaggtggtttctgcggttgagaatgcgaagaaaggtgtcttaagtgaaatttcagagaataggaatggtttaaagaaacttgcaggagaaactatccagaaagaaactgtagaagggaaaggcgaaaagcgagagacgaaggagaaagttatttccaaagaaagtcttgaagggaaaggcgagaagagagaatcaactaaggagaaagctattgctaaggaaagtgtagcagagaaggctttggttggaatagctgagaaggtgaatctatggaactcagatgagaaaatgaatagaagaaaagtggtggagaaaggtaaaactgaaggcaatactaatactgagagggttgagagaaatgatgtattggaagaagctacaagaagaatccttagtgtcgaaagtgccgaaagaagcagtactactacttcaaaggaaacgatgacacggtgtgaggttgctgagaaagtagtgaaaggaaagaaaaaggaagattttgtttctttggaatctaataagtccaaagaagttgaagatggaaacattaagcctcaaggagttaccacacaagcagatagttgtttgcgtaaaccggctatagaggaaaaagttttgcaggagacaactgtaaagagtgatttaaagaaacctactgagaaggaaagtagagaagagaggagagaaattgaggaagaagaaagcacttcgatgggaatagcagagaaggtgaatctttggaactccaaggagaaaaaaaataggagaaaagctatggagaaaggcaaaggtaaaactgaaggcaaagctattactgagacaaatgaattgttgcaagaagcttcaagaagaattagtaatgtcgaaactgcagagagaagcattgatacttcatggataacggtggtgaaagttgttggtgacagagttattatggataaaagaaagagtagtggagaaactacgcgatctgcagagataggaggaggaaagaaagaggaagatttggcatctgtagaagctaagtccaaagatgttattgaggataaaaacatgaatccacaagctgtgattcatgggtctaaagagagggataaagagaggaactcttcacaaaacggtgaagaaacattgagtctgcgaaactcagaagctaagtctactaaagagattgagagacaagaagttacacaagaagaaaaatctgtgagtcatgggtctagagaaaaggataaagagagaaattctttacaatacggtgaaaaaatgtgttttctgcggaactcggaagctaagtctactaaagagattgagagaaacaagtctcaagaagtatcacaaggagaagaatctgcgagtcatggctctagagagagtgctaaagagaaaaattcttcacaacaggatgatgaaacgtcgactcatcgaaacccaaatgacaaaaaaggcattaaggaacccgaggacgaagagagcaagaaggtagaacgcgaagaaacgggagaaaacgtggaagaagcatcagtagagtttgtaaatgattgggatggaaacgaaatggaagaagaagaagaagaagaatatggagattattttaatggagatgatgattggattcacgatatatcgcggccacgaagttactgggaagatctaaggaaagaaaggtatcttgaggttctcaacactgaatcagagaagaaagatatttgcaatctcattgagaggtatatatttctatgatcattcatcaaatccctcaaaagcattaaacttgaaactttacttgacttttgatgtttagactaattttaattttgtataccgctgtgcagacgaacagtttccaactttttgactagtgatttgcgacaaaagattgataatttgatgatcactcgcgtgcaaagtcatataggcgtaccactcaatcaaatagaagaaggagacgaatatgaagaagagtgggaagttgagtgttcagcaagaaacgaggaagataatgaaacagaggaagaaccagagaagacaaatcttgaagctccaagcgatgtttgcagccaatcatcagcaaggagtagtaccatgatgtcgtggaatttcagagaccaggacattgacaaggataacgaaccgacaacgtctttgtctcttcctgaacctttagttcccacaaatcaatctgtgagttttgttcttgttttttttcgtcaagtttaggttacgtgttggtgaagtaacctgaaatcttaacttattagacacaggacatgcagacgataagtgatctcaaggaacaaatggagcaacttcaacgagaaatgctcgagctacgaaataccgttaaatcttgcatcgatatgcaacttcatttccagaaatctgtaactcaagatctgtctcgttctggtcagttttatcatcatcatcacattaaacacattttagatttattcgttacaaagaaatcaaactgattaataatcttttaggctcatcagcagaacaacgagtagacccgaagaaagatcctttgaaacgcaagtgttgcgtttgctctgagatgcctgttgattcgctcctgtataggtacttctgtttgatatatcgcaacttcaaatcggaaacgctgaaataataactggcggtcttggtcttccttttaacaggtgtggacatatgtgcacatgtctgaaatgtgctcatgaattgcaatggagcagtaagaaatgtccgatatgtatggctccaattgttgacgttgtgagggcttttcttgattcttaggacccaagaaaccacaaaacattgctagtttctccattgatttgaaaatgtgtcacatttgaatatacataataaacattttgtttgtcttcacgtgttatgccgacttctaaagactttattattctcctattcttctatgaagtgaaaccattactttgtagtaaattcaatttgttgagcaaaagctaaaagtacattaaagaggataataatgaatcttggtcttcttggtgatatggataaggataaacattgtagtatttggaggctatggatgtaagaaaatactttttcgaccgttttgagctttggaaaagttaaaaaaaaattataaagaatttgatttttatgttaaaatatataaaagaaattgaagaaaaggcaattgaaagtttgaaacgttagagagaagccaagcaaaaagacacgtctgcgccatgtgtcttacagattttggaagcttaaaacgaaactgcgtaattttaaaaaagtatacaaaacgatattaacaaacaaattatagaaaaccatattaaaaagccatgtaaatccattttctatacctgcaatgtcaccctcagaaaactcgaaattatacgccatcaaatttagaaacttacatggttaaagcaaactcattaaattgttacgacaatgccaaaaaaaaaaaaaagacacaatcatttgagaaattagctgtgtataccataagcttttcattatgtggttgatttttagtggctgctctgctaataattttctgttgttgattgatacatgacttggctttgagcacatgtcaactttgcgatacgaaatataatggttgttccatattattaaattatcatgaacaatttagattttgattctatgattatatactaaacataggaatcaatagttgttaatcatttttcataaagttgataatttggtcttcaataatagcttaaattgctctctctcttttattgtttacaaaatacactctccttttgacctgaccttcccttcactatacggtttcctctggtgacgtctgcaagtcaaaataatacagaaataaggaatgtgttattattcagccaaatgaagaaacataattattttacatgactagaatttttttttacttttcaataaaaaaagagacttaaatcaaaaatgaaaaaacagagattgaaattaagatttggcatagaattttttcatttaatcaaacacgaaagtcgaattaaaatagtacagaacaaaagaaaaatagaaataaagtaaacactcctagctaaaatctctcctttcataggaatgtctggtaattctacatatgaatggattcagtagttgtcttttgtaagtatcttttttcgttgtactcaaatagcatattaattctggaaatatcattgaacttacatattacagtaattaaaaaaaacataattaagttgtcaaaaaataacaaaacaaataaagaaacaggtgtgttcacactcaaaaaaatacagactagtagaagaattaaaaacgactcttctcgccgactcgttgaaaaagtgagagacacacaacttcggagcgaatctattcttcttcttcttcttcttcttcttcttcttcttcctccgtttttttcatcttcttctctgtttcgagagatccactagtgaaagagtcagcaccatggccatggtcaaagagaaagaacaaaacactaaagacaaaaaactcctcgtcggcgtcatttggaacttctccgccgagctcaagctcactttcatggcgttacttgttctctgcactttagctactctcttacctttcataccttcttcattctctctctccacttccgatttccgcttctgcatctcacgcttctcctccgccgtccctctcaacaccaccaccaccgtagaagaatcatcatcctcaccgtcaccggagaagaacctagatcgagttttggataacggagttattaaacggacgtttactggctacggctcagcagcttataacttcgtctcaatgagtgcttacagaggcggcgttaactcattcgccgttatcggattatcatcaaaaccattacacgtgtacggtcatccttcgtatagatgcgaatgggtctcattagacccgactcaagatccgatttcaacaaccgggtttaaaatcttaaccgattggggttacggacggatctacacaacagtcgtcgttaactgtactttctcatcaatctccgccgtgaatccacaaaactccggtggaactctcatcctccacgccaccaccggagatccaactctcaatctcaccgattcaatctcagtcctaaccgaacctcccaaatccgtcgatttcgatctctataactccacgaagaagacgaagaagtacgattatctctattgcggatcgtccttatacggtaacctaagtccgcaacgagttagagaatggatcgcttaccacgttagattcttcggtgaacggtcacatttcgtgctacacgacgccggagggattcatgaggaagtgttcgaggttttaaagccatggattgagctagggagagtgacgttacatgatattagagatcaagaacgattcgatggatattatcataatcagttcatgatagtgaatgattgtttgcataggtatagattcatgacgaagtggatgttcttctttgatgttgatgagtttttacatgttccagtgaaagagacgatttcgtctgtgatggaatctttggaggaatattctcagtttactattgaacagatgcctatgagtagtcggatttgttattccggtgatggtccggcgagaacttacaggtaacattcataactttgttgattttaatgattgaacgttaaccaaatcccatgtgttgtttattgagtgacttagaatattagtcacaagttttttgaaggtgacatataatatcaataagtatctgattcggtcaacacttggcctgtaaaagtctttgtgcattctgtattagtctcctatgtcggtcacgatctttacttttattgaacatcacatgattttactgagaaatgttttcacatgattttagtgagaaatgttttcacatgattttagtgagaaatgttttaaagattctatcttttgtttgtatcttttttgtttaatcagaataacaattgaattgtgatgtagattagtttagtattgaacatctctaatggttcatcttaggagggaacatatcggttattgatttggtttagttcagggactgatctaaatggtatttggttttgtgtttcaggaaatggggaattgagaaactggcatatagagacgtcaagaaggttccaagacgggatcgaaaatacgctgtccagccggagaatgtattcgcgacaggcgtacacatgtctcagaatctacaagggaaaacataccacaaggctgaaagcaaaatccgttacttccactaccatggttcgatctctcagcgccgcgagccttgtcgtcaactttttaacgattctcgagtcgtgttcgagaacactccttatgtgctagacactacaatatgtgatgttggccttgctgtgagaacgttcgagttgagaacgatcggtgatcggctgctacggacaagacaatgaagagatggcaaaaatgaatagtgaatgtaatcaatctttagaaagaagaattagaaggtgttaagatgagttactttgtattattttcttttgggggtatattcttttattgtatcatataatttgggtaatgggttcattaatacagcttgaaaatactctttggtatatatattctgtatgatgtatgatttagaaaaaaggtctctgagtatataatctagtgatgataattgtggagatcaagtaatatcactgtttgtatttgattactgtactcttagttgacaaaaagaaaatgtcaatatccattggtgttactccagtaatccatatggaacgttgattatttgttatgtttgtggacgatttttataattgtttgtttgttgtattccctatgaattaattattaacgacaaaaaagatagcttttgctttttgtggagcgaaggaacgtgcgttgaggcttttcttgacgatcaccgaatgggcctaaacgtgtgggtccacttagaatgaaacatatgggacccacgtttcgtggttgttaatctcgcaagtcgcagaccagaggctagaaagctgtcgtttgttgcactagataacaagtgttttcataatcataacattacactatattatgcggtgttaaatcacccgagatttacgtttggacctacacacttcttttccccaacggttcattttaaaaatgattaacatcgtaattgttatgaataaaggtggatgcccattataaggcctatcatctaagcccattatttagatgtttctagggttttacccctttccttgtacttctatataaagaaccctttatctcaatggaataacacactcatttcttctatctctttctctgtttataacacgttatcagcacgctctaaaaggtagatatagagattcttacattttttttaagaaccatgtttacttatcgactcatggttcatagtacttattttctattattgaaacaaaacaatatgagccgatcgatgattatagtatagatcggtaaaagcaggttttcaatgattcaataaagaagagaatcatgcttatcatttgtttctataattactatcgcatgattcaatgattctacaaagaaaatcgttaaagaagagaatcatgcttgttaattgttaatttttgtgatgtactattacaatattgaatatataaattaccaattttataattatataactaattttgtaactattcatagtccggtggtgggtgatgcaagcatgtattaatgttttagcattctagttttgaatagttgcatctatattcaatatcattttataaatattatattgtctaaaattcatttatgattgatatgatatctcttatttaactcctttgattaaaacgttatacatatcttatcacttttagatattgacttttctatattaaatatttgatttccatatatttgattgtgttattattatttttactaaaaacgttgcaagataatttttttttttataagatttcatatatctaaatctttgtgttattattatctaaatctttttataagatttccatatatttgattgtgttattattatttttactaaaaacgttgcaagataatttttctttttataagatttttttctctaaatctttgtggtatctaaattataaaaaaaaaaaaaaaaaaaaattgttcatggttttgccctaattttgcacgaaatcattttacccaaatcttgcacgaattcatattaccctaaataaaagttttgtcaagatatatgtaaaatccagattttgcacaaaatagttttattctgattggttttacaatattgcattaaaattgtattagtatataatacttgattattttatgaaataaattgattgataaataacttaatttaaaggtataatcacttatagaaattttcatgaatgactagtttaatgtatcttaaaaagatatcatatttttgatggtcaaatttttttttaagaacttaaattatcactagaagttgagaaaataaatatggtaaaaaacaaaaaaaaacaaaaaaaaacaaaaaaaaaaaaaatttctaacgatgaaataatctaatatatcaagtagtataaaatcttattaaaagactctagaagagcatatacattgttttctatgggaatacaaaattaaaatcatcgatgcggtatagttctccaaatctcaaagttaatatgatgagatataaatacattatgattctagagtggaattcaatacgagatggatgaacttgaagtttcatcatttcgaggaggagaagtaatgaatctcacatggataataagtgacatatttagaagattatgttcaatctttgactactaaagatctaaaagttgtataaagcaattcttatacgaatgtgttattagataaaataagttataattagttattactaaaacatcaagacttgaagtctctttgtgaatataactcacattgttaagagaatatctctgatgcggagatggtaaaacagacacttaaacttttacgcaagtattgttgtcttgtagacataatattttgaaagaaattttgagaactattataaacttaaatcgagtgtttttcaaaggctaagaaaacatatgagttatctatgataagtaatactcatattctgaagtgaatataagatcttacatagttagtcaaatttaatatcgtttatactagaatataaaattttaattattatctcgttattgttttattaacatatgattgattattaaaatacatggaagtaattttgattataagatctcattaagggagtaactgataagcaatgaaaagtaaattagaagttttgaaagaactagaagtttcaaaaaaattaaaagtttcaagagtatatttggcttaaccggattggtcatcctggtttaatgatgatgtgaaagtattgagaattatgtggacattaggtgaaaaaccagaagattctccctaatgatttatcaaatgttacttgctcagaaagcaatatgataatgtgatttttaccagtgtaagtaatttggactttatctattcgtaagtatatacaaggagataattatgggttgatcacccactatatgacatttagatacctaatggttgtaaaagatgcatcgattcaatggacgcattgactcgattgttgcatcgacaagaaggtcatatttatccttgttataaacccgcaacatagagtttgcgagattactttcttgattaaagtacaaagagtattttagtggatcattcataataaccattattggatatccgttgggataagtgtttaacattttgaaattcatgttcatacacaaaatgttttagtaacatcgatatgcatcaagccaatgaataattaatagttttccccattattattggttttgggtcagaaaccaaatagttttcatctaaaagctttgaatgtgaaaagtgctccaccacagcatgcagagatgaaccctcaaaggaggataagaatacatgttggatatgaatgataactaagccatcctagaaggatttatataccgctcgttttgaagactatcatattatatagtcagctattccaacataagggggagaatgtatacagctagtgaaaaagataaatagaaatgaattatcaatgatcctcggagtaaagaatgtatattaagagtccaaaagataattcaattacagaatttagcgttgtaattgccagacgcatttgctgacccaaataaagtgatgaagtcacttataccagttgtaaattaaatgctctagaatataatgaatgtcctgtaaggaccaatttcaaactgttattgagtcttaagatcgcatgaagcgtaatagaccttggttccaaatataaatatcctcgtaagagtgaaggagcagaaaattaaaaatgaccaaattgaggaaataaaaattttgataatctcttgaagaaagaaaatgatctctaaaagagacataaacatgacaaatgaaacattcaagtacttgacaatgaagagatctagctagctatgtcatttcaaaatataatggaatcgaaagcaaatcgacgtcgtaatatatttgcatgctatgagcagttgatattatggataaaaaggaggatcatgaaagaaagtctattgaaaagtgtacacaaagtaatgattagccaaaaatggaaaagaagaaatagacatataattataatctctagtagagatatttggactagtagtctatgcacatgatgtgtaaaaccagtggaaaataaaatgagtctttatggtgaaagaatagtgaaattaatgagattttcacaaagataagaaatgtattatgaagagatatattcttttgtggtggatgtaatatatatttttttttaagtatctaaagtctggcaataagagacggaacactggatatgacatttatatgaaattcttgaaagatataatctctgaaggattaattatatgagaattatgttctctaaaactctactcgatcgaataaaaagaaatatgtaacatggcatataatcatataaatgtatatttatgttgagtttgtcaaaatatattgatcaaattaatatttgttttgaaaatcattaaaaactcctacagagttatcataagtaatacgatgacaataatgtatgataaaatatcactagataatgatatttataagtctatatgaaaaccatataattttgatcattaagattatggttattaattccaacgagatattgtatttgattgaaaatcatctcctgaagaagatgtttccgagggggagattgaatgatatgcgtggatgtaccctttttccttatcatagtttttatcccacatgatttttctttgacaaggtttttaacaagacattaaagaacacgcaaataatacacttgatgaatattaagaaattctatcaatcatccaaatgaatattatacactaatgatatttagagaaataaataagatggtcaagatgaatcatctaaaagattcatgagcagaagaatggcgttgtactttatccagaaatttgttcaagagaagatttggcagacttattctcaaatactgtttattctctgtcacatcttctaatcatgcagagattttaccaactcatgaagctagccgcaagtgtgtttggctaagatccatagttcaccatatacaagaagactgtggtctatatgcagggaaaaagactccaacaattatgtacgaagacaatgcaacatgcatcgcacaactcaaagacggatacatcaaaggcgatagaacaaagcacatcctaccaaaattcttctacacacacgatctacaaaagagcggcgatgtacgagttctacagatccgttcgaatgataatctggctgacttattcaccaaggcgctacctactgctactttcaagaagttagtctatcgtatcggattacgccgtctcaaagatctcgtcgaatatactcataagggggagtaattgtatgttgcactctttttcccttaaccatggtttttcccattgggtttttctggtaaggtttttaatgaggcagcatttcaaatactttacgagttatgatactataatggtcatcagggggagtgttatgaataaagatggatgcccattataaggcccatcatctaagcccatcatctagatgtttctagggttttactctttccttgtactcctatataaagaaccctttatctcaatggaataacacactcatttcttctatctctttctctgtttataacagtaatcactttcgttagatatttttccataatgacatgaaaaaagcttaatttgattactacacgcagacatttacaacattgatgtttagacttttgatttaaacaacggaaaccaggcccggctctacacatgtgctggaggagctgaggcacagggtccacccaaaatttctcttttttttaagtaaatctagtacaattacgatccaaaaaaaaaattacataacaaaacacaggaaatgagaactaattttttttccagctctaggtcctttattattttgagccggccctgacgaaaacacacaagaaaatttctatatatgcggttttttagaaacaaacaataaaagattttattttcaggccataaagaacccactaagtttagtttcaaattgaggaagatgagaaattaactttgtccgagttacaagttacaacaaccaaacaatgatgacgacgaatataagagctcgatatttaatctttatcaaggttaaattatcaaaattaaaaattaaaaacaattctatcaaaaaaggtaatttatcccaaaaaaaaaaggtaatttagattacctagttagggtgtccccgtgttaattttgttgagtcaaattaagccgcatatataccaatattatgctcgaacccagatggaacctacttaaccaccccaccaacatgcagagtgattaccagttttactaggcccgaattggtgatcataattctattttttaaaacttaaactagcttttaacaattaatatagaacttaattcccggtttaattcggttctctaaagattccagaaccagaaataattgtttatgcttatttgggggaacagtttcgtttacattacacaacatggtctcccggtgaaattgctcacagactaaattttgccaaaccatattattctagtgagcgtcctctgtgcgtgaaactacctatgacttttattggaggcgaaacacttttttgagacccatggaagtctcggtttgatgctaaacggacacaagaaacataatttaacagtagatattttaaaccacaaaatatgaccgtgttttaggataatttagggtttagggaaagctcaccgacggtacggaaccaaattgtcatgtaaaattaatatatcacattcaataaaccctacgtcgtccctaccatttcctgattttcacatcatcaatacttacaaaacctttttgtttgtaattttttccctaaaatgtagtaactgtacgttgatggtaacaggttatcaattaatgtatacgtgtgtatctatatgtgatttatcacgtcaatacattgctcaaataatgtttgatggtctttttttggttataaatttaatagttgacgttacgggaggagtattaatagtaagtcgccgaggctgcataattctgcagctgcaatattctctgaaaacacagagtttatgtactcccataaaaaataagattttacctacatatttacattttcggtactacttatccatctctggacattgctattaatacttaatagcttgaagaatcttaaaaataatatgaaaatgtaaatagtatattggaagttaccaaacacacagtattatttagttgcatgtatatcatcccacggataaaagtaaaataaaaaattctttttacaatggaaaagttttaattctctcgaatggcaattgctacaaaaaatattcagcaagagaagaagtgttaacttcattcggtaaaattcaataaaagaaaaaaaagaatagtgaaaactgtccatttattattcacacggcttgagcttccaagaaactactgaaatcctcggtggcttgtagcaaccgtggcgtgattgaatgtgtcggagacgttggataagaaaccggcgacgaggttgagaaccgaacgtgacgtggtgactccattgatcttcttgatttcgaaccagacgttttcaaaacacctttgatctctttgtccaaattaggttccttgtcgaacacgaaagcagctgaaacaggatcgtcttgatcgttccctcccggcccacctttgatcaattcggaaggcaagtcgaagaaatggccaccaagatcggcattgtcatcgtaaatcatagccgaagatgtccaagaaccgcactcgaaccgctctagggaggctcgagccgagagcacggcagtgtctctaatggaagcggttcttgccatcgattgagaggaagtcatcgtggttgttctggtgaacgaagaatcaccttttcgagatgatcttacgggctttcctttgctgaaaccgggtaggtatagacacaaagcgctgcatttgaatccgtcttcgaatgaattgatgcttttcgaattcgcggtattgctattgcttctgttgcttttgttagactctgttttggagaagaaagagttgtttccactactcttgtgagagagactcttagagttagaggaagagaagccacgatgatgattttgattatgatgtgcatttcttgatttatgcaatagcatgtcgaaatcgagcgatggtgtgcaagcacgtccttcgccgcaagatttgcttcttcgaaacgcagtggctgcatcttgaacgagcattaggtcaagaacttgctcagttgttctgtccttccagttgtgaatagagctatttctaggtgacgtagctgctgagtttgggaggctgcagctcacaaacttcgtcttcatttgatgatccaacggcaagtcatcgatgtctctcggacgtgagactatcatatcgaagctcccattcctggacaatagcgattgcggatcaaccgagatccgcctctcggatacggattgcatactcgtcttcttgataagaatcttgggctcgtctccaccacctagaacctcaaagtcatgccagtcctcgagactactatcgtccctgaagctgagaacatctgtcgccatttgtttctctttggcctgaaattgaatgaggactaataagaaaatgaaaatattggcaaaacggctaaaacagattgattgatacttaaatacggagcaggatgggttgcacgtcggtgactactttagtcatgacttgcacgtttaatataatataacccaaagtgttgttgacttcatctcctaaaaaatgaaaaatgtgtcatgttttttttattagttaaatatctcaatatcgttgacatgagaccatgcccaagatcaagacaagatcaaaaagatagatctgcctgcacgaactacctaattataatattaccaaagtatttggagggtagtaatctgcatcagtgaagaccataagtagaagccataaatcttgaatacatctccgagtacatgtacttggtactttatacgctacttaatacttggcaacttttttttctttggttacttctcattctcgttgattactttacacgatatacttggttatatcccttattgatacgtcttgtgtttttttctcatatttttacctttacttctgttttgcctttcctttgtacgtatctttgaatttttgtgtgtcttttgctacaaatatttcttcactttcattgaaattcatcaccttcaatggatgcacctacgtccgttagtcatatatggctttaggcctcatatttattctagttgctctagtatatccctcaaaaatggacggtgagaaacaataccaattttttatcccaagggatttgaaccggttatgtttgaataacatagggatttgaacgtcaaatcaacaatttacgaaacgattaaaaaataaatgttatagatggcacacacaaatttatagtgttcactcttaaagaattgaatctagtttcccatgttgcaaaattttcaaactatgtagtgaaaaaactaaaagaacaaaggccacatttataaatcgaacatgctaaaacatttttgaaagttttcaaatatggatttgatcgacaaacatagaagtcatatactccttgatttttccttggggattggtgaatccttcatttacattgtaggcgacggtcatcatgcgtgcaagatcaatggttgccttaagaagaaaatgtggcacgccagttgttgacaagaactcctcatttagtgtcttattggcagctacaactattttataaagctccctaaaagcttcctctttggtaaccccatattgcttcatatagcagtttaccgcgttcgtgacatatcctctactcatgtcatcctactcaatatttgagtaagtgggtaagatttacaagaaagcagttatacgcgagatgtaaagaaacgatttatgtatttgtacctcataacccatcaaatcattcataagacgacctttgatagacaaatattggacgagttttggtctggatttcagccactcaaaagcttcctttgtagccatctttcccatagacatgaaaattcctgccaaggacgcatacactgtgacctccacctcaccaacctccatatactcctcaaagctaggaatgtgatccgcttgtgcccatttttcgagatcaatgttcgctttcgcagctgccttgaactgggcatgttcaaaattatatatccgttaggactacaaaaatgttatttttcagaaacatattccaaaatattgaaacacccacaacttctttctttaaagtcttagttaaaaaaacttttaaagccatgaatatattgccttgattaatgtataaagttgtatacttagaaagtataatttgattggttacctcttctattgtggcattcacactgtaagatctttcttctggcccaagttctcttttaaactcttcaaaagtatccaaaataaagttcaacacaaatctcaaataatcaggttgtttatccattgcttgatcaggagcccacctgtacatcatcatcatgatcattgtttatctggagttttgataataaggttgtatactatttttgtgtgtgtttaacgtcgtatagtatacctttccaggctgttggcaaggctttcagcctcatgaagagacgcatatctatcgaatgtgtcatctagaagtgctaaaccggtgaagtactgaatcatcataatcctttcacgtgagagttgtggcgagaagaacactgcttgcacaaggaaatgatgttcgactattctgtctctgaagtaaggtggcaaattagttgcaaaatctagctccttgtaccatcttgcatccaaatatatagatatgtagtcagaattaatcctttaaatgattgtaattaagttataagctatataaattgtgtataaatactttgtaagggttttgagttcttgaaggtattgtagttgtcctaacttgaagctgagcttggcaaacttgagtagcatctcgtcatgctctatttcttgttcatagaacgggatgaattccactgggactaacatctccatgttccaatgctgagatagaccaagagcatttcgtatacgcactgagagatgaggcgggcatgtaccacttgcagctagtgactccaagtggctcgatgtgaagctcaacgcttcctccagtataaagtctttcgttgtccccaaattcgcagcttcatacaagctcaacatacccttggcatctcgagtaagagattctttgaagtttccattgctacctttgaatctttggaatacacctattgaccaaaatataaataaaagtcatttatacataacaataagagattaaaaaaaaaacacttgttccaacgtcaatgatgaacaaaagcttaggtagagagactcctttaccgtaagatatgtggtaaccgtgtcttctgaaaacccaaaagatgatggaaactgtgtacagatcatcttcaccgtccatcatcttatctatgttttcaaaactcatttttagagtttcatagatctcttcctcgaagtgatatgcaaggccaaggctcaccaacaaatatatcataagtattctcttctttgtcgagtcaatgcctttgaaggacatgagtgtgctctttagtatcggctttagtgcatcgatctcttttctaagggcatccatttcctaaaaggtaaattatgtacatacacatgtattaaccttctctacatcaatatacactaacttttcatatgtattatatatatggactcaccgagacatcgatggaaatcgagtggccataatgagtccattcagaagttggcaatttcttgaacttgcgaatacgttcttgatcatcaaatgtcagagtattagtggccttcaaacgaatatgcttcaatggcttactgggaaatgacgtcaagtgaaagccatagagtttgcttaacggccataaattggtcgaagagctaagaaaaatctgagatccaagttttggccaaaaaactgatgtggcttccatgttcactacaaaatgttatggaatccgttttcataatttatagaccataactttttatcttaaaaacactagatttttatgcgtaaatatgttaagtaaaactagttatcacagatagtaaacttcttaactaagcaaaatatcaaatattattagacttcaatatgaatataattgtttttgtggaaagtaaaaataatatagtttaatgaaatattttgttcctaagtagtcattaataaaattccatgacaatctttgactcatagagagataccttatgttctttttgttcctaaacagtttgacaattttaactaagtaatataatattagtaaaatattttgaaatttaccaattataattagtgaattttaccatcaaaatttgtaaaccacatgcaatatcatatgtattctaatctttattttcacaaacacaagatattaatagttactaattaataacaataatgtatcatatgatatatttctattttaactaagaaaaatatcaaatattgtaagctccaaaaactttaattaaatattttgttcaaatattcatttgcttcaatgaaaaaatattgattcaaagatactttactaaaaagaattgtcctgaatattttgacatctgtaattaataaactattagtcatatactcatatattatgaaatttaccaaattttaattagaatagtattagtgatctttattaaattataatcacacatgtatatatatttatatagtatcaaatattgtaatcacactaaagtttggtttagattttctataccatacattattaaacttgttctgtttagtgtttactttgataattttatagttaatccaaaaaaagaaactcaaagtgctgtaaacgaaaactatgaacacaaccacagtttaatttacaaatatcctaattttcacatggaataaaaacagatatctcatcgaagcgaatccgatgcatattacaaatctaaaagtacaatacaaacacaaacgttacaaacctataaaaaacaagactttgctaaacataaacgttacaaacctattaaaaacaagagttttttcagcaaagtagacacttttgaaaaattaatttgagaaatttgtgaaatttgtgaaataattttttagtttttattttatttttgtgagatagagattatgtgtaataagctaaaaaagacaaaaaaaaaaacaattgtcaaataccactataccttttgttttatatgagaaagttttaggtatgggtcccaatttattttatggtatttaactatttcgaccaacttctattatatcataattatcatttttcatcttcatattattttatttattttctttaaattaatatttttttaaaaaatattaatattttcttctaaatataagatgatttgtatatattcaattattaatttcgtacactagcatttaaacattgttttgtacactaacacttatacaccaaatcattctacacaacatctcctaaatcgttaagtataccgacttgtctcatatttataaataaattaataattgttcataaattaataaaaatatgtatgtgttcactaatgtacaccatcatgtacaccattaaattaaccatgatggtgtagaccattaaataaaggtaatgtttgtacattcttatgtagagtacactaaagtttgtacatttcaatgtacatcaatctcatacactattatattatttaaactttgttttgtacattgtcacttgacaaaaattgttctatcttttgtatatggggtgttatgtatatcttaatatcatgtacaccatattttatatcatcttcatataccatcatattatgtagatatacaccgatataaattgtcgtttgtacactactttttacattatcatataccctatactactttttaaatcaatattatgcattatcaccgtacattgtacacatatttttacaatatcgcgtacaccttcaaattgagattaaataaaagaaaaatattacatatttgtgaaatataacaaaattagacttttagattagcattaaactggttttaacgatttagccatatttaaatgagaaattgtagaaataccctttaattgataccttttttttttaaacacccactgtaatcatctttgttaaaaattattgccattttctattcaaaaaggaaaaattaagtggctggtcccaatcgaacagttacaaaaaaaaaaatctttttggcaatgccagatggaaaaaaaaaaaagcatttataacttataacaacataaatcatgtagatcgtttataagacttctgagcttagaccacaaataccaaacgaaacgtcgctatgaaagaaaccaagaacaaaggtcacattcgttttaacatatgaacttaaagcgatacagtattccaaaatcctcaaatacgaatcggggtaataaacaaagaagtgatatactcatcgacttttcctttggtatgggtaaatccttcaccttcagtataggagacgttgagagagcgtgcaacgttgatgacttgtttccgaatttggcgtggtaaatcagttgtcttcaaaaactcttcgttcattatcgtatggttgtattcaactaagttttgaagctctctgatagcttccattttggttagaccatattgcttcatataagtgttgactcccgtaatgacatattctcttttcatgtcatcctataaaggaacaaaatattaggaatatcacatttcataagtttatgatttactcttaaatgtaaataaatttaggaatcactcttttcagtaccaactagtattgaaacagaatcatacggatcttagacggtagcacatattaacaaaacctaaaaagaatatgttaaaaatgatttatcgaacattgatgaggggaaacttttttgctttcagggacatattacttcttacattgaccatcgattgtacatgtacataaaaaaaaaatcaattttaatataatcatgagttactgaattcgttttatagatgacctaactatagttaatataatcatgaatcaattttagctaccattcacacaacaataataaacaagaaagaaaaaatatgatccattcaaccaaaagagctagttaagaaagaaacaaaatgatccattcaaccaaaagagctagttctatggaacttatgagatatgaacgtagatcgaagagaaggtccgtaagattcgggaacttgcaatatatatttagatttttttttttttaaaagcaacaaatattcatgtaatttgtacctcaaatccggctatatcattcatcagacgcccatatgtagaggctgctttgagaaattttggtctggatttgagccactcataaactccctcatcaccgatatgtccgatacacatcagattgcctgccaaagtcgcacataccccaacctccacctcaccaacttccatgtactccttaaaactaggcacgtgacccgtgtgtgccaattttgcaaaatcaaagttggctttcacaattgtcttaaactgcagccaatatgttttaagaagtgtaaacaagttacaactgcattttgctaaggataattaagaagtgtcctatctatattaacattttaaagtatattttaacgaatctaattgagtcagtttttatttgattttgacccgaaattaagtgagttggatcttgcctaatttatacaaaagcagaaaatacttaccataaattaatgatagtataaaaatagctcaaagtgtaacattttatttgtttttccctaagttttaattatttagaatgaaaattttaaattaactcgaattacatatattttacataaaagtattttttaaaagaaaaataacaaaatgatgtttcgttatcaagggacgagtttatatagcgggataggtttagataagacgaatttatatgacgagatgagtttggatgagacgggtttatatggcgggatgattttggatctatattaatatgagacatcccaataaatatcaatactatagtatatcaaaataattgttaatattcttcaacacatctacatatgtaattgtactacaaagttactaaattatatatgttctccggattaaatctaagaacacccaaagtttaaattatataattttaatacaaaaattgtgaataaaaaataaaataatctcggatcaaatcttagaagaaaaaccttattaatatcgttacattacggctcactaaaaaccgtgtacaaccttatcaaaaactattaatcaacacaaacaacaacaaaaataaatattacactcaacaaattcttcattttatgaaaaactaaaataaataaaatatttaacccgcatatatcctagtatatatttatgttgtaaacttttaatttatctaaccctgatattaagtgttttagaccctagggtgaagatgtatctgctggtgatgattttctgaatgattcaagaagtaattcacgatctagctggttttgtgtgaatgttggtttctagaagatttgagaagatatgtttggagcgtgtttggaggatgaatcaaaaaagaaaaaggacttaaagagatttggaagacttgatgaaagtggagtttgatgagaaaaagaaaaagtgtaaaaaagaaatttactttttcttatgaaaaaaaactcttctcctatggtgattaggaaatcggtttggctatataaggaggagctaggatgttttggagaggtaaaagagttgaagcataaagaagaaatctttgagagctttctgtgagattgtgtgcaacttagttttgtgggttttatacttgtgtgatcaagtggttttgttttaaagtctaggctcatgcgagtttagctcagggttaggttatcctgattaaatatagactcagagagagtttagttaagggtagaggttatccttagggtttcacgttaatagaagggagcggtaaatcaaaagggttgtgcttgttttacgcgtttgtgaattggttgtaatttgctttcttattctggtgaaatcgaatctagacttgatcccggggagtagaaaaaactgaacctcgttaacaaatttcttgtctcgttttactttgtaaaatgtatcttatttatagagaatgaatcttcgtgcgcttagcacctaagttttctttgaacactgattttaaatttgtaatcagttttgtatattaaaaaatttcttcgctatcgatttttctaaccataaccgcgcaaatataataggacatgcatcttcaaatttcacaaggaagattttaactctctcttttgtttacttcattttcagtttagtcaaacgagagtttgacgagttacctcttctagtgtggctttcacagagtaagatcttccttctgacgccaattctctttcaaactcttcgaagcaacccattataaacttaaacacgaatttcaaataatgtggctgtttatccatagcatcatcaggagcccacctgagcatcatacttatcattagtaatattatcatcacatattatctttttttacaggatgaaagttgaaatgcgtattcattcaaaaaaaaaaaaaaaaaaaaaatgaatgcgtgatatacctctccagactattggtgaggctttcggcctcagaaagagatgcgtatctatcacaagtgtcatctagaagtactaaaaccgtaaagtacttagccagcataatccgcttttgtgagaattttggctcgaagtacatcgttattgcaaagaaatgattctccacgattacgtatttgaagtaaggtggcaagttagatgcaaaatcgtgttccttgtaccatcttgcaataataataaaaaaaaatattttgatcagaataaattaattaacggactgtatgtgaagccattgcagcactagtaattaaggaaatcataacatactttgtaacgaccttgagctcttcaaggtaatggagctgcattaacttgaaattgagcttcgcaaattttagcagtattttgtcgtgatctttttcttgttcatagaatgagatatattccacagctactaacacctccatctgtttatgctgagatagtcctagagcatttcgtatatgttttgagagatgaggtgggcacctcccatctgcagctaacaactccaaattgctcgatgtgaagctcagtgcttcttccattatatactctgtagtcgttctcaattgcgcggcttcatacaaggccaacaaacccttagcgtccccactaatgcatcctttaaaatttccatcgtttcctttgaatttctgaaatatgtctgttagaaagaaaaaaagaaggatcttgttatatacatatatcaaaacttgtaccaatccatcatcatgactagtctagctaaaatgtctttaattaccggatgacatatggtgaccgtatgtccttaaaaccaaaaagatgattgaaatagtatacaaattatcttcaccagccatcatctcttctattgtttcgaaaccctctttcagacactcttcaatctcatcttcgaagtgataagcaagaccaaggctaaccagcaaatataccataaggatttttttcttcgtcgattcaatgccttgggaagacatgagttccttcttcacgttcggtataatcttatcgatctctttcctaagcgcatccatttcctataaataaaaatgtacagatatgtattgacctcttacttatatatactggaaggttttatatgtaaaatatgttaaaatacttttaacaataaaaacatagctaaaagactcaccgatgcatctaccgagacagagtcgaagcgattagtccattcagaaggtgggaacttttggaacttacggttactttcttgaggatcacgaatcagagctctagttgccttcaaacggacaagattagcaggcttaactggacatgctgtcggtggaaatctgactggagttaaatgggtacgaggagaaagagagatttggaatccaaattttggtgaaaaagtttttatggcttccattttttctgtcaatggtttggatacatttcaccccaaatttataggcacatcgtagttgcttacccgacaacagcgtcgtggtcacaaactcaacaggggggaagaacaattttcatttccttaacatttaattatttttgttaatttaaaaaatgcttttaatacatgtgccatatataatatttttatgaccaagtaaagatttagaaatatcgcaatttaattgttgtcatgaagcttattgctaacgtcaggtagttcatgtaggttaattttgatattttatcgttcagattaaatttggcatggtattaaagaccgcttagagggagcaaattaattaatttgcataaaactaaaaagttgaaaatgaaactcccagaagcgtttgccatggaaaatgtgagcgaagcaaagctggttgttggcatgacaattagaagaagcaaaaagggtctcatgctgtcacaagagaaatatttgaagaatgttcttacaaggttaaacatggataacgcgaaacgctttagtagtgatactccatttgctggtcagtttaactatccaaagatcaatcattatcgacaacgagatgttaaatatgtaacattagatattatacatgcaatggaagttactagcatatttctgagtaaattgggtaaggaacttttggagacggttttaaaacggcacttgaagttcaaaattatatatatcaaaaattctcacacaaggtaacaaaattatgtcaatgccaacaatggaggtgatgctgagagcacatcgagcgagtaaaccagtaaagttatgtatacaataaaatttagaaaataaaaatatataaattctcaaaagagatctgcagattaaacgtgtctagaaaacaactttggcaccaaacaaagctatcatatgtaaatagatatgagatatcaaatacacatatacacacactgtccaaatccatcatgtgaaacaattattgcaaaagaggaagaagacagaaatctgggattcgcttatggcttggactagagtcagaaatctttcttccccgcgaactcttagacttttgcttgcccaagctttagtgtatactgtttggaggcagaggaacaacttgatgcacaatcagatcaggattccgcctcaagccatctttaaggatatagaccgtcaaatcattaactcgataacggcaagaagacacctaaagaattttagaagtcttatgcagcactggctctattaacggatttgcaatcctacagtttctgtttattgtcgccttggttttttcttttttttgacaaggcgctttctcttaggtcttcatctttgtaacacctaattttcatctaatgatatttactctcttagcaaaaaaaaaacaattattgaaaaatatcaaatgcctgccatgtgagtcgaaaaggctaggaaaaactattactgatcaagaaatcaatagaaaaagaccttctcaacatttgataacctacttaacttttgcctatgatgttttcttttgttttttagttggaataaatttcctttaaattatggatcacattattgaagaatatgctcaaaatctggtgaatacgacgacaatgccaacctatgtaaagactttaagaatattttgaaatgcgttaaatgggaatataatagtttgtcaaaattattttagtctagtggtaaattttattatagtcttgaaatgactcccactagagtttgttttggcttaagattaatttattgggttgctttttcaatgaaccagctcactttaggtttaggatttgtttagtgacgatgtcggatggttgtgttgatctggtccttgtatattagcaagttgaacttcctcctttcaatttggtgtggagaccatcacccaagtaaaaaagagaggaagcggataataagtaaaacttgttcaaaaaataataataataagtaattaagatacacatgatttacgttaagtatctaatataattatattttaatcgagatttatatcatggaaatacaaaaagacgaagttagattcttatgttacgagttaaatgatcttattctataattacaacattgaagaaaacccttaattttcgaccaaaaaaaaagaataccctcaacataacagagacaaggtcaaatgcaaactcgagtcataccatactggtttacattgttaaattggcgataaatattactgtcgaaattatcttatatatcttcaagagatcgagatatatagagacagaacgaaggatcaaattgacatgtctgttgttgatgaaattattgtaaaccttcgcaacctcatcagcgagagagtttatttaccggaaataaattggtcagtgaacgaagagaaagttgagatccaaattttagtccaaaaagtaatgtgacttccatgtatctactaatgatatgaaatccattttcaccatcaaattttacactgtccgatagctcactccaccaaaaacccgtgcagctgtaccttttatgtcatctataacttatagactataacacaacaagaacgtaccaaagattttgggagccagagcaatataacttaaacagagaagaaaattacaattcattgttctttttcctgataaatcctcggtttcctttaaaatttcttaataaagatgtaaagatttgttatctcacaatcactcgattcgtactcggctcttgtttgtgaatggattgaacaacagagaaacgtaaagaatcgatgacacaaagatttaacgagttcacgtttccttaaccggaaaacgctacgtctcgccggaggtgatgctctccgatctaacaaactcgagagagatgaagaagataaggtacagagaattagaattgaccaaaagaccctcactgttcgttacacttttggtcagctcgacgcacgtgagattctcgtgacttcctttgaaagctgaatgatagaaccctctctttcttcgagagtctttcccacacttttaagactttctcaagaacaatagtgagccacttccttcaaaagaaaaacagctttcatagctctttaattcttcatctcacatacagtcaaagatacttagtaaaaaatgagtttgcatggttgatcatctcacatggtagccattccctaaaatgacattgacacctattacactttttggttttaaacagatagtggttatatataatgctatgatggctttgttttgtgtgctaaagctacctgctttcaacaagtattcgaatatttctagatctaatttgaagatgctgtacttcattttttaatttttagataacactcataagatgacctttagtacattaacaatggacgagttttggtctggattttagccactcaaaagcttcttttgtgcccatatttcccatagacattaaaataattgcaatggtcgcacatgagacgacttccacctctcccacttccatgtactctaaatgtctaccagccggtcacccatctcgaatggaagttacttcaaaacactggtgccagtttgttgggactcttcaaaaacaacagaaaaaaaaaatattaacttaaaaacataattcgtggaaaaagaagtaaacatatgttaaggatacatgattgatttgtatttgtctttttctatttttggtattgttgaaatatgttgctttgttttgtctgtatgtcttatgaaactctggttgtcttgatcccaactctttatttaagacgacacaaaattatgaataagagtggttggacgaagaaaaaacgatgagcaagaaaaaattgagattaatgaagtttatgatggatgacgtgatttttttggtaaactaggaagtttaaaaccgaacctcatacatctacaaattttcgaacgtaagctaaaagttaaacgagtctagaaaatatcctggcacagcaaacaaagctaacatactataaataaatatgagatatcaaatacatacacccactctgtccaaatctatcaaatgaaacaattgtccaatttctagcaaatgtctgccatgtgactcgaggaacctaggaaaaacctatgattgatcaagaaatcaaaagaaaaagaccttctcaacatttgataacctacttaacttttatttatgatttgttttatttttagttggaataaattttcgttaaattacggatcagattattgaagaatattttcaaatctggtggatatgaattaattacggcgacaatgccaacagaggtaaacattttaagaatcttttgaaatgagttaaatggaaatataatacgttgtcaaacttattatagtctagtggtagattttattgggaaagaagtttcgcttttattgtcttgaatttgattccccactagaaacaaagctatatatgacatatttggtaggttttgagttcgttttcgctgatgatgggttgcctttgcaatgaatctgctcacttgatctagttcttgaattatggttttagagtcgagttccttgtggccatccacaacaatgaaaacgcattagagtctctatggtgtggaaacgcataatttggtgtggaaaccatcacccaagatatactcgctttcttaatagagttttttgaaaaatctcccgcgattgtgagtgtcaggagcccaccttgtacataatcattattatcatcatcagcatcatcatcatcatcatcatcaattgtgacctgtcgcagaggaaaatggttggatatctattacctttttctttttgtagagacatcaacaaacatcaattataacaacacatacacacacacacaaagcttttcgctaattcaaaagacatagaatctaattgcaggcagtagaaaccaagcataggaagttgtacgagaaaacaagaataaaaaacaaatgcctcactcctcaatagtgttaatatgggctaatccactccatttatacttaccccatttaagacctatctcatttactctaaacccatttaacctcatttaagtttatatcccatttatctttcccatttaaattattaatgacccatttagacccatataacataatataattaataattatttaaatacaaatttttatgaatgaatggatatattgttttggcaaaaaaaaaaaattcgcgagaaaatacggattttacggttttgacgagaaaacatcgatttacagcttttggtgagaaaacgttggtttacggttttggcgggaaaacgtgatttttagtttggacggaaaacacctttttgtgattttggcaggaaaacattgtttacggttttggcgagataacgtcggtttatggttttggcgggaaaacgtgatttccaatttttgtgaaaaaacacttttttgtgattttgacaggaaaacgtgattttaaattttggtgaaaaacactttttgtgattttggcaggaaaacattttttacggttttggcaggaaaacgtggttttacggttttggcggaaaaacgtgattttcaatttttgtgaaaaacactttttgtgattttggcaggaaaacattttttgtgattttagcaggaaaacgtggttttacggttttggcgagaaaacacttttgtgattttggcaagaaaatattttttgcgatttttttaccggaaaacgtcggtttacgattttaatgtattaacatattaacatttttattaaagataactaatataaaaagaaaaataaatagacttaattgggtacccatttatttgggtgaaaccccatttaataaaaatgtttagttgggctaatccatttaatctcatttaattttttccctaaatgggtcaatttcttttacacatatccagtaattaaatagggtttgaatacccatattaacatcactactcctgaatcaaacactacaacattttcagagtatgatcgacgaataacgaagtcatatactcctcgatttttccttcatcaggacgggtaaatccttcatatccattgtaggtgacgatgatcatgcgtgcaaaatccatggtttccctaagaacataatgtgacacgcaagtggtggtcaagaactcctcatttaatgtcttatgtgtattgacaaccattttacgaagctccttaaaagcttccttttcagtaactccatattgcttcatataacaattgacagcattcacgacatatcctctactcatgtcatcctaatcaacatatgtgtaataagttggtaagatggaacaagaaagtagacatacacgaaatgtgaagaaatgatttgagcatttttacctcaaaaccggctatatcattcataagacgacctttagtacataaagattggacgagttttggcctagattttagccactcaaaagcttccttagtacccgtctttcccatagacattaaaatatatgcaacggtcacacatgcggtgatttccatctgtccaacttccatgtacttctcaaagctaggtacgtgagacacttgtgcccattttgccaactcaacgttagctttcgaagatgcctggaactgtgcatgcacaaaagtattgagccgttacggcaagaaaatgttgtttttcaaaaacattttgaaataatgaagtagccatgaccctttattttataatatattattaacccataaaaatcatttcaaagccatgagacaatatacattacccttcattaatatatatatatatatagtttatacagtatagataattatgtcctcgtcttaacaatactcaaaaacaagagtttggttggttacctcttcaattgtgtatttcacactgtaagatcttccttcggggctaagttctttttcaaactcttggaaagtatctaatataaccttcaatacggatttcaaatattcaggttgtttgtccatggaatgatctggagcccacctgtgcatcatcatcatcatcatcatcatcatcatcatcataaccgtgaaagatcatgatcattgtttgatatggaattttaataccttttcaagctgttgccgaggctttcggcctcagaaatagatgcatatctgtcgaatgtgtcatcctgaatccccagaaggatgaagcccttagtcaacaacatccttgcacttgagagttgtggttcgaagaacaccggtaacacaaagaaataattttcgacgcatctgtctttgaagtaaggtggaaacttagatggaaaatctagcttcttgtaccatcttgcatccaaagatataaatatgtggttagaataactttttaaacggattttaagtaaaaccattgaaattctagtaaaaatgaggagattacatactttgtaaggattttgagatcctgaaggtatatgagcttcagatacttgaaactgagcttagcaaatttgagtagcatctcgtcatggtctttttcttgttcatagaatggtatgaaatccagtgggactaatacctcaaagttccaatgctgacagatgctaagagcatttcgtatacgcgctaagagatgaggtgggcacgttccagttgcaactaatgtctccaggtggctcgatgtaaagatcaatgcttcgtccaatatgtaatcttttgttgtcgccaaatgtgcagcttcatacaagctcaacatacccttggcgtctccgataagagactctttaaaacttccattgctccctttgaatctttggaatacatctattgaacaaaatggatcaagtttttattcaaaataattagagttaaacgtcaatgatgattgaaaaaacgtgggtagagactcttgtacctgaagatatgtagtgaccatatcttctgaaaacccaaaagatgatcgaaactgtgtacaaatcttcttcaccggccatgatcttctctatattttcgaaaccctcttttagagtctcatatatctcttcctcgaagtgatatgcaaggccaaggctcacaaacaaatatatcataaggattttcgtctttgtagagtcactgccttgggaagacatgaatgtgtttttcactttcggctttagttcatcgatctcttctttaagtgcatccatttcctaaacagtatgtacacatgcattaatcttctccacatctatatacacacagatatgtatcatggacttaccgagatatcaaggggaatcgagtggaagtagtgagtccattcagaaagtggtaatttcttgaacttgcgagtacgttctttatcatcaaatgtcagagtattagtggccttcaaacgaatacgctttataggcttaccgggaaatgacgtcagaggaaagccatagagttttcttaacggaaataaattggtcgtagaaggaagagaaaactgagatccaagttttggcctaaaaactgatgtggcttccatgttcattacaaatgatatggaatcaattgtcaccatcaaatatataggcacgaaaaaaaatatatatataggcacaggtactagtttgccagactacaatatcgtggtgctttttttttcagccaaaatatattagaattgtttatatatacagaataaaataattctagtatatgagaatttgttttgtttttagcaaatgtctgccatgtgactcgaaaaagcgaggaaaaactattattgattaagaaatcaaaagaaaaataccttctcaacatttgataaccctacttaccttttgcttatgattcttcttttttttacttggaagaaaattccggtaatttacggataagattattgaagaatattttcaaatctggggaatatgaaattgattacggcgataatgcaaatagaggtaaagattttaagaatactgtattttgaaatgagttaaatggaaatataatacgttgtcaaacttattgtagtctagtggtaaatttgattgattatattggcttttttttcttttctgtttttcacattttgattatattgtcttgaatgtgatttccactaaaaacaaatctatatatgacatatttggtaggtgagattgagtttgttttggctgatgactaattttgtgggttgctttttcgatgaattccgttcactgtgggattttatgtgatgtcagaatggttgtgttgatctagtccttgaattttagcaagttgaacctcctcctttcaatttgatgtggaaaccatcacccaagatacattgtttgtttttgacatatttggatcgataaggcatgatccatagcccaatttatgtcaaaatttgtttctttgttaacaatattaaattgaaacggtccgggtgcatactccgatattctataaatgtagtgtcataatcaagagtaaagtcttgtattggagagatcaatggtattagccttataatttatataagtgaaatataaggaaaatgattattttttctactcttatactctcattcatgtacattgcaaaaacatactaatctgaaaggaaagatgtcagattagtatgcgccattaaataacttaagcgccattaaattttaaaagataaaaagtaaaaagattttagtattgtttatatcagtaggtgcaactccgtttgtgcttttacgggtcatcctataaggttcctgcttaaatatataaatacagctatgctttcttggcctgagaattaagtggacacacctataatactcactcatcatattgtttagataattatagtgtctcatatcgtgtaacatgtggtgttcaataaaataatagggtctaatcacatttgatcgtggaagccctcttgatccattggttgattaagggtttactaatacttctacaccaaaaagtttggggtttgagtcttaagtattacgatttatttttagattttggaggcaagagtgcaggagacctccaacgatgtacaattatagtcgtttgccaggattctacgcagataaaatcattaaaaccaaccgtcaagagcatagagaaagaaaaggaagtgtcgtatgttatgaatctaataagggtcggaataaattgtccgtaatacaatcgtctatgtaacagttctcataatttataacaaataataaatttaagacggcaaataaaaaatcacatttgattacacaataattaatttattacccaaaaaaaaaaaaactaatgatatgtgcctagaaatcaggctaggacacttacatgaaccatgaaagatgtatcatattatatgtagatacttgagctcccatatatgaataaaggcaaattgttcaataacctaccgacacaaaattatttgctaaagtagatatacataacggactaacgaagtgacatgataaaaaaaacttgtagcaagagaacataaatcttttgaatttcaagaaaatatcacctactgactacaggtgcgataatagtaatacgaacaaaacatactcctgctgatttaactcctagaaagacggatgactattagatatttatttctatattgttaccaaaatagaaacaatatattggcagcactataactattagatatttatttcattaaaaagaataacaaaaataaaaaaaaggaaaagaaaacttgttttaaggataccattattaaagcatttcacccaaaatgataacaaaaacacagttatttttaggaaacaaaaagtaggcttagtgaattttagccgagaagttgattctagttgtacactaaattgtgaatgaagctaaagatggaaaggcaattaaagggaacttgtggcaaacttccataccggtttgtttcagctagataatactcatcaaccatcatcatctccaagtggtctagtctcaactctccagttgaagcggtacacgaagtttgccaatcccacctcaattaacattgttgcaaaatctatgtcaggacataaccttcttcccgatccgaatggaatgaagttgaaatcttgtccttggaaattcagtggtagatccaaatgcctctctggcttaaactcttctgcatatggtccccatttttcggtatctcgatggatggcccaagcgttgatgaatacctactcaaccaacatatgtgaatgtgatatatattttttctatatagtttacttatcaaatatgattgtttggtttcgtggtttcgataattatcattgtgccagccggaatgatcatatcctttagtttgacatcttcactaagctgtctgggaattgacaatgggcctggaggatgtagacgaaagacttctttaatcacagcttttaagtatttcatgttctcaacttcttcttctggtacatataacttattcctggaatatgtttggatctcttcttggagttttttcatagattctggatgtcttacgacaagtgtcattgcccaatcgatggccgtgaaagttgttgtcgttcctcctaggaagaattcctataaaatatgcacaaaatttcatgtttattaacattgtgactaatttaaatagagtgagtttctaattcaaaggatagtgttgttaacttgttatgcaaaggatgattagtcttaattaccaaaatgatgagcctgatgtcgcttctttcaagctcaaattcgtttgtcttctctagttgaatcttaacaatatatcaacaaaatcaaatgtctctttgttctcaccttcatctacatgttcttgcaccactctctctagaaactccacaaaagttttgcttacttcctccattttacgatccaagccgcggactttatctatccacgccaaacccggtatgtaatctccgacaggaaatgcgcctagaagctccatgacttttctcagttgattttcaaaatcgctagtgttttcctcccggctatattttcttcccacagcaattctacatatcacatcgtttgacatgttaaggagtaaatcacttagatttaccggcaaagaagaagaactttgtttctcaagcttccccatatcactgatgttatctcttcttctcttactttctcaaaggacctaaccatttgcctgccgaggagatggacagtgcataaactcttcactcaaagcaggttttatgttttaaaaaaacagatcagttaaagaaattttaaatttattaataacaaaaaaaaaagtttttacatagtttagcaaataaataagctggtaatcaattacaaagaaacggagagagccaaaaacagaatttgaagataaaattatttggtgcttcttaggtgaacccaataacatcagttaattgaaaaggtaaattagtgtgaaatgtgagtcttttataatccaactagtttctagtatcaatcagttttataactgaaaaacctgactcatttctggcttaaatacaagaaagggttccagtttgttccaatgcgaatttaatcatggctggtcattatagaagcctcaaatcctaatcttaggttcatgatccttaaagtgtaattaataacataaataaataaattatataaaaaagagtataattaaataatatacaaaaaaaaatcataccttcatctgtctccaatattcgccgtaggaggagaaagccacatctctcccaccattaataattatatcgacagctttggttttgggacggttggcaaacttaagatcgtgtgttttcatgacgtcatgagctacgtcagaggatgatatatacttcgagaatcgagggtagggacacgaccgaagtgaaggagcatgagcggaccataggcggaggctgagggaacgaaaggagcggtgagggtggaggctgagctggtggaggtatccgataaccggaagccgccagggagagggtggttggttaggtttggtggtggtggttcgtttgaggagtgggtttaggaagagaaaggctaagaaagtggtgaagcatagagagatcaatatcatttcgtcctaacttcttttggttggtagcaaaattataagaaaaaaaaaaattgattggtttgatttgaaaggttattatataataaatttatagctttattcataaaataaagataaatagcgacattagtctacatatgcaaacacacccaattacatcatgtaacaactaacaagcacacataggtttacttttacttaagaagacaccggatctatgtagaccaccaatatcaaattttgttatagaggaacactaaaacaaaggccacactcaatgatcattcttcaacagatgaattggacacgctctctgttttctcatcaatgtgtgtgcgcaattgatggaaagacaatgagaggaaacttacgacaaacatcaataccagatgcttcagctagatcaggcttatcatctcctactggtccgaccttgagtctccagttgaatcgtttcacaaggttggctagtgccaatttggacaaaaccaaagaaaatccgattccagggcaaagtcttctccctgctccaaatggaacgaatttggaatcagtacgttgaaatccaaattcgtaccaaaatgtctctccggtctatattcattggcatcaagcccccatatcgcagggtttcgttggagtgcccaagcattgattatgacctgtgttccaagtcgagcacatttttacatttaggtttactcttataagaattttaaaaaagaaagaaaaaaaaaacgtttacatgtgtccctgcagaaatgtcatatccctttaattggacatcttcacttggtagtctgaacaatagtggaccagagggatgcaaccgtagcccctccttaatcacgcaatgtaaatagttcattttctcaacttctttctccgttacattcaaattatgtgtcgaaaatgaattaatctcatcttgaagttttttcatacactctggatgtctcataagctctgtcattgtccattctaattgtgaggcagttgttgctgttccagagaaaaacatatcctgaagaattaaccaaggaaaaacaaaattgatttagctatcgattgatacttatcaatttggttttagtccaaattaataggactaatataagaaaaacatttgttttaatacaagtaatttttacactctatattgaaaactttttctatcagatgtctcatatgttttttacaaaacaaaaacgggggaaaaattgtttttgttttaccaaaacatataataaataacttatttaaaaacatttgacatcatgtactgcaaattcatttttctggaaatatacaaaacgaaaaggggtggcttgtgttaccttgagtatgagtattaagtcacttctgtcaaacttaaaccgtttggttttatccttttgaatcagtagcaacatatcaataaaatctgatggctctttgtgatcggcatcaacatgttcttgcaccatgctgtctaaaaaacaatctaacttgttatttatgtccttcattttatcatctatgccactgatccagtctatccatgccaaactaggaataaaatctccaaaaaagaatttgccaaaaaactcagaggatgtcatcactaagttcttgatatcgattccaccttcctcttcgttatattttcttcccaaggtgattctgcatatgatatcgttggtaagagtcataaggagtttgcttagatttactgatgaagaagatgaagatgcttcttccagcttctctgtcattactttgatctcttcttctcttaggttctcaaaggacctaaccattttgttattgagcagatgtaccacacccagactctgcaagcatcaccagttgatatattacaatatatggaacaaaaattagacgtgtaacattagaaacactcttttattactaagaaaaaaaatactcttttatcacaaaaaaacaaaaaaataaataaaaacaaggataacttctctttaaaaattttttttttttgggtcaaattctcttcaatatattcaaaaaaaactaagatcattttgatgtttggaaaaattcacagtattgcttatatttatacaacaaaaaaactgtaaaaatctatctaaaaaatatttccattcgttaaaatatttatttccatttttattcttatttaattttcttctaaatataaggtgtctagattttaaatatataatttcatttttgaagaaatcttaaaatcgcactacaaataatattaaatttttaattaaaattaaaatccttagataatacttatttagaattaataaaaaagctaaaacgacagttgttttgaaaaggatagagtaataaaaaaaaatttagaaacaatcaacttcaactcgtatgaacttaccataaactttaatactatatgatacggtaggatttgaaaattatatatatagtctattttctatgatgatcaatcatataaattcctcccatataattttatctaaaggggaatattatgcatgcatggtaattaatagaatattctatgcaggaaaaaaaccttcatactcttccaatcttctccgtaggggccaaagattatatcacggccaccttccataaatatattaatagcttttgatttcgggcggtttgcgaacttaaggtcgtgtgttttcatgatgtcattagtcacgtcaggacaagaaaccacaagcacaggtacacggccgaaatgaaggagcatgagtggcccataccggaggctgagggaatggagatagcggtgagggttgggaccgagctggtggaggtttccaatcaccggaagccgccatggagacggtggtaacttaggtttggtggtggtgattcgtttgaggagtggttttaggaagagaaatgctaataaggtggttaagcacaaagagattaatatcatctccatattgtgcttatttaggaatggtgtgatttgagcatatctctactgagtgttttatagggtttaggatcgcatcgttttagctggcaaatcaaatattaaaatagatggttctcttaagtgggttttgggtaagtggcgaatttttagattctccaaagattttgcgttattaagccctatagttgaaatctcgcttgggaaggagacaaatttaaaaaaattctcgacggatttggccaaaaactagtccaataaaaatacttaaatagtgacccaaatcaagaataaaagatgccccttttatagttttagctttcaaaaatatgtatattatattataatattttctgataaacatttttagtaaataagtaaaaacatcggtgacccttcctcatatataatcactagcattatggctcctgctatgcagggacttagttttagtatatattttaaaagataacaaatatcaaatttagttatctatatacatatatttgaacaaatatggataataggaattaactcaagtaacaaacataatgactgaatttatatacttacagaggaaacatagatttagttggatattagcagtttctcttgttagccaatagccataaacgatcggatgcacataccattacaattccaaaacaatcttctctatttcccctaaaataaatacatgtgaactctagaaattttgaatcacttataaataaaagtctgtcaaagagatagaccaaaatatcaataagaaatatctggaagagattttgtcgttgaatatatctgtatttgtatgcatgtttaattaccttcaattgctaatccagtttaagtataattttgatccaaattccagcaaatagtatctcaaaagaacagcaaatagtatctcaaaagaagaagaaaaagaaactaattaattatttatgtgtttacgggatgaaaacaaaagtattgtcaacgaatcctaattaagagaacgtgggattgtgggtggaggagatggagaaataaactttcgaaacatttttttaattaattaattgagaaaattctaaacatgcaaaagtttggggtattgcttatgtgtcaaatagatagataggcagtttctactaaaatgactgttgatttagtattattagactattataaaagaaaaatggcctataactttttttaaaagttggtgaccctagtccttttaagcaacttgtcttccgaaatgggttgctataatccctcgattaactttaaatggaaaaagattgttctttcttttaattttttgacacagaaatatattgtctgccacaaaagtaaaactaaacactacgctaaattaaaatataaaagagataaattagagtatggaacaaaagaagactaagaaaatataaagtaggacagaataatgggtcaaactatcgcgtaaaccttccatttaaagtagcctgctactaaagttaaatcgtgtttattcttagatgtgattttcttatcgcattaattagttggcaatggcatatatcaaaatgcagttttgcttttgttgttgtcatcgtcgtcgtgaactcaaagtggattagcattagaaaatgaagaaaatctgataaattagataacattttgttgtgtagatatgttgaaataagattcacacatagtttcacgtgggttctcaattcgtcgaaaagcttgaaatgttttggagaagaagagtatgaaattatatttcttgctaaagtataacaattacacttatatttatagaaaacaacgaacttatatttaggtcttaaaacagaccaagtttttgcagaggagaatcctttacaccgaaccccatcaatgtaccaaccataagaatcttgctgagagttactcctatgaatataagtgtaattgttgttttcttaatgtggattgcccaattggataggttaccaacatgtatgcgtcttgtggcttggggaatgaacattcccaaatcatgttgtctttgtaatgtgcatgatgagacgagagaccatctgttgttaaattgcccttatagtctttcgatggcgcagagccgcctcggcatgacgtccatggtttttgcttcttgggcagcactaatatcttgggttaagggttcttcaaatcgttcgcctactctgcttagaaaactagtagctcatgctatcatctatgggatttggaagcagagaaacaatcttctacacaaccaacaagtcattccctcctccatggttttcagagaagttgatcgcttagtgcgtaactcaatcacggctaggagaaaccgtagaaagtttgcaagcttgatgcagctttggcttcaatgaggatttctttttttctcatttgtcttttatgccaccttgttttttatttcttttttggcaaggtagtaaagtataggtcaaactctttttgtaacgcctgaacatttcattccttaatgatatttacaagtttatcaaaaaaaaaaaaaaaaaaaaaaaaaacaacgaacctctaagcaaatggcacttgttccaagcacattatctattactttagcgtatattttttttaactttcgatatgtaatcctgacatttatttctgggatgatgacttttatcggtctatcacaaaccatactccattcttgtgtccagttaaacatattttatgaacttatggaatggtgtgggagaattagcttcttaaatagttgtttgaatcaaaattggttgaaagaatatcttctaatactttcatattataggaaatatatacaaaacattgtataatatagcagacggtttattattaaatcctcttcactcttaagtcaaagaaaaagcttatggatgtttagatatatgagaataatatcattttttgtgtaaccaagtcaagaactgattgacaagtttttgaacataatggcaaaatacatcgagatgagcatggagactactttgttgaacgttaaaagaatatgcaataatataaataggtgaggttggtagatatttatatgtgttactattaacattgatttatgaacataataacgttcgtatcgattatttggatctttgatatggtttggatcatatcatccgctcgaaaatagaggcaaagcatagggataaacagtagtccatataatagtcctctatgggcttctctaacgctcacaatatttggaagtctgtgggcctcaacaacccccacgttctagcataaccattatgttcgtattggttgaaaaaatgagagtttttatctacttccaaatgtgcgatacatcagtcctagctaagataacatttaatttcatctttttcttaaaccggattttcattgatcaatattttgtttctttaacatattgattaccagcgtttttggatttccatgaataaaggataacttggacagtactgaagcttacaaaggaaaatccaaaaacgcaatagaccatgtaatatgtttcgtcttaatcttacactacttgaaacttcaaataatagagaacaattggtctattattgtatgaccgttaaaaccaggagcagtgaaaaggcatgaagatgtttgtacaagtgatgaataaggtaacaacagatggaacaaaaacccgtctattccataagataatgtggcacaaataaatgacatggacataaaagaagattaatacttgagtgtaataacaatcgaaggctcacaaatatttcctcatattgagggttttacacgtcaaggtctttgtaaagctcgaatttcatcgttaatcggagaaggagctgatctggaagcaatcagagagttaggatcaggagaagaaacacgatatctggttttaacagagagttaggaaagtctctgataccatattagagaatcaaactaaataacacttatttcttattagtcaacaaatgtgttacaatcgaagtttatatacaaatcataacgagacttctccggataatagactatcttaaccggataatggaaatcggaaatgtgatattcaatgtgatatctaatatggaaacaagagacttgcgtgttttggttagtttcgtgtgcttaggattgtaatatcctttcagaaactttgttaaactagaaattgtacggtagaaaactaagtatgtcttagtgctttaacaaaaaaaaaaaaagttagtgttgtttaaaaccgatttaataaaattggtaaggcttgcttgaaagagttttagtggaaaatgccaaatacatatcgtatacattccgtgtgatttatcaaatctcttagctgctgttttaacatttgaccgtcgtgagttggtcatcgttttcttagtccaacccacaaaatctgatagattgacgtcaaaaaaaaacatgataggtgtctattaataaataaaatgtcgatgaacaagacatcgaacatacaagtattgtgatgtatgtatatatacgtgtgttatatatgtgaaaaatgattaaatgaatgatatattgatatatcataagatcttgtataatgagatggttgtccattgttttgttcatcaaagacaacagatagtgaaggcaacccatgtgcatgtacactgtcatcatggccaccagtgtattaccatttcgaaaaccttataagttgtattcttaattaattacgataaataaagatagcataatgcatagttattggaaaaaaaagatatataaatgcagccgtcaaatttgtttttattttgtcaacgccgtcaaacatatatatacatacaagatcatgtgttttttacaagataaaaaatctcttaatttttatataaaagactcttagcaacctaattaaataagtggatcatcttctgattgattgttaaattaaattaagttatttgatgagtacagaactattaagaaaatcattgaaaaataataattataatatcgtcgtgaaccattgaggttcgttattttgttctctttatatgaagtgaattaagagtgtaaaccatgtttgatggcgatttcctagtttgataaagatattgagggtgggatgtttgtcttgtactataattaattatctgtaatcattttaatttaatataatttttttttgttttttagacagcctaatttctttcaaacagctaagccacgtgaaatactttccttaacttttcagtaagttttaactattttgatcattcggttttaaataaaaaccagtggtgtcaaactatcaaacctgatcaaatagtttcaaacctattttttgactaaaatcaaatccacaatttggttaaaactaaaaatatctcttcatagaaggatggaccattgaagaatactttctcttttctatttttatttgatttagaaaatcatattcattacaaaaggaaaaaaaaaataattttttgtatcctaaagttataacttacaattttccacacttcagtttggtagtattaatttatctatttttatcaaagtttggttttaggaaaaatgtatcttttcatataaaaaatatatagatcttcaaagaaactgaattgggttttcaactattttatcgtttgacactactttgacttatcaaaaagagttcaaaatagaaaaatagaatcgaatcacacgtttcagtgtaagagggatttgatattggtcgacattttaaagagttgttttgtttttttttccaatctgcatggtttttcgttccgttgaaccaaattcaacactttgtataaaccgaatagtaatatactagacgtacgccaataccaaaaataaaattaaaactcaattcacaaattgaatctacaccatatcatgcatatatatcagcaacctagaataatcaatgaaatttaatcgaggataatcaatatccaactcaacgataatcaaaagcctaataatagatcaatgaaatcaaataactaaacatagtaatatacattgatttgtgttaaacagaataatatacattataatagtatgaaaatatgaatataatgagataagaggcgtatatgttacaactacagatcaccatccacaattaacaatccgattggtgcgggccattgtttcgatatttgccaactgtgattgatgtgactgccagctggcatattttcccctcctgattacgtttttaccctttcctcttctgtttcaccgttaattcaattttactatttgtaccgctgtctttcaccttttttaagaaaacccaacccgaaatcataactataccgaaatcacatgtcttcatggtgacgtaacaagacttattttccggttgaatttggtttaacctattgagattgtgctaaccgaaaacagaaacggttatgacgccaacgaggcaagaggggtaaaacgagaaagaggggatggcagaaatcgtaattaacaaggaaaataaagggtggtttcacgataagtctgtctatatgacgcgaaagggtttcttaaattcagagagacaattaatcagtttcgtgtgtttggagaagaagaagaacagatcaaatacgaggagagatctctaaagagatttatcgtttcaagtaagtctctttatcaaactcttaatataaacaaatcaaaacatgaacacgtcgtgtcttcgtttcgattctagatacgattttttagttcatgtgaatgaactctgttttattactactagggttgttcaatatttttccgagaattaccagaggaacaaagttagtgattatattgatgcagagtatgaagtaattatatacataaatcatgttttgttctcaagcatctacgttgaaatatatataagaagtttttttttggtgaaaaaatatgtatgagaagttcatctttcataatagtgaaacaactctctttcataccaaaaaaaaaatttgaaaaaaaattagtgaaactctctttgtccgattaggttaggtttggactcagaatcaaaatacgattagcataacaaattttttggcatggcaattattgtctgcaggtaaaatataccaatagaaacatatttttaggagtagttaagattatgattgaagaaatactattacgataagcataaaattttcttttgctgttcttggtttttgtcgttttatagaacattgaatatgtacttttgttttttttcaccagtagatatgtactatacacacataagtaacatgggtagtttatatagagagagatttgatttttcgtatatttcttttgttgaaaataaatatgtgtaaaatttattgtttattaatttgacagatttgttcacgttgagaagtttaatttagattaaacaacaaaaagatgggttactggaattccaaggttgttccaaaattcaagaagttattcgagaaaaatagtgctaagaaggctgctgctgctgaagctaccaagacctttgatgaatctaaggtatatattactattcacctaattattctgttaattatgtagttataggtcccatgagtctccattatttgatcattacacatatgcataggtgtttatctacgggttggagtatttgttaattagttttgtttgattcttaaaaacaaaaatagaaaaagggaaaatcaaacaataacaacgtattaattagactttagcactttagttttttttttgtcctgcaataattatccactcaagagatatttattggtagtaattatcacgaaacttgatttttatatgtgtttgctaaaatgggcacgtatggtgatacgtataataggaaacaatcaacaaggaaattgaggagaaaaagacagaactccaaccaaaggtcgtggaaacctatgaagccacgtctgcagaagtcaaggtcgctatcatcttcttttttgttctccaagttacattaagtaattcaaatccatatttactgtaattaagactaaaattaaaacgagcaggctttggtgagagaccctaaggtggctggtttgaagaaaaactcagcggctgtgcagaagtacctcgaggagctagtcaaaattggtaaagattcaattacgctttgtcatgtgtctattttaaaatatcccgacaacaatatatgcttgtcttatatatttatcgttttttgtcttatatatcaaatatttgctggcaaaatttttggattcttatcatgtcctatattcttatacgcatgttatatctctagtttataagtcatgcatatatctttcatatagtataatcaaagttatttagcttgtatattggagtatttattatttttctatgaacatattatatcattctcattcaactagacgtaagtttcattcgtcatattcactcactttttgtttatggtctataatagtggttctctatggcttatttatttatatgatcttgcctaagaaaattggcacattcaaaaacctcaaactattgtggatcaaacttcatcatctttttcagaagacgtctagagattgtattggatcactgtttcttttgcatgatttataattagatgaacgttgtactcatctatgtctcaaattatgaaatgtttattcagaattccccggatcaaaagcggtgagtgaggcttcgtctagcttcggagctggctatgtcgcaggaccggtcacgttcatattcgagaaggtatctgttttcctcccggaggaggtgaagactaaagaaataccggtggaggaagtgaaagctgaagaacctgccaaaactgaagaaccagccaaaaccgaaggaacaagtggtgagaaagaggagattgttgaagagacaaagaaaggcgagacccctgaaaccgcggtcgtggaggagaagaaaccagaggtagaggagaagaaggaagaggctactccggctccggcagtggttgaaactccagttaaggaaccggagacaacgacgacagcgccagtggctgaaccaccaaagccttgatttgttttcaagatggtatgattacttctcttgtatgaaaacatctttgtacgtaacaaaaaaatgaaaggaagaaacggaaaggaacaaaaaaaaaaaacttatttttcattcttttttttcaatttggtttgtctttgtgtggataaatctctctgttttttttttaattattgggaaagtctttaatgtgttatttatttatattcatgtgaatttgtaacaaaaatattttgtggatgttttctatagatttattgtttcaactttcaaccaagcttatccgattcaaaacgttctgatatatcttcatatcaagtgaatttacttatctaatatgtctctacattctcgttttcctcatctgtgatcttatgtacacttacaagatttgttaagttttttttcatcaataaaactactgcgaaggttcagaggaaatttacaaatctaattagcaagtaaaagtttgacaacaacaacaacaaaaagaaatctgatgatgttgcttatattatttttaattagtggattagcagcacactttgtatataatttttagatttataataactaatggtggaaatttcaattatatatttgaatttgttagatgtctttaggcgaagaaatatgatttgtcttcataaaggggagagcacatagatttttttaagatggttgatacgtgcaagtaataaggaacctaaattgcagaccaagaaacatataatataaatgcaacaaaagtttttaatttcttaattcaaatgaagtggtaagcaacttataaatcactatcttgtatcttccctctagaatttcttcttattatcttgagtagttacgcaatattccactattatatccacggtagaagaaatcaaatcattttcaatgttagaatttaaggattttcatggtttgacttgaccaattcaatttcttcgctctttcttttattccaaatttaatccattatatatccttcaatagaaatcgaacgcatgttctcatcgattatgtaactgaacatatccggatgtggaacagaactaaacccgaaccgaattaaccagttagcatgttcaccgtcaaaatacataaaccgttcatcactccttctaaaccattttcttaatgaaaagagttatgaatcttgcagtctatagtatcttggaccggagactaagtagtcgtctcgtctactttccacccaaaaaaaaaaatgttctaaaattttaagctcttccttctatttgattttcaacaaaaactggccttgcgccttgcgcgtcatatctttcattttcaactgaaattatcaaccaaaacattctcgaaacaacttcaaaaattcttgttaatctttggtccatatatttacggcttcggaccaagccaaggctgattcctcattgtcatatatatcttttttggttcagtatgtaaagtgacatcaagaaatctttacgttgtttaacagtttaagtagagtatgtgtaatgcattgcagaatttttgtgaaatatcaatgcgttgatcccaaagttcttttattgtctaacaaagtaattaagggttgtcttattgtcatatatgttgatctcagaagcttaacacacaaaggaaaactgaatagttcgatggtttttattatcacaaatgaaagggctataaacagcctagagctgaagactcaatcttctacaataactagaaacagagaatataggaagcacgactaactgaagcgaaatgctaggactacttgttgactccttatacatcggagattatgcaaattaaaactcggaaacaaactaagaacaattcaaacccaacaatataattccaataaaaaaacagagtatgtagagctaattcttgagggaatatgcctcttgatatttctttaagttctcaataccgaccaaactttatctgcatgcccaatcaacttccatgtgcttcaaatttcctatacgtatatatgccaataacaggagtaagcaaacttatgaacacttgcctcttctgtaattcgacaaccactctgaaattgaggtgttgatgagctaagaagcctagaagtacatcaacaacattgaactaatcagttttagtctataaaatagataaattctatgttgatattcaaactaatcagtttttaggcttaaaatggataatttccaaagtcaaaatcctaactaacctcggtgtcagactgaacaataagggtatgtagttggtggaatttggccttattttagatttacatagagaattctaactattcgaactctgccactggagctataatcatggcattgttcattaacctcatagccaacatacaatgatacaagtagaattctgtattgccaaatttccgaaaactcaaacagttcttgagcacatttcataaaacaacggacctttcattgcatagacttatcgtacggacctcaaaccaccacagcagagctaaatcatttccacagtgaaaaaacacattgacaagtgaaggaacaagaagagatttcaccaaaaagttgagaataaactggatcatctaaagattttgatagtttcaaatagaaacttcacactaaaatgagattgtgacttgcgagcctaatcatgaactaatcttacctaacacacaacaatagaaataaaaagtataaagtcctagggtttagaacagagaaacagagttgctagcaataactagatttgtgaattaagaacttatcttcaaggacgaaatttgagctccgaaacaaaactagagatagctttattactcagttaggacaatttaagagttttttttttctctctttcaaatcgaatagagtttagtaataggacaataggagaagattttgacgcaaacccaaatcggattcgctcggcccaattatgaggaatgttttttttctttttcttttttttttgggaatccgagaaacagattatatattaagagaaaattaacttactgtaactagacgaattagaaattattagaaaaaattgaaattattttattaatgatgatatatatcttttgttgatttcagaagtatttctattgtaaagaaaactgttggtaatgcgtaaaaatgttggtccattgtattattttaaaaagttgattttctaagaaagtgtgaaatgcacgccaagtaaaagctcaaaacaaaaagagcaaaaataataataatgcaaaacaaatacatgagaaaaagagacaaagtagaacccatagccattttactaataaagtttttcaatgaaaaaagtagccactccggtccattaagtcacaatgcaaaacccatagctagccatttactgacgaaagttttgctatagaacacatagccatttaccaagaaactgaaaaacaaaagaagccgctccactaaatctctcgttactctaaattacatgcacaacgaaaaaaaatagagatatagtcggagccctagtccctagaaagaagaaaatatatttctttatggaaactttggttcctccacctcagaagaaaatgatggattgggttcttctttcggaaatggtggttggagatgcgtttccagctaagtatatgtggattgatgattggttttcaaatcggttcatataaaatcagttatgttcataatgaagttagatcagtcaaatctatctcagctccaacatatttaacctacatggtcaaaggagtgagccactaccggacctagactatgaaatcaagactttttttaactaatcaatataaaaccaaagatgtcagtattggattactccattccgtgaaaacatgtttagttctcatacacaagtagatagaaccgagggttgtatattcaaattcaaaaacccggcaaataatttacttaagtgtttttagtttctctaatttcattctgaaagtttcatatatatggaagaaaattaaaagtaaaagattgagacgttcattttagaaaaataaagtagaaaaaatcaactggtctttggcttttctttttcactttaggcgagtaaagttgatgggggagggcctcctctttgttcttctcaaattttaggcatcttaataatctaaaaacaaagcaaaatcgaataaactaaaaagagcccataaaattgctaaagatggatagatttgtttcagattttctctgttaaataaatcaacttaaggtattccatatcacacttttccacgccaagtactttcgaagttcaaacccttcttgctatcatatgaaagagatatgtattcttgctaattaatttgtcgactataattttataacccacaacatgaatttcttcaccattatacaacctggaattactttatctattttagatgtttttcttacaaaaataataatttccctttagatcacataccacattgatctgcttccctagtttatctaataaatctgatgagtccttttcatagaaatacatattaaaaatagaaaaggagaaaaacaatcgtaaaggggagattacgaaataattcgataataattgtagattggcatgtacatatactactatctttttgcaggttcatggtgtgaaaacttcgaggagtataagctgatgaaacattgggtacagaaacagaatccttgacagagaagttattaatttctttcttctacgacaacaaaaaaacaaaagtagctgcatgcacaattaccaaagattctagttactttggagtttggtttgtacttatttagtggttggacaaagacaatgcatggcctcttaattaaacctgatggattagattttgattttttagttaatggagcataaaacgttagagtgacataaaggtacgatgtttaatgcagggtaattatatgatttatagctagtacataaattccacccgaaataaaacaaaaatcgattcatgcgttcgacaaaatgataagagtgagacagatggaaatttaatatattaaaataaagtatttcagcaacatgtgatattgtgtgtttcttaattttatattttacgatttctaaggttttcttaaaacccttccaatatttttttgttttttttctttcttaataatgttttaaaattattttgctttattattttatttttctaataatcgaatagaaaaaataaatttaatatggttgcctttaatggactgaatagacattaatcacgtaagaaaaagcattgatcttcaaacaataagcttaaatagtagttattttttgattcgataaggtaatttggttttactttatttgttgtttattaaactcacaaattcattcaaatttggattgcttaagaatgtgtttttcatcttagttcaatttattcaaatttggatcacctatgtagaggatttccatatttctacaaagtacaaatcaaaaggggaacacaacaaatttctatgaattaattatttattaaaaagttatcaacgaaaacgtctcccaagcgtatatacaaaattagcatatgccataggtaaatttaaagcttgaaagtatcattttatttgcaggaagcggcaatttagtaagaagtactcaaagtatcatttaccaaaagtatatggttttgggaagagttgttagggatgtattctttctaaacagatgatatgacgatgttcttgaaaactaatgttaaagacggaatctctggcatcttcactcgggagatatattaaaccgttgattgtagttagccatgtacttagcttagtgcacaaataatctgctgcaagaaatctttttctattataatatctctcatttaaacattagaacatattgtttaacttgttcttctagaaataaaactgctaatttcttatggtaaactattttcctttagattgcacaatcgaactcgaaaatctagtggagactatgtgactatgtttatatatatgaaacctaaatcaaattatcccaataattgggagacacaaaagaaaaattacgaaagaaaacaggaaatcaaatcaaaagataaagagaaggtaaaaaaaggcaagaagcactaatgtttaatatttatagttttctccattaaagaaaaagcgatgatgtgtgttctcatcttttgtgaaagtatatatattgcttttgcttttctcaaaagcaaaagactcatccaacaagaacaaaaaaaaaaactaaagctcaatccaaaagacgaagaatgcattggatactacaacttctttttcacttttctttcaaatttacaattatgattttcacaatacagtttattcaaaaataaataaaaaaacgaggcatgaaaataatgattatcctcttcacttattaagccactcactataagcagagcaactccagaacatagtgagcccccaaaacattaaagcatgatgatgtctaatgatgatgatcttcttcgttccatttctctaaatttttgggatttctgcgaagacccttcttctctttctcttctctgaacttcaagattcgtgtcggacaaatttttgtttttatttttctgatgttacaatggcagacaagatcttcactttcttcctaatcttgtcttcgatctctcctctcttatgctcttctttgatctcacctcttaatctctcacttattagacaagcaaatgtccttatctctctaaagcaaagttttgattcctatgatccttctcttgattcatggaacattccaaatttcaactctctatgttcttggactggtgtttcttgtgacaacttgaatcagtctattactcgtctagacctatctaatctcaacatctccggcactatctctccggaaatatctcgtctttcgccgtcacttgtttttcttgacatttcttctaacagtttctccggtgagcttcctaaagagatctatgagctctcaggcctcgaagtgttaaacatctctagcaatgtttttgaaggagagctggagacacgtgggttcagtcaaatgactcagcttgtgactcttgacgcttacgacaacagcttcaacggatcacttcctctgagtctaaccacactcactcgtctcgagcacttagatcttggaggaaactacttcgacggtgagatccctagaagctatggaagtttcttgagtctcaagtttctttctttatctggtaatgatctccgtgggagaatccctaacgagctagcgaacatcacgactttggtacagctttacttaggttactacaacgattaccgcggtgggatacctgcagatttcgggagattgatcaatcttgttcatttggatttagctaattgcagcttgaaaggatcaattcctgcagaattggggaatctcaagaacttggaggttctgtttcttcagaccaatgagcttacaggctctgttcctcgagagttagggaacatgacaagcctcaagactcttgatctctccaacaactttcttgaaggagagattcctctagagctatctggacttcaaaagcttcagttgtttaacctcttcttcaacagactacacggcgagatccctgagttcgtatctgagcttcctgatctgcaaatactcaagctttggcacaacaatttcaccggaaagattccttcgaaactcggatcaaacgggaacttgatcgagatcgatttgtctaccaataaactcacaggtttgatccctgagtcactctgtttcggaagaagactaaagattctcattctcttcaacaacttcttgttcggtcctctccctgaagatcttggccaatgtgaaccgctatggagattccgtctcggacagaactttctgacaagtaagttgccaaagggtttgatttatttgccgaatctttcgcttcttgagcttcaaaacaactttttgactggagaaatccccgaagaagaggcgggaaatgcgcagttttcgagccttactcagatcaatctgtccaacaacaggttatccggaccgattcctggttcaatcagaaacctcagaagccttcagattcttcttctcggtgcaaaccggttatcgggacagatccctggcgaaatcggaagtttgaagagtcttctcaagattgacatgagcagaaacaacttctcaggcaagtttcctcctgagtttggtgattgcatgtcactcacatatttagatttgagtcacaaccagatttccggtcagattccggttcagatatcgcagattcggattctaaactatctgaatgtttcttggaattcctttaaccaaagccttcccaacgaactcggatacatgaagagtttaacatcagcagatttctcacacaacaacttctccggttcagtaccaacttcagggcaattctcttacttcaacaacacgtcattccttggaaacccttttctctgtggattttcttcaaacccttgcaacggttcccaaaaccaatctcaatctcagctacttaaccagaacaacgcaagatcccgaggtgaaatctccgcaaaattcaagttgttcttcgggttaggcctactagggtttttcttggtgttcgtcgttttagctgtggtcaagaataggagaatgagaaagaacaacccgaatttatggaagcttatagggtttcagaagctcggtttcagaagcgaacacatattagaatgtgttaaagagaaccatgtgattgggaaaggcggacgagggattgtctacaaaggggtaatgccaaacggagaagaagttgcagtcaagaagctcttaaccataaccaaaggatcatctcatgacaacggtttagccgcagagattcagacattaggtagaatcagacacagaaacatagtgagattgctcgctttttgttcaaacaaagacgtgaatctccttgtttacgagtatatgcctaatggtagcctcggagaagtcttgcacgggaaagctggagtgtttttgaaatgggaaacacggttgcaaatagcgttggaagcggctaaggggttgtgttatcttcaccatgattgctcgccacttataatccaccgtgatgtgaagtcaaacaacatcttgttgggtcctgagtttgaagctcatgttgctgattttgggcttgctaagtttatgatgcaagacaatggagcttccgagtgcatgtcctcgatcgctggctcgtacggctacatcgctccaggtacatgactgattcctaatactactttcttgtatcacacgtaacattcaaacttaggatttcagtacttctagttaaaacgtatgattgatcttagcccattttatccgtttcttgaatgcagaatatgcatatacactgagaatagacgagaagagcgatgtgtacagcttcggagtagtgttattggagctgattacgggtcgaaaaccagtagataattttggggaagaagggatagacattgtgcaatggtcaaagatccaaacaaactgtaacagacaaggtgtggtgaagatcattgaccagagattgagcaatattccattagcagaggccatggaactgttctttgtggcaatgctatgtgtgcaagaacatagtgttgagagaccgaccatgagagaggttgtccagatgatctctcaggctaaacagcctaatactttctaaatgcagtgatgttatatatataagagactaaatatatatttttctgttttatgtgtttcatagagttttgtttttagaatttgtaatgatggtttggtggtgatatgagtttatattgaaattgaggaggaaaaaaagggttagcattatatcttcctatcataaagtatcaagcaaaactaaataacatttgctagaaaattatgaattatgtgaaagatttgaaaaaatagataactgttctttgattcatttggaattataaaaatcatgatgaccaaagaaaaatgttgaaatcactcaagcatttgatttaacatatgattatccaatatctatagaaatagttagcatttgagtgtttttactttttagtatccaattcactatcattgatatttttaattttgttgtctagctcgatttataacatttggctagttgtaaatcgttatcccaacattgtattccaaaaaaaaaaaccagttagttattcagtggttttgaactgagcccagcccaaatccaatgatgtggttctcgaaactttttgggttggtttaacaaaaaccggttcagatcttttcttttgatccaccaattgattggactaaaccgacttataacagtcgctacactcctatagaaaagcttgaaattgaacacagtcgatgaattttcctctccgcctggaagattgtggagctcccagttgttgttaacaacggtctagagattcgtgtctcttgaaattcgatctgagtttcaccttcaaggttcgtcaatgatccgtagcaatttgcttcgttctaaaccctaatttgagatctcaattatgtgattttttcgtttaggttttaatcaggaatgaagcattcaaaggatccgtttgaagcagcgattgaggaagagcaagaggaatcgccaccggaatcacccgttggcggaggaggaggaggtgatggtagtgaagacggacgaattgaaatcgaccagactcaagatgaagatgagagacctgtggatgttcgccgtccgatgaagaaagctaaaacctctgttgttgttactgaagctaagaacaaagataaagatgaagatgatgaagaagaggaagagaatatggatgttgagcttactaaatatccaactagttctgatcctgctaaaatggccaaaatgcagtgagtctttgtagaattttgattgttcttcatgtttctttgatgattgattgtttgttgaattcttcagaaccatattatcgcaattcactgaggatcagatgagtagatatgaatcttttaggagatctgcacttcaaagaccacagatgaagaaggtatatatgttatatgatttgtggttatcaacattcttaattttgtttcattgcaaatatgaaccatttagcttttatgttaatgcagttattgataggtgtcactggtagtcagaagattggtatgccaatgattattgttgcgtgtggtattgcaaagatgttcgttggtgaactcgttgaaacaggtaagccagtgcaaaaatttccaatgattttgtttatgtgccaacaaagctcatttactgaacctcaatacattatctgtagctcgagttgttatggcggaaaggaaagaatcaggacctatcagaccttgtcatatcagggagtcttatcggagactaaagctcgaaggaaaagtgcctaaaagatcagttccacgccttttccgctagtcaacaagagccaaaagagaacttatatcagcctaagactggggaatttaccaatgctgctcaaggataagggtctacggcaggtttaagctggcgagatttgcctatcaatctcatcataaaggagaacttctttggcttccctggtggatcatattgttctttgatgttcttaactttgtgtgacaacttttgtagtaaatcaatctttggatacagaccctgaaatggctatcagtcttacggtttggtttttatttggtttacgtttccagttttcattttcaatacaagatcaatctttgactacagaccacatggcctaaaagtggcaatccggtttactaggttggattcggtttcatttccggttttatagaattcgaaatcaaataaaatcatttgtaatccggtttatttggttaaatttggctatacctaaaaattggttttagtattgattcgtttttggtcgaacattacaagaactgggtttataagttcaaattcaaattgtgtatttcttcggcgtgattgaaaaccgtcgcgatcagaattcggtctactgtcaaaattggtacggagacgttttgaatcacacaagttccggcgaaagaggatctagtgggcctgataatgggccgatctcgaaacgaactattacgtgaagagaagaaaacaaagtgggttgcgaattgaaagtctacagaaaataaaaggactggattggaaaaataaaaagaataaaagaagttttgacacaataacgcacccactatctttctccttcccttccgccttccttcttcttcttcttcttcttcatcctcctcactgtttaacgcagagcgcctccgtttcttctcttctcctcctctctcttttctctctacacaaatatttttcccttcttttttcattctctttattcaatataatccttttgattcgctggtgatcggtacgagaaacttagaatcacacgaggaagctgtgtttcgtttatcctcgtttaatcggaatcgaaatttgttctggagaagaaatttaacgaatcatagattcctgatacaaaaaaaaaactatcacagatcggaatcggaaacgtaaccattacataattcgaatctggttttcacttgggtataatgatgaggtttctcttcttcttcttctccgttcttcttctctctgtgttttttccatcttctctgagtttttctattttccactgatttggttttctgttgttttctggatttctaattagtttctatggatctgagtttgattgtaaaaaaacttgagattgactctaatgtcaaaaacttttgatctcctccagatttcgtcttctttggattcaccagtttttaactaatctcaatttgatccaataaccaaattgtttttcgccttttgaacaaaaacaaaataatctcagagcttctccgtcaaattctgatttgggttattttcaattaaaactcagaagaattttgagaagattaactctaaaatctcgcataaaacacagacacatttttacaatttttcacagttcaatcttccttttcgttttcatgattttgatctaattatttttgtgtttttgattaggtatcagagagtaagcccagattgtcttcctctcacaaatggaggtaagaagccttacttacgaccatcaccatcaagagcaacaaacgaagacaccaccaccaccaccgtcattaccacaacctcaatcgccggaagaggatttaacggcggatcatgcacaaccaccaccaacaacacctcatctctagacggagtccccaaaggattccgattcagatccactcaacagcagcaacaacaacaagatcctagtcctagccgtcgcggcggtgatgtactgttacagtggggacaacgaaaacgatcgagagcctctagagctgagatccgatccaccaccaccatcacaaccaccgccgatgattcttcgtcttcttcaggtcaaggtaagatacaatcaaacaaaccgcaaagaagatcgatgaatccttctatgccacctccaccaccagctccgccgattttctcgggccggagtacaaaccctagaaacggtttcgttatcggcaaggaatctttcttcccttccaggtttagcctcaaatctttcttcattcaattaaatttccatattttgatatatttacttaccttaaatgttttagaatcgagtttgatttgtctttttttacctttaatcgtttagattttgttactgtaaattaatccatatgatcgtgacttcattagcttccatatatttctctttttgttcatccatgttatgtgataaataatgtgcccttgtttttatttttatataaagtaaagctatttttgattttcaaggtttgatatattcaatttaaatgattttcgttttctggtttttcatttttgagatctaaacaaacgtttggtttcatcttctgttaaagctttaacgaaagtttggtgatccaaaattcctttttgggaaatgacagtaatacccttggaagcactaagaagcagagagttgtgtctctttttcctcaagtgctcagtttcttaggtttttcacttgttgtttagcttttggggtgaaaaatatataaacgatttttctcaatctaatttttttttttgggttaaatataagatctcgtatttttctttgcctttctttgacccaatcttcaaatctgggctacttgttttgaaatcaatcgattatagatttcttcttattttctgttttggtccctctcttttagttttattgtgtgtgtgtgtctgcgttttgattctgattcttaaatatgtaaatgggtacaactagtttccttttctaaatttcttccttatttttaacacaaggagaaaaaaaaattcattaaactctctcaaagtttatagaactaacctttattataccaaaattcaatcacctgtggatttattaaagctgttcatcatcatcatcaatcatgcacaggaatctagaagatcgatcagcaaacggatcaccatcaaggaacaacataaacggccgtatgatatccagatcgggtggctcaaagcgatctccaccgtcaccagaccaaatcgagaagagatcaagcgttagagatcagagacaaaacgggtttgatcatcaacaacaacaacatcaaagagtgaacagatcagaatcaacggctcagggtcatcaagaagtggagataaatggagaaagagagaaagcaacgcaagagtggccgaggatctacattgctttgtctaggaaagagaaggaagaagatttcttggttatgaaaggaactaagcttcctcatagacccaggaaacgagctaagaacattgataaagcccttcaggtaaaattcattaaaaaaaaagtatttatttttatctcacaagagttaaaaacaaaaaaaaaatcataaatgaaaatatgttttaattaatgtattattgtacagttttgttttccagggatgtggttatctgatttgaccaagaaccgttatgaagttagggagaagaaaaatgtgaagaaggtaattaactttacttaacccttttttcagttcttagttgtgtgataatgacaaaagagataaaagactcttcttaaaataagtaagattagtataatagaagaagaacaaaagatggaatgtgtttataaatgaatctatatataattaacataatatttttatgtgaaaatatgtggaagagaaggtggtgagttgtagacaacattgggtggaccttaatattatttataacataaaaataaaatgtattgtaatggaattcagaaaatggacaagacatgggacctactattccacctaatgtagagaataatgtactgttattgtttaatattgtatcaaataaacccaagtggtggtgtcactctgctttttttaacaaaattgtgaaaatcatttgatcttttgtttatttatgtgatcagtttaatacactatatttattcagtcaaaacctgcatttttagtcttgttttttcaactgagtattgattaacaggaatggaaactgattatatattgaattgtaaatgcagcagcagaaacggagaggattgaaaggcatggagaatatggacaccgactccgagtaaattttttgttccttgtttcattttctttttgtatggtttacgatttctcttttgaggaaaacaaatatgaagatgcacgtgtggcttgcttgtgaagagcgtgcgaagtatgccaacagagaaccagcagagcgagctatcgatcgagaaattactctatttttattttaatatttactcttatttttccttcttttggtttttttttggggggttcctaaattctttttcttttgtttcgtgtacaaaaaaaaatggtggagatcccttcttcataaatcataattccccttttataattatgaagaaaataaaagttctctgtctctttgaagactctttattgcttaaaacctaaataaaattcgataagcaagaataataaagtaataatgaatcttataatccttaaagaagaataatcaatttaatgaaatatttctctgattacgtctaaacgttttgacttcgttatgttaggccggaccggtccggtctgatttgaaccggagagggtggttatgtggattttaatgtctttggccttttggttgaatcaatttttgaaaaaccctcgcttattctactaacccttttcttcctaacctatttgaaatacaattttacccttctcttttactttttttaattttttatttattttttactaccaaataatttattaaaatcaaccaatcatacgcattctctctcttatctcattaatcacttaaatctacaaaaaaaggctggacaactgaaaccaataggcacaactatgttgatggacttctacgaaaacatataattacatactgtttttttttttctttttgattttcaagttatagtcaaaaagacttcagtcatacgcattgcttataatggatactattaaatttttttgtcgtatttatacaaattaatatgttttgtattggtacaactaagtacaacccgcacaactaagatctattcactttgctagttttcagaatattataaaatatgaaaatttaaaacaaaactaagaaaacttaaataatgcatacacaatggtaatgaaattacataattagtttttgacaaaaatcatattttctaaattaatgaaactcttatcacaaaatctaacattcatacactaacaaccttatactttcatggttactttgtatattttaacaaaacaaattaaaaattttaaacacttgtatttagataaatataaatacaccgatacaaagtaatggtattttgatgggggaataccatatgttccacccataaaaattagttttgagttgataacaactagatttattatattctcgatattgtacaactatgagcaaaaatgtgcaaccgagtacaactgtacaactatgggcaatatatttttcagatatttatagatattttttaaatatttgtagataatttataataaaaattagctttatttttttgtgataaaaatgtttagttttttttttgtcatcaaaaatacttaattttatagttaaataaactatttttttccctttcaaacttttttttttcttctcaaaacactattgtttaataaaataaatactaacattcataattttttgtgttttgttttggatcaaaatacgttgatgtgtacattcatatttattttggagttttttttgacaaaaaatcttagattcatacataaactaagatacatagttttacatgagcgtaccagttgtacctaaacgcttagatgtattattttaaaacaaaaagacagccgaacaattgtatataaacccaaaaacccaacataattatatctaaaaatttagccacaattatacctaaaaccaaaaacacaacactacgtaataacttaaacaagacgccttcttcttctctttgtcattctccttctcaatttctttcttctcctccccttttcttctagtttttatcacaaactatctctaaggaacaaaattcaaattcattcgaatcccaattgtaatcctaaaaactaagtcataatggctattagaagaggcttttaaggaacaatttcgattttaaatcgataattaattcaaatttgaattgtaatcataaaaatccaaattataatcgaaatttcatccaaaatccatcattttcaaacaaaatcaaagagaaaaaagatcaaactatcaaatctaataaaaaataaaaccctaattaaacacaacaccatcaatcatcatatatagaatagagatggatttttggattgatagaaacaaatgaaaaggtaaaaaagatggatatttggattgatagaaagaatgaaaaggtaaaaaggagacgaaagattatatatggaatagagagaaaagagtaaagagaagaagaagaagaaacaaatcaaaaattttgtttttgttgaattgagagaaaaataaattgaagatgaaaaaaaattgatctgagaaattagatttttttttctgttgagaagaaaatatctaacattgttatggatttacatctaacatagagattgggttataaataagtgaaaaactctagttttacttgttttttactattattctgaattgaaatagataaataaacatatgttttttataagggggctaactagagaatgtttgaagctgagggggtggagtaagattaaaatactggttatgttacgttataaattaactcatcggctttaatttaaaccataatcttgtaagaaagaatcaaaaatctgaataaaccaatggaaatttcaggacggcgaatgagaagattcaggatgagattccgaagagatcacctcaccggcggcgagaacattgaaaacgaagcctcgtgttgctattgtgacctcaaaatctcgaatttcaacgaacccatcttccgtttaggacgacgattctccggagttttgaaagtctggttctcaatcggactaggattcggcgtcgcttctctgatcctcgtcaccgtcttccttctccttcagtttcactctaaccctttattctccaatcgtctcacttccgccgtatttggattctctccttccacggtaagctcacttaaacaaaaatctcagcttgtgaaaattcgaaataaagctaattactttgattttgcagcgtgtatcattatcaggcattgcctatgtacttgtctccactgtcattacagtttcagttcatgaacttggtcacgctcttgctgctgctaggtgagttcttcaaaattcattcttttgtaaagctcttgcctttttcgtgtgaaccaaattgggttccttttgaagctttactcttagattatgaaattcttaggcttcttctgattgagcggcagtgaaggaatacagatggaatacattgccgttttcattgcagctatctttccgggtggtcttgtagcttttgataatgatgtcttgcaatcacttccaagctttaatgctcttcgtatttactgtgccggtatttggcataatgcagtggttggttcctctctttcaagtttttatgttggtctttgtatataatgagttcttgatttgagtttctttatgcagttctgtgcactctgtgtgttcgctttgtttctcttgcctgttatgttgtcacctttctacaaacacggtgaaagcctcacggtatgattcttgtgccttttgagtgttatgttaacattaataagaatctgtaaaacttcactagtgttttggttcttctataggttgtggatgtgccttctgtgtcgccattgtttggttacttgtctcctggagatgttattgtgtcgttggatggcatacaagtccacaaacctagtgaatggcttgaattggcagcaattttggataaggaaaatagtaaaacatcgaatggttccttgtaccttggaggttcaaggagatttcatcacgggaagggttactgtgtccctatctctctgattgaagaagggtacaaagggaaaatggttgagaaccaatttgtttgtcccggtgatctcactgcatttcgaacaatgccatgctcaaatgcagccataagagaggtatctgtttgtttggatgcaaaggatatcgtcaagcttcaaaaatgtggtgatggatgggtgacaacatcagacaccgataaccaaagtgactgcgtatgtccacaggtgaatattgcttgagaatacccttaagactgatgatatcattgcattttcgaatttttatgatttgatgtttcagggtgacttgtgcttacaagcaatgcaatctccaggcgtattgtggacagagatcacttataaaagaacctcgtcacaggattgctctagacttggtctggatttcaatacctcaaattgtcttggcacgtttgtttttgtcggtgatctgattgccatgtcacattcagttcatttaaccgcatatcaacctcgttggctatttaacttctttggaaagtccttcccgaatatcctagaaagaagcttgacttgcacattccatgtctctcttgcactagttcttctgaacagcttacccgtaagttctacatccaatcccacaccaaatctcataaaaatatcttgtctgtatgatcttaatagcatttgtttctgctaggtgtattaccttgatggtgaatccattttagagtcaagtctccagtcttttacttggttaagcccaagaaagaagaagaaagctcttcaagtttgccttgttggtgggagtctcctctctttcctcgccttcttcagaatcttcctcctcggtttacctctgagccgccgatggtaaatgcccccggtcttgaatctcaaatctttacaagatgatggttccagaattgttctttgactgaaggaggctcatgttgagattgttcatgtttgctctcactgtagatattagttttatagaatctaaagttagttccatagttagtttgggatccacaccttcgaatctcactttgatcttcctacatactattttgttaactgttatgatgacattgggccaagtttgtgaattctagtaatatacttattgaggcccttttctcaaatagcaattgggccagccccaaacagaatcgtatatggtctttgatattttgtcttttcttcatagtaatcaagaatgtttaatgagcacatcaaacatttcgatgcaattttctaatataataatcgagtgttgccctacttttatttgatatttgatttcgatatcattagatcatatattctttagcagattagatttgatatgttaaagacttaaaagttcaatttaatgatggtaaacaacccacgggtgatgatattttactatctttttttttctctattgtacttttaagctttctattaacatagttcttgtaaacaaagactgtgattagaatagtccgaattatgaaacaccaatcgcaaccttaaaggtggaccaaaggggatctaaagagcaatagataagattctcaatccacggtccatttttttacgattattctttcttcttatttgtcctaacatttcttatttttctccttcgttaaaaagctatacaaaacttatatatctacagatgtaaaaaaagatagtattacaataaccccaaaaagaatgatgtattgattgaaaacaaagttgagtaagatattacgttcggtgcaatatattaggtctcatggtatgaatccaacatactattatgtgcaattgtgtttaaggcttaatgtatggtcatatgatttgatgacatacaaaaaaagattatactatttggttaaatgctaattaaaagattaatagataaaagttacacatgtttatataataaggtgctttcacagtagatagaccaaattgattgacaagtaaaatagtaaacaaaacaccaaagtgataaaaatatgaaaacgcgtgcatgtggaccaaggaggaaacaaaggtcggctattcaatttacgttgggcttccttcttagcccaagtcatgtggtattcaaaacgcaccgtgtcattcgttaattcgcattcaattgtttgtgttttcttttcttgttttttatagagactaaaatctcttttgcacgttattagaaacaaaacatatggatgaaagcaaccttcgttttcataatttgtttactgtggtcaaataataaagcacacgtacacaaaatgaatatgatgaaccaaattaacttaagagttaagagaagacatgtggggatatggttcggtcgcttggttgcttcctcaccatgccatgattcgacccatgatcaagacatatattacgccttacaaatgttttcttcgtctttcttcttttatattgtttcaagtctttctactttatatagaaacctagaaaaacagattttcttatgcttagttatttcgttaggcaaaatgtgcaagtcgtatactatgaattgtaaatttgaaactttaattagcgaaccaaaaactaatctcggtgaagtttttaaaataagatatatgttagtaattataacaataatgtcttggctaaaataaatttattttttgatatgttcttgtaagagataatgaattgagagtcaattctattttatgtaccttccataaaataacaaatcaatcgttgaaaaaaatcttggacggtttcaccatgcaaggtttggaatatattaatttcttgttataaattcaaaacacacgaagcatcgtaacatacgtcagaagatttacaaccgtgtcggtgtaattgggttaaagctaagcgacaaagagctaatagattcgggaactttactcatttcgattcttgacaattacactgagaagacttctctgtgactcataaaaaattaatactaaacaagatttgcttttacttttattgttctctttttcaacctaaaaagtccggtatcttttttgaaacaaagttttcttttggataatcagagttactgtttttctactaccttagattattgtactatccatttttctacctcggaaactaatacaatataatcattttgactcgtaaaattttaccccgagagtttttacgatctaaaatattattacataataaaacggttaaagaaattaaaagccattatgtcaaatttaagtagtttgatcttgtcaaaacaaatttagtgatgatcaatgctggaaaatatactttgtcaaagagtaactttcgtatacattatttcgatagaacgataacatgtagaaaagaatgtattaaaaatcacgaacaaaagtatggatggggaaggatactcaaatattatggatgcaggaaatctgtacaataaagatttcagatgattttcaaaacgtcgacatcattatttgccgactttaatttgacaaaaaaaatcgagcgatcaacgtttttcagttgcaaattcttttagtttaaactattgtggataagtcactctcgtttgatatgtgaaatatttctatgaatttaggcaagtgatcgattcattttcaaaatctcaaaaaaagaaaagaagcttacattttgcagcgtaggcatctgtacaagtttccaaagaaagacaaattagggaatttgtataattttcggcatgcgatccttcatgttaacgaaaaaaagctcagattttaatagtatctatttaaaaaatattttttcgtttgctccaaacaatgtaataataaggttttaggtggtagaaaagaaagatggatgatataagtactttctatgatttatgttggtaactttttttataaatatttaagattttattttcacgtttttcacaaaatttaatcaaccaaatagtacaaatcaaaattattatttaacagctatttgttttgtaccagcatgtcttatcaatatatttaccgtatgtaatcatttttcataaatatctaaactatattcctttttaccgcataactaacatttttgtcatcatcaaccaaaacaattcacaacaaaactttttgtcagtttggaccaaattgtatgaattcaaatatatctgccgggaaaccctagatcttaaaaataattacctagctttttattaacttgtaaaggtcatccaatgcaattaggaacaattaacctactagattataatagacatttttttaagaaaataaaatgaggtgatcatcatttatgtagtgaatggtagtgttattggttggtaaagagtacatatatattataaataaataaaagagtaactctttcgtataattgtgtcacaaaacgtctatacgtgacccataccaattcgttaacttctaaggacttgtttcaacctgcgattcaaaggtcaatcttattgcaaaccagacatgcattaatagtgaaacatccgtctcgtagatacgtgtgaaacataagtcaagtaatcgaataatgaggagatatgtatcacagaaagaggaggaaatatgcatgtgagagcatcaagaaagaagagagataaagaatggaagaggagggagagagagagcacatgcaaaaaggtatcccaactgccattacctaacattttcacgtctcaagattggtgaatggtctctctatttttaatcacccatgtgatctttttttcattatttatcttctttttctttcaaatagtaactttttgtctactagtatcatagtagaaagttcaaaacatttcggtcggagcaaatttccattagtaaatttatatctcatattttggaattttatgattctgaataaaagttatacaacaaaacctaaatttaaatgctaaaacgatgacttgtttatcaaaacttattcaaagcttgatatcgcattctaattcatacatttctaaccattaaaatcagttcactcccatatcatataaagagttatggtgtgggcttcttaaccagtaaatttgctcaaacttatataatatatgtatgaggataatatctgaatatgatttgttaactgttgtccggaaactgtcagaaaaatatatttcccgtgactatggggagagaagagatacagtaaaaggtaagaggtccaaacaacataagtgtaatgaaataagcgaccacatgtgatctggccattaccattgaccttcttccccaacacatgtgctgatatataacttctcagatttttttttttaaactgccaataaaaccttatatatgacgatattttggccatttgtttacaaaatgagtgctgtatggaaaaactatatgttgatctatttctcctgtgtgtgtttttttaaatagtatagatttcacatgtagtttttgtattttttaaaatatgatgttttacataaagtattttaatgtaaaatactagaacagatcagttaccatttttttaatgattttttggtaggactataacacatttaatttaattattaattcttgtgaaaactattttatttttaacgataattgtatattaaaatgaatcgaatatatcatattgtaatgaattacctattacctttgactcaaaagatagattcgctattgtttaatttgtcgcattaaaaatttaaaatgattctcctttttaaacaaaaataaactctacattaacactccttttaaaatggaggaagtaattagtgtattaaggatgggtagttgggaactaactacccctttttgtattgccaacggttttatagtgcaagagcgttgcaagattagatcaacatatttgcttctactgattcgttcattatagtatttataatttagaagatcaattaaatgatcacctatacttagcttcaattacttcaactccttaatggctatttgtgttcatagcatgcgactctcttacagcccaaaacttgttcgaccaacttcatattcttatttttgattctccttctgtaataatcatctcctcctaagaaaactctaagttaccatgatcatgttagtgatgcatgctacgtttgctcctataagagcctgtatccttgtacagtgaagtaatgaacccttgaaccaataaaatctgaagtttcctcaaaagaaacaactcggtatagtactcaaccactgcaagaatcaaaagtgccacccaattccaaagataaaaattgatgtattatcgcaactctaacaatggaatcatctggttggatagtaaaatgattaatttgacgtgtgccataaatagcattttgtatgcatttttgttgttgttttaatgtcgttattaagaagagtatgcttttatatctaacgtccacttttttgctatgaatgatatttgtttgatttgcttaagttgatactataaataaccgaatcatacaacttgagaaagaaataatcttcaaatctattaattatgtatatattaaatctattaattatgtgtatatatatatatatatatttaaaataatagatgtaagcatatatccacaattacaaatacacgtgtaagtaagtagttaacctcgcaatgtagctctctaggcccatgtggagatgagtcatacacaacaacttataatataaatgaagaaaccctattaaatcgcggattaaagtttggcgtacgtaaaaatcatattatattgtcgtcctacaggtatacaatgatcaaataaatataattatgtaaattcatatataagttaaactttgtttttgacctaaatccacacacacacaaaagtttgtcacttcaaatcaagcttgatcacatcattttatatacttttttgaaatctcttttaatatttcctttagttattttgttttttttttcccttcgcttttagttattttgtttattagtatcaaatgttggcttgttatatgttttgtaaataacatagaatctaagtagttaagttaaaaactttaaaatgttgtttacatttaccataataagtatatagctcgccaataagtaaaagggtaataataattattataaataataaaataataataattatatataattgtaaataataaaataaagagtgacataaatggagggacaaaaattggaatgaccggcaaagaaagagaccctggagagagagaggaaggtaagttagttggtcgttgttgacgtttcctttcgattcataacgaagcttcctctttctttatctttgaccctatctttttttttttttaatgttacatttttgtatatatattatttcacgtaactttaattcatatctctttccttttctttttactcactttcggtacttgttcttgaaattatcattatccaatgttttttttttcttatcttattgtatttctctggtctaaatttttggagaatcattctttgcgtcgtgtaagaaaaagggtttccgtgttcatatttcatttgttttaagtttattttctgcttgtttgataaataatattatatgttatccacaagcggttttcgaaacatttgtgccgacaagcaggattttgttttcttatgataattttcgtattaagaacaccgttactcattaaaaatacacatgatcttaacattgtaaaatgataaataatcactaggatttcacactaaaaccaaacaagaaatagaattgctcatgcatctgactatattaatttcttataatctgtagttctatatgtgttaccttaataattcattcatataagctatgtaacttgaaaaaatatagggtgagcactttttaataattttatctgaagtataaaatgatgactacttgcatcaactaccccgaaaccataaacgacaatgtttagtttttttttttccttgttaacagtttgatgtttggttaaatttatatggacccaagttttgaaggattgacagaaataataaataatgaaatagcacagtatccgaaccaattaattatctaatagcaacgtcatagtgtatataaagatttctcttccattactatgaagagaaatcaataaaatacacatttgaacttcgaatttgcacaaaaaagggacttcgttgcacatggaattcattaatttaaccatttatgattattttattacccaatgtgaaaatatcagcctttaggtaaggtcttttttttttttttttttttttcgttaggtaaggtctttttaatttatctgtaggggccaattctcacgttatcgtcgaagttgggtgaatctcattcaataacgttgatactaaactatgtttggacatttcgacttacatatatgtagtgattggtataatggtatatacactgttaacctcactgttttcaaatttttaataaattccaatatcatatagtaataacatatatatatatatatatatttcataaagctacaatactataggaattagaagattatgttcgtgatcactatgttctttagcgattcggtccactaaaacaatggttaaacggattacggatagactgactgttccattttgatatttttatttagtttatacacttttttttttggcaaagacaccttttttatttttataaactgttcctatcaagaattcagctttacttgatcaagaccaatcttttttttttttttttttttgtcaaaggatcaaaaccaatctaatcatctaataagagtgtaattatataggtaaacaaaacatcttttaaaacctggtggtgtgtttttctctctaatactataatatcaaatattgtaatggaaaatatattcataatctttcaacgccaactcacgaaaaagtaccaaagttatataaaacgtattaagcaaagattgttattgtacttccttaatgttgatagcttttttctatcctttgaaagacgattttcactatttaataaacatttgatactagtaaaaaatctaaattgtatatacgtatatgcgaatttacagtaaaatgtttattggcggcaaccaaaaaaaagaaaattatttatgttgatacacacgaaataaaaaaaacaaatcaaacacatacaattattacacaacaaacaaaatcggatagaatgagcggaaacaaaacagatcaaaacaaaatgttgaatcactgaagtacttttctaacaatgagaatgacgactgatctttatctctatttcaaatagcattgttctggtatatcttttgaatgatttcaaccataaatattctagtaacatgtggaattctaactagctttatatatatatataatgtatattaaatacataatgtatttctgtactgtatgcatatatatgttaaatcatgaaatgcaaacatatgattctctttagttattgttattaacagaaaaaaatttacattttcagataattgtactcttctcatgtctttaaaacatcatattagaggaatatttatgtacggaggttcacgtaatatagtgtataactgtaacttttcccaaagttttataatttcaaaaccaaaaaaaaatggaaacttttggttggtagatttttttaaaaacaaatctgccaaatcgatactttctttgtttaatggaccagtgataaatagatttagagaaagaacatttttaatctcttttacatttttaatagttagttccacattaacatgttctgccaattaatttgggggttaaggactgttcttgattcaaatatattttttgtttaattgtttaataaatttttggtagaagtttacttttgtaccagtgataaacagaatagtaattttatattttacataaaatttggtaggcattaactattgtaatcaaatttccttgataagcacaacaagatcagatgcatgtggaccctcatgatcattttagcttagatctccaaaataccataactgccgctggttattattctatgctatttagcatttgtttctaaatcgtttttatagttgacacttaacacatgttgacactactttagtacatagaccatagtttcaggttatttattgatttttaacaatgtatattagtatgatttatgaaaccatatatatttctctttcaacagaaaacacttattgtacatgtgacatattttgtcacatcttcgatagaaatacatatttttaataaaaacaatatcctaattcctaattaagaaattccggagatccaaggtgactgagaattcgcaatagagtaccatgaatcataaggtctaaaacttgcaatatgcatcggccagaaaagatgacacaattactctagcgtttgtaatgatatcaaaatactaaagaaagatgggataattatgcattttacgcgctagaaatatgtgtagtataattattttttggatttactgttgtaaaattcgtcagaaatgcaagtcactaaacaacagcaacaccacagttgtattgttatatatcagtataaatttatattcatatgatataaatttagcttctagaaaagtagctagtcactaatcaataaaaatgcataaaacttacactatcaaatgatttcaatttgcataactacaactcatggatttcatggtaaagaaacttagaagctactacaatagaccgtggactatttctaaacaaatgcaataatgaaactgtttaaaagctattaccaaattttacccgcaaataacattatatttgtttctggagccaaaattaaaagtccatttcctatcttgatttatgcttgtacccatactatatcttcaatgtttcgataattagtaattactccaatataaatatatatttttttaaagtttttgtttttactattactttttttatgtttaaactttttaactcactaatcttttttcttacaaaacctaatctacttttactctctaaatcggtggactatatatatatatatatatatatattctcttcttctatgacaaatatttgtctcatttatatttactttgactaatagcataattacacataatataatagcacaaaagataacaattcacttgtgaataaaaaaaggaacgaccgcatcgcatgcattagttaataccgttgctggaattgcggttcacagggctctataagtcccgtatccataggatccgacacgaaaatatattattttcctatatataaaatagaaaataaagttgagagataacagaagaattaaagttgagaaaattcgaaataaaatgataaaaaaaacattaaattactacaacaactcgtgggtgaaaaatgactttaaaacatattttaaaacttaacaatatcctattttaaaatttcaacaaaaaaaataatatagatatgaaaatccgagcattacagacaattagcttaggaaagagaaacatagtcctaatcaccaaatgttaaacacagtgtaagagattttgtcttctttcttttgtctaagattttaaaacaaaataaaaataacaagagagagagagagagaaagattagtttaagaattaaactgctaattaaatacgaaacagtaatcttctcttcaaatgcttataaaaaggcccttcacaatctctcattcaattcacacttcacatttggatatctctctaagtctctctatactttcatttctcgtttcataatattaggtaagtctaattaaatatctcatctccttaatttttttattcgctcactaatctctctacacctttcagctaaacacaaaacaaccaaaagctcaggttcttgtgttttggtcctctgtttatttcttgctcaaaaaacaaccaagagctcacttgctcttaatcacaaactgagacttttctcagtcttcctctgctttaactagtttacttgggacagattctgtataacataaacttaaatcaggacatgtaactgaaacatgtcaagtttctaaatttaacttgagttctaaaaccgttaacacaaacacaaagctgtatgctttcctctctgtttctatgctctgttttccattttttgctctctgtcctctcttgcttagtaaggtctgtttttttttttgcaggaaacttgttagtgtttaaggaaacaaaaggaagaagatgaagtatgtggttgtttcaggaggagtagtgagtggactcggcaaaggagtcacggcaagtagcatcggactcatcctcaaatcctgtggcttccgagtcaccgccattaaaatcggtcttattttcttcctctctctaacaaccatacttgtcaattctttcatgtaaaacgaacttgtcaccaaaattttttcttctcacgcaaagttcgttcctttttttgctcacttttgcttttgaattttttctcacaacttggagaacaaaagagaaaagtttcagatttgattttttttttccttggccccagtggttacaataaacatgaaaaaggacttctttttatttcctctaccttctcacgcgtgtgaaaaagggtacaacaaacaaaaagttcaaaaaagatctaagaatttccaaagatttaatctttttttctatttcccctgttaaaccctgtttaaagtttcatgattttttctaagaaaagttgaacacttttttggatagttactgtactaatcgctgattttaaggttggattatgtgcagatccttacttaaacattgatgctgggaccatgtcacctattgaacatggtgaagtttacgtcttggatgatggtggcgaggtatatacacacttttcaccaaattgctctgtttcttttgagaggaaatgttactaattaggccaacaagcaaaataaaaaatgtttttttttttggttgggtgtgttgataaaaaggttgatctggatcttgggaactatgagaggttcatggatattaagctgactagtgaaaacaacataactactggaaaagtttataaggtttgtgtctttgtcaaagtcatgaaaaaagtttggaatgttttatttttggtttttttaacttacacgtctgtgaacagcatgtgcttgagaaagagaggagaggagattatcttgggaagactgttcaggtacttaaagcttgataaacgtagaccatgtgtttgttgatattcatgagaaatagagagagatggaagatttattgaaagccctttgtgggctttttttgtaggttgttcctcatattactgatgctattcaaaaatggattgagcgtgcagctaggattccagtggatggacagtcaggtccagctgatgtttgtgtcatagaacttggaggaactataggtattaatctagttctcttcatagagaatttaagtcagtgtcaagttttacacagtttgttaaaaacatggagctactctttggattttgtaggagatatagagtccatgccttttattgaagctcttgggcagttctcatatcgcgtgggtaagtaatgttttgtgtattcattgaggtatatcagtgaaggtttacttaagatgtcaagattgactgatgtgtttttatatcttttttcaggcactgacaatttttgcttgatccatgtcagtcttgtgcctgtattgaatgttgttggtgaacaggcaagtttcttgacttttgaaaatttgtttcatctgtttggaattgtcgtcctaataatgtctaattcttacagaagactaaaccaactcaacatagcgttagagacttaagaggccttggcttgagccctaatatcttggcttgccggagcacaaaggtttcatccttgtgaaatgtttgattttggtaacgcttattcttcaatctgggctctaagttcttatattgaacttgattttgtagccacttgaagataatgtgaaggccaaactctctcagttttgccatgtcccggtatgtaatatttgcaagacaagacttaatctttctctttgtacatataaacattgtaatcacatatacctcatttgcagatggaaaacgttgtcactctctacgattgtcccaacatttggcacataccattgcttctcaaagtgagtaactttctcatccaccatagtttcaaagtttcagtaaacagttcttatcaccagtgtctttacatttcactttctttgagcaggaacaaaaggcacacgaggctattttccgtgtcttgaaccttgaagggtaagtctctcttactcatattctcaaatagattggttcatttcatttaaattctgattcttgtgggattcattgtgtgataatttcatatacagagttgcaaaggagcctgcattagaggaatggtctttgatggctaaaatgaccgacaaattgcatgttccggtgtgttcctggtcctaccgtgacatttcaggtttagtttatatcactggttttcagctggtgactgacttcattatgttttgagtttataggtaagaattgctgtggttgggaaatacactgagctcttggattcgtatctttccattcacaaggtaaacctttgcaggatacatcaatcccaacaactttaaccacaaatctaaggcctttctatgatcgaactccacacaagccatagtctataatatctcactatatcaactgtggtatttaataaaaggaattcttgtgtttgatgatcaggctctcttgcacgcttctgtggctaggcgcaagaaacttatcatagattggatttcagctagtgatcttgagcaaggtgcaaaaaaggaggtatgtttacactttacactaaagctctattacttagacaacatatgaaacgtaagaaactgaagcaaaatgatttctctctgcagaatccggatgcatataaggccgcctggaagttactcaaggtctgaacattctttcattcccatcaaatgaatcctgatttcttgtgtcgagataggctttccgttgataggttttatgtaattattcttcagggtgctgatggcgttcttgtgccgggaggttttggcagtagaggtgtagaaggaaagatgctggcagcgaaatacgccagagaaaacagaattccataccttggtatctgtctaggtatgcaactcgctgtgatcgagtatgcaagaaccatactcggtttggcagatgcaaatagcactgaacttgatcccaacaccaaaaacccctgtgttattttcatgcctgaggtttgttgccttccacattttctgtttgagtttcagttacttcactctatataagtcgcgattatattccgtgtaatttttgtttgaagcaggggtcgaaaacgcatatgggaggcactatgaggttaggctcaagaagaacttattttcattctaaggactccaaatcagcaagactgtaagcacgaagttctttctccacccaaaagagtttcatctttatgcatctttgagcttaacctatatattatgatgcgtttgaatgtttcagatatgggaacaaaagttttgtagatgaaagacaccgacacagatatgaggtatttaagcatccgacacagttttgtggcagctctcagagtatacaaaaaaaacgcatctctttgacattttaagctaaaacaagatgctttcttacaggtgaatccagccatggttccacgttttgagagctctggactcacattcacaggaaaagacgagacagggcagcgaatggaggtaaaaacggatcttttacaccacaaaaaatttcatcttcttgattataattcttgacatttgaaaatacagatcattgaactgcctaaccatccgttttacgtcggagctcagttccatcccgagtacaaatcaagacccggaaaaccatctcctctgtttctaggtgaagagaaacataaaaataatgcaaaagccctcggtttctttcttcgtgtaagcacataccttaactaaaacctttttttgaattaaaaattgcaggactaattggagcagctagtggagaactagacactgttctgctacaaagctaccaagaaaccgtcgttccacgttctctacccaacggaaaactagagagagtttactggaaaggtgcagcgaagaagccagtcagtgttgtgtacagtttatgtgatcgtgtctactcgtgaacaccgtatctgcatcaacaatgacttctctctaaaaaagctatttatccggaatttttaacatggatttcttcacctgtggagggagagagaaggcaatgagtttgtacagtttgaagattggctttttatgagatgcttttcttaagattatgaagtagaagatgaacactaagcacaagcagcattaaaacatatattacctttgtcttttgtaatgggtagtattaaagagagtcttgggattgactctctgtctccgttgctgtgtttcttagattcttatgtagtagtattaatcagtagctttttccttttgctcttttttttttttgggttgttatggtttaaccatttccagagaagtaccgatgtttttccggtacatagtttgatttctctgtatgttaatgtagccttattctcatgttatttgaatggttataaaactagttctctttttacttgtgttttgatttcacaaaatggtgcatctctagaaggtcttgttgtatgtcctttcttgaagttggtgaaaatgcaagtttctcgacggttttgtttaatccgttggacttgtcgtgctaaaaatgtctagtttcttagcgaagagactaaaccaactcaaacaaagcgtttgagacttaagcgggcgtttctttttaagttgttatgggcctagtcttttttggtgatagcgcaggcccatatttaaatgcgcgcgctacttcggttatggcgccaatctggtgaatataatcgtcgcttctctgtttgatccaaatcttttggggttgaatattgtacaccaactgttcgatgaaatgtcttacagagatttcgtcctgattcatttacctcactaattgcgagccttcttgccgtcgtcacggtatgctacctaattggtgttaagggttgtcgtaatcttcaatcttttctcgcctagctctcgttttaggcttttgtaaagtttacttcagttttaggaaagagtatcgtcttctatgagtttgatatagcttgtacttggctcggctgaattatggctctttaacccttccttgggacttttgtcttattggtgtcagaattcgtagaaatttaggtttgctaaagcttgaagatgagttctactgtttggtgggaaggagctgagaagacacgagttctcatagccccaggttctctctttaactatacattctgttctgagacggatttgcaaattagatgctgcaatggtgtatgaatgtctatgaaaaatgttggtcaatgtttatatatcaatgattggcgaagttagatttgaataagaaatgagctttagttatatccggtaagcttatgtagactgtttagttcgttaaatagatatactcatcataattgaaaggatgtgctgatgactatttaaagttgaatctttccttggctatgatagttggaagtcttagatgctttaaagaagaacttgaccatttttttgcttcatatgtaaagattcaggttgtggcggaaacaaacccggagaactgttaacactccgccatccaaaatcaggtaatgggatgttgatgattgtcaggcttgctatgttgtgttttggggaaaacttcagctagtaacatcttttgtggtttggtatctttgcttctatgccagaaaatggaacatgcttcctttttaataatgagatgcttcaagaacttcagtggtttaagcaatcttatggttcttggttcttgggagattacatatctgaaggtaaatgctaaatttcgaatcataataatatgtgagccagcatcaatgtttatacaaatattatattccttatgttcatgacggtttactatttacagatggaagcttatatatggccactccagttgatcctgttttcatattgttgcctattttcgacgaagcaagaatgaaggtcactctatgatcctttgctcttctcaattcattatgtcctgtctgatttccatttctcagaaatgttgatagtgttcttaaattgtcgatctgtagaaaggtgaaaattctggaaagttcaggcaactagatgagattttatttgtggaaggatatcctggatatcaacatttgttgtcacttgcagagaagtgtatggaaatcgtttgtcaaactcaaggtacattcccactgtttagttatggaagtcatagttgcacacacttatcgaaaccataattttcagatttcctggtctttcttcttgtagaattttttaatccttcttatatgcatattatctgtatgtttctcatcactcttgaagagcttggtgatctctagttgttcaatttcctcattctcttgttctcttcttgcagaggttggatcgatgaagttctatcggcttgataactcgaaagtcttagcttggttaagttgtaaggtatgctcttgtcagaagattatttattacagtcttctctacaatccagttgaaattttcatgatatattcgccatttgaaagtgatacatgggtctgaatcactatgttttgtgcatcacatatgtttcagggatgaggcatgtctaatgcttatatatctttttgggtattgcctaacgaaaattatttatttgcagagaagctgatttaatgctgcctgcactctaattgttttttgtttggcattctataattcttgtctttctgcatggatttgaagaaaagagaatgcaagtaagctcgtatctgttttatttagatccttaacgtgcctgcacttttatgaacgcagatctactgtttaaa
